United States Patent Application Publication US 2020/0377945 A1 - sequence listing, part 55

SEQ ID NO: 12146 - DNA, 257486 bp, Unknown
  gut microbiota DNA sequence
ttgacatcccctcgaagcgctgttatttttgtagaaaaggcggcagcagcttgcgccgctcccgccttaaaatatttttgctctattttgcaccacaatttagcgtttacacaaaatttgggattgacccaatatctccatagcagacaacaacaacttgtcaccaacgtataatacggcaactaagacgagatttatagcaacctggactaacaacgttcgtattactattcttgaaaaagaagataaccgttctgacgattcttttctctcattcagtctaaaagcagctttcttaatttgaaactttaagttcctgtatttttggcgaataagccaataccatttagaattcataacacgcctccgaactacggattcttacttgaaatataccacattttagtattccacacaatggaatgaccaaattcgtttctttagctggaactgcaatgaagtctatatgtattagttcaactttgcctaattactatattcggaaagtagatgtacatctcgtacatctactttttcatatcctacaccattatttcatagatttccttggaggcgattctatgcaaaactcaaccttgatcctgaccgagcagcgaccatcccacgacaagtccacaaccggcgctattatccaacaagccatcacaacatggctcacaaaagaactgtccaaatgatccctgcgctacgttttagcggcgcagggatttcaaataatttcttgccgaatagctgctcatgtgctacgattcaagtgagcagttatgccttgaaggaggtgtaactatcctttgtgcgatttatacacgactgagtaaggaggacgaagacaaaaggcagcctgaatctgaaagcatccagaatcagaaatctttgctcatcagttacgccgtagagcgggggtgggacgtctaccacatttactgcgatgaggattactccggcgcggacagtctgcggccggacttcaaccgcatgattgaagcggcgaaagaaaagaagttccaaattatcctctgcaagagccagtcccgctttacccgcgacatggaactggtagaaaagtacatccacacgctgtttcccatctggggcattcgttttattgcggtagcggacaacgccgataccgaggtcaagggcaacaaaaaagcccgccagatcaacggactcatcaatgagtggtatttggaggatctgtccgagaacatccgcatggtctttgacatgaagcggagacaggggcagtacatcggcggctttccggtctacggctatcagaaagatccgaacgacaaacatcatctcattgtggagccggaggcggcgggagtggtgcggcagatctttcagtgggcgttggacgggcacggcaagcagagcatcaccttcatgctgaatacgcaaggcgttgtgaacccgacccgctacaaggcagagcggggatggagttgcaaccatcccataaaaaatgactatggcctatggaacaagaacacggtatggcggatcctgcataacgagatgtacattggcaacatggtgcagggccggacaaaaaaggtgagctacaaatccaagacactgatcacgatgccggaggaacaatggtttcgggtgaaggggacgcatgaggctatcatcgacgaggaaaccttccgaacggtgcagagactgatggcagtacgtacccgggaggacggatcgggaacgatccatcctctggcgggactggtaaagtgcatggattgcggaagcactatgagtaaaaccagcaatggcagaaagggcgcaaagcgagtcagctatcttcggtgcaagctatacgccgacagcggggaacaaaagctctgtacccgtcattccatccgcttagatcaactgattgagctggtgttggaacggctgaggtatcatgtgcagacctactacacaccggaggaactcaacctgccaacgccggaaaacacccggcgggaggtgctgcttcaggagcagaaaacactgctgtcccaactggaaaagcgcagcgcggctttgaagaatctgtatctggataaggtctccggcgttttgagcgagggacagtttgtggatttgaaccatgactttcttgctgagaaaagccggctggaacggcggctggcgcaaattgatgaagaattgtcggaatcagcacagccgcaggaacaggcagatctgatggaacgggcgcaggaacttttggaactgaaaaccctgccgagggaactggcggtggcgctgatcgaacggatcgagatcggtgagcgagatgcggaaacgggcgagcaaaaggtaaatatcgtgtggaaattctgagttcaggtaccatgaccacggaattgtgccgtctaacactcgtggcgacgcggtgtccttatgttacactgcccacgtcgtagagccgaagtacccggcggctgtggatcgctatgtggatctggggcggttttacgacctgcctgccgccaaggcacaggccggggaggtgaagcgccatacccatgactatcaggacgcctatggccgggcataccgctgtctgaaggcggctcggcaggtggaattggatacggtcgccgaggccagccgcgtctttgaccgccagcgggcggtccggcggttttccgggatcatggccagggagctgcgaggccgggggagcggcacggggaagatcactcgccgatttttggggagcctgacctaccgggggccggtctggcggttcgacagcgtggaggccctgtgccccaaggtctacgaattggaggacagctatgagcaggcgggggcgctgctggcggcgctgtgtggggaggccactcgccgggactatgacgtgaccgcctgtccatccacagaggagccggggcagctggaacacctgctgatcccggagctgggcgtggcctttgtcacctccaggccgggaatggcgtatccggggaagccctaccgccgagtgcggctggacgccctgagccacccggagaacaaggcccgtctgcggttccgcgcccggatgacgggagtgctccgggaagagggaatcgccgcactgcaagaggccaaggcagcccacgatctgctggagggcgtctacaacccgtatgtggattttgagggcgtccgggcacaggcggcattggaggcaggccgcttactgagttggatgaagtgaaaaaaccgtgctgttttataaacagcacggttttttacttaacattgttcggttttcagttcaggaagtccttcagcttcttgctgcgggagggatggcgcgtcgtcggggcatgctgcgtatcactcgttttcacctgcggtgaaaattcgtttgcttcgctgcccctcctcttcccacgcaacccgtttcactgggcttgcgcgggagccctaaagctgcgccaacggtatcggcagcccagcgggactgttagttcaggaagtccttcagctttttgctgcgggagggatggcgcagctttctcagggccttggcctcgatctggcggatacgctcgcgggtcacgttgaactccttgccgacttcctccagcgtccgggtgcggccgtcctcaatgccaaagcgcagcttcagcaccttttcctcacggggagtcagagtggacagcacatccatcagctgctccttcagcagggtgaaggacgcggcctcgctgggctcgctggcgccctcgtcggggatgaagtcgcccaagtgagaatcctcctcctcaccgatgggggtttccagagacacaggctcctgagcgatcttcaggatctctcggaccttgtccacaggcatattcatctccttggcgatctcgttggggctgggatcgtggccaagctcctgcaagagctgacgggagacacggatgaccttgttgatggtctccaccatgtgaacggggatccggatggtacgggcctgatccgcgatggcgcgggtgatggcctgccggatccaccaggttgcgtaggtggagaacttgtagcccttggtataatcgaacttttcaacggccttgatgaggcccagattgccctcctggatcaggtccagaaacagcataccgcggcccacataccgcttggcaatggaaaccaccagacggaggttcgcctctgccagcttctgcttggcgctttcacccttcttaaaggccttgcgaagctcagcctcttcctccggagtgacggcgggcgtttcaccggcctcacgctgctcctgcagctcgtccagacgggccttggcctccgcgcctgcggccatggcctgtgccagcacgatctcttcatcggggttcagcagggggaccttgccgatctccttgaggtacatacggacaggatcgtcgatggagaagttgctgaccagagagttggggtccaccagctcctcttcctccacgtcggcaatctcctcggcggcaggctcatcgtcgggcagctcggggaggagatcctcctccgtgccgatgtcgatgttcagcgcttccagagaatcgtaaagctgatccatctgatcgctttccagattcagatcgtccacggcctccatcagctcgccggaatccagcttgcccttcttcttgccgcgggccagcagttcccgcagcttttcctgccccatcagccagctggcggcggggagggcagcgacctgcttatcgtccagacggacgatgccggcctttttggcctcttcatccgtcatgatatggtctgcttcaggacgggcggcctttgcggccttaccggaacggctgctctttcccggcatcgggatttcatccggaatatccatgctgtcggcagcggccagcagagcgtcggcctgcgcctccagactatcagggctcaaatcacgtttagacatgttgctttcctctctttttgttcttgaatttttccacagcggccagcagaggatcatcctgtgccgttcgcttatccgcttcgctgttgatcacatctatgtaatccgtcagagcctgctgcgcatgctgcgtggatacaggctcctgacagacggcggtgagacaatcgatctcctcccgggaaaattcctctcccagagatgagatcatgggccggcttccggcggcatggacctcccacagccgttggtaagcccggctcaataggggggaggagaaccgctccggcgggatagggatagtgtcggaaaacagggtgtcatccgtcagcaaaagacggagaatgcctttttccgcttctgcggaacgcatattttcaaagcgcagggatcgctccttgggctgcaaggccattgccggattcagatccttccgcagctccgcccgcttttcccgggcgatccggcgcttgaaggaccgttgaacctccagcttcatggcctccgcagtgatcccggcggcctcggcagcccgcccggtatagatctcccgctccacggcaccggggagggaggccagcagctcactgacctctccgcagtaggcgatgcgggcttcgtcatccttgagatcatattttccggcgatctgagccatgcggaattccacgccgttctcgctgccgttgagcaggcgctcgaaggcgtccggtccttgaagcttgatgaaatcgtcggcgtcctgcttgatgtattcaccgtccaccagacggcggggaagctgaagcaccttgacactgaactcggagccgttcaggatctgcaaggcccgctccgtggcgatcttgccggcgttatcgttgtcatagcagaggaccaattccttggtgaaacggctgagaagccgggtctgctccaccgtcagcgccgttcccatggaggccacggcattatcgaagcccgcctgatgcagcgtgacgatgtccaggttgccctcgcagagaatgatgttggggcgcttggacttctttgccagattcaaaccgtacagcactcggcgcttggagtataccggcgtttctgaagagttcatgtattttggctcggacttgtccagcacccggctgccaaaggccaccacatcgccccgggtgtcgatcaccggcagcatgagccggttgcggaatttatcataaaggccgccatttttgttctggaccaccaacccggcgtccagcagttcggacttggtgtagccctttttggtcatggcggtgagcagtacgtcccaggcgtccagcgaggcgcccatgccgaatctgacggcggtggattttttgatctgccgtcggtccagatagtcctgaacggcccgaccctccggctgctgaagaagctggtagtaaaatctggcggcatcccggttcaggtccagcagacgctgccgcctgcgtccggcctcccggtcgccttcctcctccgggacctccatcccggcccgcttggccaggaaccggacagcatccgggaaggggaggttttcaatgtccatgatgaagttgacaacgccgccgccctttttgcagccgaagcagtaatagatctgcttgtccggcgagacggagaaggagccggtcttttcactgtggaaggggcacaggccgaacaggttgctgcccttgcgggtcagctgtacgtaactgcctaccacgtccacaatatcactgcgggcggtcagctcgtccataaagctctggggaaatgccacggccggtcctcctttcacgaattaaatggtcacattaagttataccccgcaaaaggcgaatttcctctttttttaaaataaaaatttaatttttttatctgtgtgcctttacatggggaaaatccggctgtaaaataaagaaaaatagaaaaaaagacgaatatggagggaaaatatgccgatccaggtatggctggccagaatggaacggccgctgacggaacaggaatacggagatatgatggcccttctgccggacgcgcggcgggagcggctggaaaaattgccgaaggaaaagcaccaggaggtgctgtgcgcctatcttctgctgcggatggcattgtgggagcagcgcggctggcgggatcttccccggatcgaggtcgatgaactgggaaaaccctttttcccggaccatccggatacccatttcagcctcagccacacggctggggccgcagccgccgctttagcggacacgccggttggggtggacatcgagcgcgtccgccccgtgagcgtccgggccatggagcggatcgccggcgttcggacagaggcggccttctttcggagctgggtccggcgggaggcccgtgtcaagcgcaccggcagcgggatcgtgaccatgatgcggacggaagcgccgctgaaccggggggagttctactacgaggtggatgcctttcatggctacgcggcgggtgttgctgccggacagccggagccgccgcagccggtgcaccgtctgatgctggaccagctcctttgacagcttgacttttgatgtgtattcgatataataaataaggttaaacacaatcaaacgcgggatcgtttcagacaggaaaatgaggaggcaatcacgatgacatatcccatcgaagtggcaggcttgaagagagaactgcctatctgcaaggtaacggatgacctgtatatcggcgcatttatctgctttggcgacgcggagctgactgtggcctgcgcccgggagcttttgaagctggtgcctgccgacagctatgattatatcttcactgctgaggctaagagtatccccctgatccatgagatggcccgccagtccggtgccaccaagtattttatcgcccgcaagggtgccaaggcctatatgccggaccccattcatgtggaggatcactccatcaccaccgccggtacccagaagctgttcctgggccgggacgatgcggacctgatccggggcaagcgcatcctgatcatggatgacgtgatctccaccggcggctctctgaaggctatggaggccctggtgcaggaggccggcggcgtagtcaccggcaaggttgccgtactggccgagggtgacgcggcggaccgcacggacatcaagttcctgaaaaagctgccgctgttcaatgcggacggcaccgtgaaggactgatacagattgaaaagaaccagcatggagcatcgctccatgctggttctttgtgcgtcaacgggtcaggaacagtcccaaaacggcggagagcaggatcaccttggggatgctgaccttaaatttcagcagcaggaccgtggcggccacgccaatcagagccgcaccgtaactgatgctgcctgcggcgttcgtgtagttggtcgcggtcaatgagcagactaccgctatgatcaagcccaaacaggcggggcggataccgtacatcacttttttcatgaaatcggattcccggaatttttcaaacatgacggcggcagccgcgcagatcagcagggtgggggacaggacccccagactggcggagacagccccggccagtcccgccacacgggtcccggcaaaggtggcgcagttcagccccagcgggccgggcgtcatttccgcaatggcaacaatgtcgctgacctcggaaagggtcatccagccgtgggacagcatttcactgttgatgagggggaccatactcagtccgccgaagctggtaaagccgatcttgcagaaggaccagaacagttcaaggaggatcatgagcggcctcccttccggcaatgccagacggacagcagccagcctgaaaatccgctgatgagtacgatgaggatgcagctcagtccgccgaacagatacagggcgaaggccagcagaagaaagacataccctgcccgatctgccaacgcggctttccgcagtttcaaagccgcagaagccacaacaggcgctacggcggcccggacgccggtcatggcccggctgacgtacaggttatcctttacctgggcatagcaccaggtcacgaccgtcagaacaatgagcgagggcagggagattcccagcagacaggcgagggcaccgggaaagcccgccacatggtagccgaacagataggacacattgccgatcatcagtcccggcagactgcggcccacgctggtgatgtccagcaggtcctcgtcggtgatccagccttttttctgcacatattcctgctggatctgggccacgatggaccagccgccgccaaaggtgtaaaagccgattttgaaaaaatacaaaaatagttccaatgcccggctgcattgggagggagaccgctgtgcttcagattccatgtgcgtgtctccttaatgactcttcttaaaagtgagatatccctctaaaatcagagaggctgccacggcgtccaccactttcttccgctgcttggcgttcttgccgctgttgaagaggatattgtgggcgtcgatggtggtgcggcgctcatcccagaggatcaccggcagggccgtggcttcctccagcagcgctttcatggcttttgccttctcggagcggggtcccagagtgccatccatattcacgggatggcccagcaccagctcctccgcgccgtgttcctttgctatgagggctacctgctccaccaccacctcctgacggcggctgttgatcacggtggtgaatccggccagcaggccggtggggtcggaaatggcgatgccggtgtgggcgtcgccgtagtcgattgccataatgcgcatagtgtaactccttatgatagggggatgaattgttcatccacaggataggactgagtgtccgaatagtgccaccactcggcggaataggggcggaagcccgcagccgtcatggcgctttccagcaggcgagcatttgcggcggcagcagcttcgacgtcactgtaatcccggtctgccagagcggtgaaatcgtcaaagtctgtgggcatgtccacgggctgaccgtcggtggtgaccagcgtcacgtcaacggtgtttccccgactgtgcgaggaaaagcccttttccgggtttgccacataagcgggatccggacagatctcccagagccggaactgcgcggaagcagggcggaaggcgtcccagatcagcagggaacagccgctttccgcaatggtctcctgtgccgccaccagcttctgcaccgtaccgtaccgaaggtaggcgtctgaaaaatcatagatggcctgtccggtgaagttgttgtcggcggcgtagcgcaggtctgtgtatatatcagggatccagtccgccacacggacaaagtcctccggtgcggggatcgactctgttacctcggcaggctcggagccctcgtccggctccgcctcggcgccgtctcctgacgcggcgggcgcggggagcgggtcggccggtgcttccagagacggttccggcgttgacggcatgggagattcctgaaaagcgccgcagccaacaagccagcataggagggacaaactgaggggcaaccaatgccgatgcacctgcttcaccgccctttcacacattttttacatggtatcataccgcccctgcggatgcaagccggaatcttacagaaattatcgaacatctgtttttcttgttgcggtttggcggcaagtttgctatactatttttaattgagaagaaaagagggacactgtgcggatcttaggcatcgaccccggctacgccaccatcggctttgggctgatcgaaggggagcgggcacaatacagaatggtgacctatggggccatcaccaccccggcggggctgcctctgtccaaacggctctaccagatcgaccgggacatggaggagcttatcggccagctgaagccggatgtgatctccgtggaggagctgttcttcaacacgaatatcaccaccggcatcgccgtggcccatggccgtggggtgctgctgtgcgccgcggagcggtgcggcatcccgctgtttgagtacacgccggggcaggtgaagatggccgtcaccggctacggcaaggcggagaagcggcaggtcatggatatgaccaagcggctgctgaaattggcgaaaacaccccggcccgatgacgccgccgatgcgctggcgctggcgttatgccacgcaaggagttctacttcacggctcccgcagatcaagccggagaaggaaactgtataaggagaaaaccgtatgttttactatctggacggcaccgtggcggagatcctgccggggctggccgtcatcgactgcggcggcgtgggatacgcctgcatgaccaccaataacaccctctcccagctgaaaaagggggaaaagaagaagctctacacctacctgaacgtgggagagagcatctttgatctctacggctttgccacccagaacgagctgaacagcttcaagctgctgctgggggtgtccggtgtgggacccaaggcggcgctggccatcctttccgccaacacgccggagggtctggccatggccatcgtcacggaggacgccaagtccctgacggcggcccagggcatcggcaaaaagatcgcccagcggatcattttggaattgaaggacaaaatggcgaaggagaccgcctccggactggatttctccggcggaaagggcgcggcggtccccgccgtgtttaccagtaaggccaccgaggctgccgcggcgctggcggtgctgggctattccacgcaagaggtgcagatggccctcaagggtgtggatgtggagaatctgccgttggaggagatcatccgccagagcctgaaaaaaatggtgaagtaatgggcaatctgcatggactgttttacagtgtaggcgcgatcgcgggcattactgctgcggcgctgtgcgcggtgcttgttatgtggacgctgcgggatgccaggcgcggcgccatgcgggcggtgaccattgcgctgatggtatgcctggcagtgatggcggcctgtatcctgggcatgaatttgacggcatagggaagtgaagctgtgagcatcgactttggaaatgatatttacgaggagcccatcgtggccaagacctttctggcggaggacgcccaggaatcctctctgcggcccaagaccctggcggagtacatcggtcaggaaaaggccaaggagaatctgagcatcttcattcaggccgcccggaagcggcaggaatctttggaccacgttctgctccacggcccgccgggactgggcaagaccacgctggcgggcatcatcgctcaggagatgggggtcaacatccgcatcacctccggcccggccattgaaaagcccggcgatctggcggcgctgctgacgaacctcaacgagggagacatcctatttgtggacgagatccaccggctgaaccgttccgtggaggaaattctgtaccccgccatggaggactacgctctggatattatcgtaggcaaggggccgtcggccaactccatccggctggatctgccccatttcaccctgatcggcgccaccacccgggcggggcagttgtcggcccccctgcgggaccgcttcggcgtgacgctgcggctggagctgtataccccggaggaactgtcgaagatcgtcacccgctccgccggaattctgaactgtgatattgtaccggagggcgcctacgagatcgcccgccgcagccgggggacgccccggatcgccaaccggatgctccgccgggtgcgggacttcgcggacgtgaaggccgacggcgtcatcaccaagcaggtggcggacgaggccctctgcgcgctggagatcgactatctggggctggacccggtggaccggcggatgatggcggccatcatcgaaaactacaacggcggccccgtggggctggagactctggcggccaccatcggcgaggagtccgtgacgctggaggacgtttacgagccgtacctcatgcagttggggttcctgacccgcactccccgggggcggtgtgtgacgcaaaaggcgtatcagcacctccataagcccattcccggcggcgctgcagagggtccgctgatggatcaattgaccttttaaaagcgtcattgtgggagagaaaacttaaagcaaacgattttctccataatttcactaaaaattttctgatttattcacgagaattttatattttgcttgacatttcagcaacaagataggtataatacattatgtgcaaagttccaaatgaaaaattgaatttcccggaagcattgaccgatgaggagctgtgccgtctggttgccgaaggcaatcgtcaggcggaggagattttagccgcccggtatatccggttggttcgcacctgtgcccgcccgtattttctggcaggcggtgacagtgaggacctgacgcaggagggaatgctggggctcatcaaggctgtgcgggaattcaatggcaacaaggatgcctcattccggacctttgccgagatttgtatacgaagccgactgtattccgctctgcgttccgcgggacgggagaagcatcaggtgctgaaccagtcggtctcactggatactcccgactttgacagcaattcctacacctctggcaccaatcatctggcgcagcgcgaccctgaagatgaccttattgacagggagcatacggcagccctcttatccggtgtccggaaacagttgtccgaatttgaagcgaagatcctggggtactatttagacgggctttcctgcagagaaatcgccttggaagtgggcaaaagcgcgaagtccgtggacaacgctgtgcagcgtatccggcgcaaggtggcacagcaaattctttccggcgaattcagctcacgctgaacgcaatatatttttcttttcaaagagagggtaaaatcatgtacgaagacaagaccttagtgtgcaaagagtgtggccaggagttcgtgttcaccgctggtgagcaggagttctatgctgagcgcggcttccagaacgagccccagcgctgcaaggcctgccgtgacgctcgcaagaacgctgcccgcggtccccgcgagtacttcaccgctgtttgcgctgcctgcggcggcgaggccaaggttccctttgagcccaagtccgaccgtccggtctattgcagcgagtgcttcgccaagatgcgtgagcagggctaattgaacgaacgattcgttttgtttcttgctgaaaaacagcgcctgtcgaaagacgggcgctgttttcgcttccatctctgatgacggatccaaagtgtcacgatccgggtccatatctcttccgtgcctgaaaatacaagattacatggaacaggggggagcggggcactggtgacggatgaaatttaaagaaaaagcagactctgcgccggatctcacttgcggaataacgagatctgcttctgatgatgcacgcggagcgggggttttccggggaaaatgccctgaaaacggctgaaatcggcaaatattatttttttcaaaaaaccccttgacaaattcttgttttccggtataataatacctgttcgtgcgacatgaacgagcaaatatagcgggtttgtgtaaaggtagcacagcagactctgactctgtatgtgagggttcgaatccttcacccgctgccacaaaagtcctgaaaccacaaggtttcaggactttttctttacttcccggaattgatttcttccggaccattccctgcgtattttacacttttttctgaattgcctgttcgaccaaaagctgaatatacccggactgtttggatggcgagttgctgtgttttttgcgtatgtgtgaaccgtttgcctgacgttttttcaacggtgattcagagaagatggaagggcatcacggatctgtgccacaggtgttcagtttttcctatatggttatttgtccgcggctgtggtatagtcaaagtagagcaacatcgatcccgataatgagatcatttttatgaattttatgaaagagaggactgtgaccatgaatcgtgaatgcattttagagcaggccaagcagcatgacagcttttatctttatgaggaggctatcatccggaagaatacggaacagctgaagacggatttccccggtgtgactttcctgtattccgtgaaatgcaacccctatccggaggtcctgcgctgcgtactgaatcagggcttcggcgtggacgccgccagcctggctgagtgcgttatgggccagaaggccggtctgggcaaggacatggtgattttctccgcccccggtaagaccatggcggacatccggggcggcttgggcatctccacgctggtggctgacagtgccgcagaggtggagcgcattcaggaggctgctgcggagcagggcattgtggcggagatcggcctgcgggtcaaccctgacttcacctataccgccgataccggtgttgcttccaagttcggcattgacgagcagctcatctatgattctatggaggcttggaagaggctgccgaacatccgcatcgttggcctccatgcccacctgaagagccaggagctcagcgctgagactctgaagggctattatcggaatatgttccggctgtctgtttccatgcgggaggctttcggcaccctgaagtttgtgaacctgggttccggcatgggtattcccttctgcgagacggataagccctttgatacgacggctctgggtgctgagacccagcggctcatggcagagttccaggaaaagctgccggagacccgcttctacatcgagaccggccgttacgccgttggtaccgccggtacctacgtcgccaaggtggtggacaagaaggtcacccatggcaagaacttcgtgctgctcagcgccacgctgaacggctttgcccgtccctccatggtggccatgctggagcacttcatgggcaatggccccatcgccgcatgggagccgatctacaccggtgaccactccttccagatgatccccctggtggagactgcggagcgggagaccgtcaccgtgacgggcaacctctgcaccggtacggatctggtcctttctgatgcggacatgcccaagatggaagtgggcgacaccgtggtgttccccaacgccggctcttacgccgccgttatcagccccatgcaatttgcctctcagcccaagcctgcccagctgttcctgcgggctgacggcactgtggtgaacacggatttctaagtctgtaagctcgaaagggcacggccctgttaaatagcgtgatattcaatgaccggcggagccagctatgctggctccgccgagttttttatcagtcagttcttgaggactgccgccatgagccgctctggaacattttcggaacaagacttgcatttttccgggatttgtggtagtgtaagcacagaatttgaaagatttgcccgggcaaatctttttttcatgtgaggagaaatcatggaaaatcactttgagatctgtatgacggaggaccagcttcggggcatcagttccatcggtctggcccacatgggggatgcggtgtttgaactgctggtgcggggatggctgtgtcagcacggcaaagccaccggcaaaggactccatcaggccaccatccagctggtacgggcggagcatcaggcggcctgcgcggaaaagatcctccccatgctgacggaggaggaactggctgtgttccgccggggccgcaacgcccaggtccattcgatacccagccacgccagccgtgcccagtacagcaccgccacggcgctggaggccctgttcggctggctgtatctgggcggacagcgtcagcgggccagcgatctctttgacgtgatgatggaggaataagaaatgcctttggacgcaatttccctccgggccgtggtggaggaactgcggccccagcttttgaatctgcgcattgataaggtgcagcagcccgcccgggatcaggtgatcctgttgctgcggggcaacaagcggcttttgctgaatgccggggctaatgccccccgtctccagctgacggagctgctgcgggacaatccggcagagccgcccatgttctgtatgctgctgcgcaagcatctggtgggggcacgggtggcagagatcacccagccgggtttggaacggctggtgcgaattgaactggacgtgaccgatgatttcggtcagccgggccaccggacgctggtgctggaggccatgggccgccgctccaacctgatcctgctggacggcgagaaccgggtcatcgactgtatgcgccgggtggacgcagagatgtccgcagcccggcaggtactgccggggcttttttacgagcctcccgcctccacaggacggctgccctttttagaggaaacagaggagggccttgccgaaaagctggcccaagtcaatccggagatccagctggatcgcttcctgctggacgcctatttcggaatttcgcccctgatggcccgggaactcagcttccgggcctgcggggaaacggacgggcggctctgcaatctggacgaggccggaagaagcccttttcaggacgctttctttgcgtttgcaaattgtgtaaaggaaaaccgctttacgccgatcgttctgaaacgggagggtgttccctttgaattttccgccctgccggtgcaccaatacggccttgcggcggaaacggagacctttgagagcttttccgctctgctggacagcttttatgaagccaaggagcggcaggagcgggtgcggcagcggggagcggacctgatccgcaccgctaccaccgcccgggaccgggtgcggcgcaaactggccttgcaggagaaagactacgctgccacccaggagcgggacgctctgcggctgtccggggacctcatcaccgccaacctctaccgcatggagcgtggggagagcaagctggtctgccagaattactacgatgaaaatctggcggaggtcaccattccgctggacccgctgctgacgccccagcagaacgccgccaagtattataagcgctacaccaaggctaagacagcggagaagtacctccgggagcagatggacttggcccgccgtgaccttgcttatttggagagcgttttgcaggagatccagcaggcggaaacagagcaggactttctggacatccggggggaaatgagcgatgccggcttcatccgtaagcaggggaagaaggtgctccagcggccctccaagccacgggaattcaaaacctccggcggcttccgggtactggtggggcggaacaaccgccagaacgacaagctgaccctgaaggacgccgactaccgggatctgtggttccatgtgcaaaagctccacggctcccatgtgatcctctgtaccaacggcggggagccgggggatcaggatattacagaggccgcaggtctggccgcctactactcccaggccaaggacagcgccaacgtgccggtggactgcacacaggtgaagtatgtcaaaaaaccggcgggcgcccgccccggcatggtgatctacaccacctaccgcaccgtcaacgtcaccccggcagaggacttggtgaggcgtctgcaaaacggaaaataacaggaaaaaagagcaccgtaaggtgctcttttttgttgaatgactcaggctgtgtgaggcgcgtggccggtgttgtcctccgtgtcgcggaacagcagcgtgacgcaccagagacctgccagcccgaccagcgcgtagacgatccgggagaggacggcggcctgcccgccgaacaggaatgcgacggtgtcaaagccgaacagccccacgccgccccagttcagcgcgccgacgatcacaaggatcagcgcaattttgtcaacgatcatattgtacctcctgtgtgacaagtgaactgtccgtagtgttttcgtaaaagacggattttattcataccttgcaaggcagatgcgtctgcattataataaaaaacgaaattcaaaacagcgagggatacctatggatcaacgatttgaacagaccgccttttacccggcggatatcttactgccgcagacggctgaaatgaaaaaatggccggtggtcgcctgtgaccagttcacctcccagccggactactggcaggcggcggaagcagccgtaggggaggctccgtcagccctgcggctggtgctgccggaggtctatctgaacggcccggatgtggacaagcgaattgagaccatcaacgcttctatggaccgctacttggcggatggcctgttccggacactcccggacagcctgatctatctggagcgcacgcagtctgacggccgggtgcggcatggattgattggctgcgttgatctggagcaatatgacttcacccctggctccggggcgctgatccgggccacggaggggacggtgttggagcgcatcccaccccgggtacgggtgcgggagcacgcggcgctggaactgccccacgtgatgctgctgatcgacgatccgcagagaagcgtgatcgaaccgctgacaggggagaccggcgtcatggaagccctctatgacacggacctcatgctgggcggcggccatgtgaagggctggcggctgactgatagtcagatgagccgggtggccaacaccctgagcgccctgaaaagtccggaggccatggcggataagtacggcatggcggacgcggccccgctgctgttcgccgtgggagacggcaatcattctctggccaccgccaaagcctgctatgaaaatctgaaaaaggtgacgccgccggagcggtgggcgtccttgcccgcccggtacgccttggtggaggtggtgaatcttcacgatgacgcgttgacctttgaacccatccaccgggtactgttccatgtggacggccgggatctgtgggacgcctttcaggcgttctatcccggcgcgcatactggcgggggagaggggcatacagcagaggtctgcggtcagggaatggacggcctgtggacggttccgcaccccaaagcgcagttgacggtgggaacgctgcaagcctttctggacgcatattgcagggaccatccggaggtgcaggtggattacatccacggggatgacgtggcccgaaagctgggcagtcggccggggaatctgggattcctgctgccgctcatggggaaggagcagctgttccccaccgtgatggccgacggcgtgctgccccgcaagaccttctccatgggagaggcgcgggataagcgctactatctggaagccaggaggattcgatgaagatacaggaacaggccccggcgaaaatcaatctggccctgaacattttaggccgccggacggacggctaccacgagctgcggatggtgatgcagtccgtttccctttgcgacacagtaacggtggaggagactggcatcggcttcgcgctgctggcggacggcttcacggtcccggcggggaagtcctccttggagcagcaggcggcggaagccttttttgccgccgtcggacggcccgtgccgcccctgaccgtgcatctggaaaaaaccaccccggcctacgcaggcttggggggcggcagcgcggatgtggcggcgctgctgcggtgcctgcgccggcagtacgcaccgaaaatgcccgtggagcagctgcgggccatcggactgacggtgggcagtgatatgcccttctgcgtctccggcggcacggctctggcggagggccggggggaacggctgacggcgctgcctgccctgccggattgttggatcgtactgtgcaagccggaattcggcatccccacgcctgcgctgttcacattggcggatgccgggacaccggaaaaccgcccggatatcgacggcatgatccgcgcactgtctgcgggggatctggacggcgtggcggcacggctgtgcaacgtgttcgaggaatttctgccagaggaataccatgaggtgttccacatcaaaaaccggcttttggagctgggggcgctgaacgccgccatgagcggctccgggccgacggtgtttggcattttccgggaggaaacggcggcgaaggcagcggagaccgccttgaagcagcgctatccgcagacctatttggcaaaacctgttggcgagttggtataaaacgcaaaatttccgtccagaatccagatacatgagaattgtatccggaaaggacggaaattttttatgaaacagcggttacatcccatcgagcttacattgatgatcgtagcggcactggcgctgacctccggggcggtggcccttcacacccagagccagctagcggaaaaggtggtgcggcttcacgtactggccaactccgattccgaggaggatcaggcgttgaagctgaaggtgcgggacgctgtgctggaaagggccacggagaccctccggggagcggacagtcagacagaggcccgccgccgcttgacggatatccttccggagctggaagaaacagcccgtgccgtcatcacggccaacggctatgattacagcgtccgggcggagctggcggaaacgtcctttcccacaaaggaatatgacggctttgccctgcccgccggggaatatctggctctgcgggtcctgatcggagaggcggcggggcagaactggtggtgcgtggtgtttccgcccctgtgtacggcggcggccagcgatgttcccgccgtcgcactggacgcgggactgacggatcaggaggtggccctcatcacggaggcggacgagggctatatcctgaaattcaaatcagtggagctgtggcagaccttaaaagcaaagctgaccaaatgacaacagcccgtgcggatcaattccgcacgggctgttacaggttttacagaactttattcaggaaggtgacgagccgggggctttccgggtgggagaacagctcgtgggagggcttatcctcgccgatgacgccgccgtccaggaaaatggtacggctgctgacctcccgggcgaagcgcatctcgtgggtcaccacgatcatggtcataccgctctccgccagatccttcatcacgtccagcacctcaccgatcatctccgggtccagagcactggtaggctcgtcgaacagcatgacctccgggtccatcatcagggaacgcacaatggcgatccgctgcttctggccgccggaaagctggctgggataggcgtcggcccggtcggccagacccacctttgccaaaagctccaaggccttctcctgtgcgtcggactgggacatccccttaatgcgcaccggggcggcggtgaggttgtgcatcacgtccatgttgctgaacaggttgaactgctggaacaccatgcccatccgctgacggcagtggtcgatggccttacccttgatggtgcagatgtccgtgccgtcaaagaggatctggccggaggtaggctgctccagcagattcaggcagcggaggaaggtggacttgccgccgccgctgggaccgatgatggagaccacctcattttcgtggaaggtggtactgatccccttgaggacctccagcttgtggaattttttttgcaggtccacaaccttcagaatttcacgcttattttccatgggacagcttcctttccgccagagacaccgcccggccgctgacgaaggtcagcacgaagtagcacagcgccgccacagccagacattccagattcttgtaggtcacggcgatcacatcgttggtgcggaacatcaggtcggcaatgccaatcacggagacgatggaggattccttgatgacggtgacgaattcgttgcccagcgccgggagaatattgcggatagcttgagggaggaccaccagccgcatggcctcaccgctgctgaagccaacgctccgggcagcctccatctgcccgccgtccacagcctgaataccggaacggatgatctccgccacataggcacagctgttcatgctcatagccacgataccggcggcgaaccgggagaagttgggaatccagggaatgttaggaatggtaatgccgatcataggcagaccgtagaagataaacatgagctgcaccatcagcggcgttccgcggacaaactcgatgtacgccactgcgatccaccgcaggggagggatgcggcacatccgcagagaggccatcagggtgcccagaattgcgccgaacagaacggagaaggcggcgatgatgagcgtgttgacgatgccttcggtgaaaaagctgttgtagcgttctatcagctttgccatggtttccaaaaaggccatgggagaattcctccttgtttgtgtgccggtatccggcaaatatcaggcgggcacgcgaggaaccagagttggttccccgcgcgtccgtgcttggttctaatcagaatcggtatttattttacagacccatgctggctgccagctccacagcctcgtcataagccttcaggtagctgccgtcattgaccacctgattgatgacggtgttgacttctgccagcagatcctcgctgcccttagcggccacaacggccttgccgaaggaggcttcctcagaggtgaaggcgaagttggagacttccagaccgccgttgctggtggcaatcagagattcgcccacagcctgatccaccaccaggccggcgatgttgccgttctgaacttccagcgccagagcgggatacttttccagctcgaacagctcgctgtcaggcagagcggtctggatcagctgagactggatggtgcccttctgcgcgccgaccttctggcctgccagagattccttggtggaatacaggtccgcgttgcctgcctttacaatgagaagctgagcgcttttctcatacagatcgctgaagtcgatctcctcggctctctcaggggtcttggtgaaggctgcaatgcccagatccacctgaccggacttcacggcggggatgatgccgtcaaaggacatatccaccacttccagttccacgcccagatgatcggcgatctgctgggccagccacatatcgcagcctgcgaagttagcattcagatccttgaactcgtagggagcgtactgggcttccgtaccgactaccagcttgccgctggtcttgaccttttccagcagacttgccgctgcggccggttctgccggggtttcctcagccggggtgctgtccgccggagcggaatcttcagttttgctgccgcagccggtcagcagagagagcatcatcatggcgcccagcgccagagacatgagctttttccatgtattctttttcatgttatcctccaaatcctgagtgattattgaatcaactctgttcatacgtatgattatacgcaatattcagctaaaatcaataggcaaactgtatataatcgaaaacttgctgaatgaatatttataaatattcacaacgcgcgaataaattgccgtcagaaggacaggccctccatccggtcaaaggcttccttcaggcggtccagcccaaccgtacacgcaatgcggaaatgtccggcgccggtgctgccgaacagcgtgccgggtgtgaccagaacgtgggcccgttccaggagcgcctgacagaagtcctcggcgctgaggccggttttctcaatgccggggaagaggtagaaggtgcccttgggccgtaccagactgaggtaggggatttgctccatccggtccgccgcgtagaaaatgcggtcccggtaggccagaacgtatttctcacgaatggcctgccggatcgccagcgcctgtatggcggcccgctgggagatggaaggggccgtatagatcagggagttgttgatgttgctcatgacgtccagaagctccggctccgcgatggctacgcccacccgccagccagtcatgagaaaattcttggaaaagctgttcagggtgatgactcggtgggcaagcccagggatcgtgcggagggggatgaagtccccctcatagagataggtggtatagatctcatccgccgcgatcagcaggtcatgctcctccgccacccggcccagcagctccagagtggagcggtcatagcccatgccggtggggttgcagggattgttgaacacaatgagcttggtgcggggggtaatggccgcccggagacgggcttcgtcaatggcccatccctcgcttgcataggtggggacctccacgcacactcctccggccagttcagcctgagtgcggtagagggagaagtaaggggaaaagacgatgacctcgtcaccggggtccagaacggacagcatcaccagcgccattcccatgctgctggaagcggtgaccagaacgtgatccggggagagaggctgcttgaaatccgtctgccatgcgtcacagacggagcggatcaactccgggtcgcctttcggatcaccatagtgggtatatccggcttttgcttcccgaaaggcagtgtcgatgatggcgtcatcggtgataaagtccgtgtcgccgatgctgagatcaatgatatccgaataccgggccagcgcgtcggtgtccagactcagtccggcgtcggaattctgaaatcgcttggcgatatatgattttacaggtctcatagcgtttctcctttcacccgggggatcacggtggacccgttgggaatgatataggtggattttccgtccagttccgcggctttcagtaaggcgtccatatcggaaaaggcgtggatccccatgggggcaacggtctggggatcaatggaggaatacatgaaaatgcggtaccgctgggcctgctcacagttcaggaagaagatgtagcccgccacggtgaaggcctcccgcagacgctgctcaatggtgccgtcctgtaaattcttgctccagtcgaagtactcggcggggccgccgccctccggcgcttcgatcatcagaaccagcgtaccgccgggcttcaacgcggattccacattgtcaatggtcttggtgccctgatagagggagatgtccttgggaaagccgccgcagctggtgaccacggcgtctgcccggcagggaatatccacccggtaaatgtcatccacggcagtacaggcccgctcccaggaggtcaggtagtggccggagaagatatacgaaagcttcatgtcggcgttcatcaccagatttaccatgaagaggttgtttaccagtgacgccgcctcgcacatatcctcgtgcagcgggtttcccgccaacacaccgtttccgatggcgggattggtgcggagcttggtgctgtccagcgaataggcgtggttgtggcggatggtctccaagccgctgatgccggggaggatgctcttccgtccgccgccgaagccggccatcacatgatgggtggcggcgcctaaacagaccaccagatccgcttccgcggcagtgcggtcgatccacacaggtgtctcatggggcgtagtgcccagataggcaagatccttggcctcgcagtcatgattcttcacacggacccggttatagaccccgtcggtgaccagtgtccgcagttcctgctcattgccgccgatgtgagtgccgttggccaccacgatggtcagatgctccggctgtacgccgcattcgtcgatgagatagtcaacgagatggggaatcaccagatcctgccgcatccagaatcgggtcatgtcactgatcaccagcgccacccgatctccggggcggacccgctggcgcagaggcgcgctgtcgatgggctgctccagcgaggcgaacagggcagaacggatgtcgctgatgggcggcgtctctgttccatgcagctccgccagaatatccgcttcgttcagggaaagggacacagacccatgtccatatttaaagttgtaggttttcataagcagcctcctatgaagacacatgaataataattcattatacacgtcaaaattgaatgttcaataactaatctgccgccgcttcaccaaaattcggcgttgttcagcggaggacttttgtgtttttttgacaagggagggcaaagataaaaaccgcccgcccggaaatccagacgggcggctggatcagcggtgcagataagcgtcaatatcaaagggctgcaatgcagtagtggatttcagatataagggatggtggggatggccggatttcagaagcggcccagcggtgaaccattgagcgtttgcagcctgaccgtcagcggcgaaatcccgcatacagtccatgaggtaatcccgcttttcgatgatgttcccccaggcggcccagatagcaggggtctccgaaagggagagaagatagcggaaggctttccggttctcttcgtggagagcgctgttgcacacccgctccatatcgtccggccgggtggcccgctgggcgtagacattgaacatgagaaagctgtcgtaaccgttgttcagggcgatgcgctgggcggactgcagggtggggtccagcgcgtccggcgcggcggtggaggggttgatccccacgcagatcagaggcttttggccccgggtacccaaaatgtaacggtattcggaataggtgttgggcacatagagccagcggcttacatcgtaatccggggaggggcgcagggcggcgtccagcgccggttcaaacagctcgagggccacggtatccgtggtgccctgtggaatatggggcatgacgatcactcctgtatgtcagaattcatagcgaagccattgtagcatggcggcgaaaaaaaggcaatcgggtctgtttttggcggcggtgttgtgatagaatgagaaaaaaacaaactgcgggaggtcactatgctgacgatcttgatcggccgtgccaaaacgggaaaatcggataccatgctgcggcggatggcggaactgggggagagcagccagcagatcctgctggtgccggagcatgcctcccatcaggcggaggtggacgtgtgccgcgcctgcggcgataccgccagccgtcatgccgaggtgctgagttttcggcggctgggcgagcgagtgctgagcatcaccggcggcatcgcggatgtgacgttggacaacggcggcaagctgctgacgctccagcgggcgctgctggaaacggcccctcagatgaccgtgtatcggaagccctcgcagaaggtgggctttctggaacagatgctggcgctgttcgacgaactgcgaagctacgaggtgaccccggagattctgtatcagcaggcgcaggacatagacggcgccacccacgacaagctgacggatctgagtctgctctacgccgcctatgaggcccggctccgccgtcccggtctggacgcacgggaccggatgaccaagctctgcgaccatttggaggagtccaggtatgtgcgggacaaggacattttcatcgacggctttacctatttcaacgcgcaggagcggcgggcgctggcgatttttctgcggcaggcccggtctgtcacggtcacgctgttaggggaggtcaacagccgggaggagatctttgaacccacgctgaaaaccatgtccatgctggagcggttggccgcttctgaggggaaacctgtaaagctactatccttaacaaatgaggacccgtcagcacttggacatttggagcgccatttctttggggagaatctgccctatgagggcgacagcgccgccatccggctccgggaggccgccactgtctattccgaggtggagcagaccgccgccgacatccgccgtctgctggcggcggggaagtgccgctgtcgggacatcaccgtggcggcccggaatatgacggagtacgccgggaccatcgaaacggtgttcgagcggtacgggatcccggtgtatctcagccgccgcagcgacattctggaaaagccggtgctgagcctgctgaccggcgtgctgtcctccatctccaacggctatgagtacgaggatatgttccgctggctgaaaaccggtttggcgggcctgacggcagaagaatgtgacctgctggaaaactatgttctgaaatgggacatccacggccagacgtggctccgtgacgaggattggacggaaaacccggacggctacggcgcgccgtggaacgaccggcggcaggccgtgctgacgcaggtaaatcaactgcgccgccgggtgcgggagccgctggaacgtctggcggcgggcttgaaggccggggagacggcccgggactatgtagaggccctgtatggctttatggaagaactgaagctggaaacggccctgacggagcggatgcacgcccaggcggaggcaggcctgatgcaggaggcggaggagaccgctcagctttgggagatcctctgcggtgtgctggatcagtttgtggaaattttaggggaagaacacttggaacagagcgagtttgagcggctgttccgactggtgctgacccagtacagcgtgggtaccatccccgtggcgctggatcaggtgtccgtcagtgagatcacccggaatgaccggcataccacaagctacctctttttgctgggagccaatgaccacgtgctgccggaccccggtcagagcggcggcctgctgaacgaggatgaccgtcaggcgctggccctccggggcgtcgagctggcccccaccggcatggaacggatgggcattgaactgcaaaacctctacgccgcgcttgcccagcccacggcgggcctgacggtgagctatccggtgacggatgtttccggcagcgaactgcgccccgcgtttgtggtggagcggctgcggaaactattcccggagctgcgtgtggaacacgagcgagctgacaaggcatatcgcctgtcagccgttgaacctgcgctggaaatggcgggacaggaccccgacggccccctgtggcgatattttcagcaggagccggactgtgcccggcatttaagcgccatggagcgggccgccgcggcccgacggggcagtctgtctcccgccgcagtccgggccatttacggagagcgggtttccatgaccgcctcccggctggaacggatgcgctcctgccacttcgcctacttcatggagtacggtctgcgggccaaaccccgggaaccggcctccttcgacgcgccccagatcggcacgtttctccactatctgctggaaaacgtcacccgggacgtactggggcagggcggctttgccgcggtggataacaaagaacttcaccgcctgacccgacaatatatcgaccaatacgcggaacaggagctgcacaatttccagaaccgtaccccccggttccggtatctgttcaaccgtctgcggaccaacgcctacgctatcattgaccaggtggcggaggaactgcgccactcggattttgtccccatggccttcgaactggggttcggagggaaggacggaacactgcccgccgtcaccatttcccgcccggacggggagctgcgggtaggcggcaaggtggaccgggtggacggctggatcaaggacgataagctgtacctccgggtggtggactacaaatccggcaagaagaaattcgatctggccaacgtccgcatgggactggatattcagatgctgctgtacctctttgccctgcaaaaggagggggcggaatttttcggaaaagagatcgagccggcgggcgtgctgtatctccccgcccgggacgagattttgccggcggagcggggcatctccccggaggctctgcaaaaggagcgggaaaagatgctgaaacgctccggacttctcttggaggacccggcggtgttacaggccatggagcatgaggccctgacggagccccattatctgccgctgcgggtcggcaaggacggaaatctctccgggagccttgcctccgccgcccggctgggaaaactgggcacgtatgtggacaaattgctgggccagatctccgacgagctgcgcagcggcaacatcgacgcggatccctgctgccacagcgaggaggacagccaatgccgtttctgcgactgggtctccgcctgtcagttccgcgatggccgggatcgggatcgtctgcggtacatcctgccggtgaagccggaggaattttggaaagaacttgaggaaggaggcggtgacccatggcaaagctgaagttgacggagcagcagcaagcggcggtggaaaaccggggcggcagcctgctggtgtctgccgccgccgggtccggcaagacgaaggtgctggtggagcggctgttccgatatgtgacggaagaccactgccatatcgatgattttctcatcatcacctacacgaaggctgccgccgccgagctgcggagcaagatcgccgccgaactgtccaaacggatggcggagaccccggaggaccgacacctccgcagccagcttttgcgggtgtatcaggcggacatcaagaccgtggacgccttctgcacggcactgctgcgggagaacacccatcttctggcacaggagggagagcgctataccctgacgccggatttccgggtgctggacgaaaatgacgcaaagctcctgcgccagcgcgtgctgacccgggtactggagcggttttacgaggaactggacgagggcggcgccctgctggcggatacgctgggcgcgggccgggatgacagcgccctggaggatctggtgctggaaacctacgaaaagctgcaaagccacgccgatcccgaacactggctcgcggaaaatcggacgatctgggaaaatcggagcggggacttcgacgaaacgccctacgccgccgagctgctggcggtcatccgtcaaaaggggtttcactatatggaagcgctgcggcgggcgggacagtccaccgtgggcggggatctctataagggatacggcgaaaaatttctgcgggccagccgcagcttcgcacccttggcggcagcacagaactgggaggccgcccgcgtttctctggatggactggaattcccccggctcaccacgccgaagggaatggcggatgatccggagatcgtgagactgaaggggctgtgggagaacgccaaaactgccgccaaaaagctggctcccatgctggcggtcagcgatacggaggccatggaggaccttcagaccatggcccctgccatgacagcccttttgaagctgacggcagacttttccgacgcttaccggacggaaaagctgcggatgaactgcgccgacttctccgatcaggagcatctggcccttcgcctgctggtggagcggaacggcgcgcctacggaactgggccgtcaggtggcgggccgctaccgggagatcctggtggacgagtatcaggataccaacgaggtgcagaacgccattttccgggcggtgtcccgtgaaggcaaaaacctctttactgtaggggacgtaaagcagagtatttaccggttccggttggcggaccctacgatttttcttgacaagtaccgcaacttcacacctgctgaaaatgcagcggaaggggaggaccgcaaaattctgctgtccaaaaacttccgctctcggggagagattttggacgcggccaatttcgtcttctccaacatcctgtcggcggagatgggagagatggaatacggcgaggacgagtccctccacttcggtgcggagtactacccgccccggaaggactgcgagacggaattccacctcatctccgcccaccagaagtcggcggcaaatgagcgcccggtgaaacggctgttggcggaggcccggttcacggcgcagcgtatccgtcagcttttggatgagggctatcccgtcaccggggaggacggtacgctgcggccctgccgcccggaggacatcgtgatcctgatgcgctctccggggagccggtccgccgccttcgctcaggcgctggcggagcgggatgtgccctgctcctttgaggaaagcggcgatttctaccagaccccggagatctccgtgacgctggccctgttggagatcgtcgacaatccccggcaggatgtgccgctgatcgccgtgctccgctccccggtgttcggctttacgccggaccgtctggcggagatccgcagccgtgaccgggagggagacttctatgacgctctgctggcggacggcggcgaggacgtacaagcgttcctgacgatgctgaccggactgcgggacgcggcggcagacatgagcgtgtgccgcctgctgtggcatatctacaatacgctgcatctgccgggcatcttcggcgctatggacgagggcggcgtccggcaggaaaatctggtggccctgacccgccatgccgagcgctttgagagcagcggctaccgggggctgttcgccttcatcacacagctccggcggctcattgacgccggacaagctcccgccgtgaaaaccgctggagggagcggcggcgttcagatgatgagtattcacaaatccaagggcctggaatttcccatcgtgttcctctgcgatttggagcacgccttttcccggcaggatttcgatacgccggtgctggtgcacccggcactgggccttggccctctgtgcatcgacctgaagcggaagatccgctatcccaccatggcccggctggcgctggaagaaaagcttcgccgtgaaaatcttgcggaggaacagcggatcctgtatgtggccatgacccggccaaaggaaaagctgattttggtagacgcgctgtacggcgcggaaaagcgccttcaaaagctgaccgccgccgcggcctgtcccgtcatgccggaggtggtggcggaggggaagtgcttcggagattggatcttactgccgctgctgtgccgcccggaggccgcgcctttgcgggatatggccggggtgatggcgggcggtctgtataccggagataccgccccgtggcaggtgttcgtccatgacggcgatgacttcggatgggcgcccggagtggccgtgtccgacacggagaaggatgcaggagaaacgctctttgacccggcgctgttgaccttccggtatccctatcagcgggaaacaactctccccgccaaactcaccgccacgcagctaaagggccgggcgctggatcaggagatcgcggaagatgcctaccacacgccctatatccggccccttgtccagccgaaattccgccgggagaaaaagggactgacaccggcggagcggggcaccgccacccatcttgtcttgcagtatctggatctgcaaaatttggatgtgcccggacaggtggaaaagctgcggctggaggccaagctgacggcggagcaggcggcggctgtggacattttcgccctgcggcgctttttgggatccccgctggctgaggaaatgcggcaggcggaaacggcggcgcgggagtatcggttcacggtgctgatgctggcccgggattatgacccggcagccgcggaggaggacagcatcctgctgcaaggcgtggtggattgctggtttgaaacgccggagggcatcacggtggtggactttaagaccgacttcgtacagacggagaaagatgtggcgcagcacgcggagctgtaccggggccagctggcggcatactctctggcgctggaacgggtgctggaaaaggcggtgacacggaaggcactgtacttcctgcaagccgggaaaaccgtggaaatctcgtgatttcaagctttttcgcaaaaaccggaaaaaatgcttgcaatctgtgttccgatgtgatatgcttatttagcttttgtggggtgaaagctccgtagaggtagttttgtaccagaaagaggtgaacgagagcaatgaaggaaggaatccatcccaattatcagcagactacgattacttgcgcctgcggtaatgtgattgagacaggttctaccaagagtgatatcaaggtggaagtctgctcgaagtgtcaccccttcttcactggcaagcagaagctggtcgataccggcggacgcgtggccaagttcaacaagaagttcggcctgaacaagtaagcctgtacacttcgtcacatccagcagtggtctgcatccgcagaccactgcttttttattgcattttttcaaaattcggatatactggacacatcaatgaaatgggaaacccatttgacacggggcctcccaaacgcaaggagagacacatttgttaccgaaaaaggaagaaattcgagataaagttgtattggtgggcctgaactccccggttttgcgggaggacagtgccaccgaggaaagtatggacgagctgtccgctctggtggagaccgccggcggcgagactgccggcatcgttctccagaatcgggccacgccggatccccggaccttcatcggggagggcaaggtggcggaggtgcagctttacgttgaaaatgtaggtgctaccatggtcattttcgacaatgacctttccccctcccagcagcgggtgctgacggagctgctgggcgttcaggttttggaccgctgcggcctgatcctggatattttcgctcagcgggcaaaaaccaaggagggccgcttgcaggtggagctggcccagtaccgctatctgctgccccggctgatcggtatgtggagccatctggagcgtcagggcggcaccagcggcaaggggcctatcggctccaagggccccggcgagacgcagctggaaacggaccgccgtctgatcaacaagaagatcgacaagatccgggcggatctggaagaggtacgccgtgtccgggccacccagcgccagcagcggcagaagaacgagatcccggtggtggccatcgttggctacaccaacgcgggcaaatccaccttgctgaaccagcttaccggcgctgcgatcccggccaataaccggctgttcgacacgctggacaccaccagccgcttgctgacggtcagcgatacaatggatgtggtggtgtccgataccgttggcttcatccgcaagctgccccatcagctggtggaggcgttcaaggccacgctggaggaattggagtatgccgacctgctgcttcatgttatcgacgtgtccaacccggaatggcagcatcaggcggaggttgtggagaagctgatcgtggagctgggagccaatgagatcccccgcatcgacgtattcaataagtgcgaccgtgtggaggccggtgacctgcggccccacggcgctgacatctgctctatctccgcccggaccggtgagggcgtggaccgtctgctggaaatgatcgaccggcggctggacaagggcacccgccgggtgaccatccacctgccgtatgacaagggcagcctgctggatatgctgtaccgggaggccaaggtggaatccgtggaatacagcgagaccattgacattgtggcggtgtgcccgcccaaggtgctgggccagatcggagactataccccggactggacgccgccgaaagaggactgggaatgatcacgctgaaaacgcggcggctgctcctcgccccctggcgggaggaggatgccgaggcattgtacgctctggcgtcggacccggagatcggacccatgtgcggctgggaaccccacggaagcgtggaggaaagccgggaggtcatccgggatgtgttcagcgcgccggaggtctgcgcgattctcagcagagagagcggcgcactgctgggagcggtaggccttcagccgtcatcggagatttttccggaactgtctgccacagagcagcgggagatgggctattggctgggacggccgtattggggccatggcgttatgacggaggctgcaacagaactgctgcgcttcggctttgagacgctggggctggaagctgtctggtgctcgcattatgactggaacagccggtctcgtcgagtcattgagaagtgcggcttccgctatcagttcacgaaagagacaacgaatgtcatcggaatgaccaacaaaacggtgttttacgccttgaaaaaggaagaatggctggctttttccggtgaaaaggagtttgcatgacggagtacatcgtcccctatcagaacgccgagagcgagtttacggaaaagcgctcccgcttcatcacccacctctacaaggtggagacggaggcggaggcccgggcccgcatcgaggaaatgaaaaagaaatactatgacgcccggcacaactgctggtgctacctcctgcaagagggcggcgtggtccgctactccgatgacggcgagccgcagggcacggcgggccagcctatgctgaacgtgttccagcggcaggaggtctggaatgtgtgctgcgttgtgacccggtacttcggcggcgtactgctgggagccggggggctgaccagagcctacaccaagggagccgctgatgcgctgaccgccgccgggatcgcccggatggggctttggacgctatgggacgtgccctgcacttatccgctgctggagcggatgaagctggaggtggccgccgccggcggcgtggtccgggacgcggaatacggcgcggacatcaccctccggacggcatttcccgccgggactgcggaaacgttccagctccggctgacggagctttccgccgggagtctgaccatgacggcggcaggggaggagtttttgccgggaccccgggaggaagcaaactgacaaccgttccttgacttttcgacgtttcggctgaaaacgccggattttccttgcattttctccatagcttctgtataatgccaatttatgatagattttttcaggaaggactgacagcaatggctgacgagatcaagaccacggcggcggaggcccccgaaagccgcaatttcatccacacgtttattgaggaggatattgcccagggcggacagtttgaaggcatgaccgtccacacccggtttccgccggagcccaacggctatctgcatatcggccactgcaaggccctgaccatcgacttcggtaccgctgagaagtttggcggattgtgcaacctgcggatggatgacaccaaccccaccaaagaggacgaggagttcgtggaggccatcaaggaggacatccactggctgggcttcgactggggcgaccgcttcttctacggctccgattattttgaggaggattacaagcaggctgtgggcctcatcaagaagggcctggcctatgtgtgccagctgtctcccgaggagttccggacccaccggggtgacatcggcgttcccgccacgtctccctaccgggaccgtcctgtggaggagagcctggacctgtttgcccggatgcgggcaggggagttccccaacggttccatgaccctgcgggccaagatcgacctgaccagcggcaacttcaatatgcgggaccccgttatctaccggatcaaccacatgcaccatcaccgtcagggggacaagtggtgcatctatcccatgtatgacttcgcccatcccattcaggacgcgctggagggcattacccacagcctgtgctctctggaatttgaggcccaccgtcccctgtacaactgggtcatcgagcattgcgacctgcctgcccatccccgccagatcgagttcgcccgtcttggcatcgaccacacggtcatgagcaagcgcaagctccgcaaactggtggaggaaggccgggtctccggttgggacgatccccggatgcccaccctctgcggcctgcgccgccggggctacaccgcccgttccatccgtaatttctgcgaccgcatcggcgtggccaagtccgccaatgtggtggaatacggcttcctggagcactgcctccgggaggacctgaacgagaccgcccagcgggtgatggctgttctgcggcccatcaagctgaccatcaccaactatcccgccggtaagacggagatcgtcaccgtggagaacaatccgctggacccctctgccgggacccgggaagtacccttctccggcagcctgtggatcgaggccgatgactttatggctgagccgatccccaagtataagcgtctgacccccaacggcccggagtgccgcttgaagggtgcatatctcatcacctgcaccggctgcgtcaaggacgagaacggcaacgtgacggaggttctggctacctacgatcccgacagccggggcggcgaccccgccgacggccggaaggtgaagggcgcgaccattcattgggtggacgccgccaccgccgtggatgccgaggtgcggctctatgacaacctgtttaccgacgccaaccccgacgccgccgacaaggacttcatcgagtgcctgaatcccggctctctggaggtcctgacggactgcaaagtggaagctggtctggccgccgccgcggaccgctatgccgaaagccacgagggcggaaagacggctcccggctaccagttcatgcgtctgggctacttctgcctggataacaaggataccaaggcgggccatccggtgttcaaccgcagcgtcagcctgaaggatagcttcaaaaagtaagccaaataaaaaggtctgtcccgaaacttcggggcagaccttttttgctcagtcaatcttcaggggctttttcaggttgtagaaggtaaaggtaccggtgccgtccagatttccgtcctgatccgtgatccggatgtcgaatacgcagacggtgccgccgtgcttagtctcccgggcctcggcggtcagaacatcgcctgccttggctgcacgcatgaaattgtactgggcgttcagcgtcaccgcctgttcgccgtaagccgccatggcggagccggcggcgttgtccgccatggagaagaacaggccgccatgggctacgtctacggggttcagatcgtcctccgttacggtcttgaccaccttggcatagccgggggacagctccgttaccgtgatgccgatacgctggcagaagcggttgcgggcgttgcggtattccaaaattttttgcatatccatttgcaggaactcctcaacatgattttgccccattttacacgctttgacagaaaaggtcaaacgaaaacagaagaaaatgctcaaaaaccgttccgtttcgcttgcaaccgcgcggtggaatacagaattgaccgccggagcagcgctccggcggtttttctcctataagtgcttgcggatggtgttgatggcccctttttccaaccggctcacctgcgcctgagagatgcccacctcggcggagacctccatctgggtcttgccctcgtagaaccgcagggacaggatgcgccgctcccgtgggtccagcagcttcatggcatccttcaaggcgatgcgctccgtccagcgctcatctgtgtttttcgtgtcgctgacctgatccatgacgcagatggcatccccgccactgtcatagatcggctcgtacagagagaccgggtccacgatggcgtccatagcaaagacaacctcctcccggggaatatccagcaccttggcgatctcctccaccgtcggctctttctggttttccgccatgaggtgttcccgggcctgcaagacccggtaggcggtgtcccgcatggagcgggagacccggatggcgctgttgtcccggaggtagcggcgaatctcgcctacgatcatgggcacaccgtaggtagaaaactttactggctgggaaatatcgaaattgtcaatggccttgatgagccctacgcagccaacctgaaacagatcgtccacgctttcacctcgccccgcgaaccgctggatcaccgacagcaccagccgcagattcccctcgatcagttcttcacgggcctgccggtccccggccttgctgcggcggagcagctccatggtctcactgcttttcaggaccttcagctttgccgtgttgacccccgcgatctccactttcccctgcatatatccgcctcctgccgttaagctcgacggagtcagtatgcccctgccgcgtttttcctatacgggaggtttttgccgattccggcggcataggacagtcccggatcggcataccattttttgaaagggggcggcgtagatgcggatacgggaactgcggcggaaagaggtcatcaacattacggacggcgggcggctgggctttgtgggggacgtggacctccggatgccggacggccagacggcagccctgatcgtctacggtcccgcccgttttttcgggctgttcggtaggggagaggagtactacgtcccgtgggacagcatccagcggatcggggatgacatcatcctcatcgacaagcccgcccagcaccgggacccggcgctggaacgccgccggcggaaaaaattctgataaaaaacagctcaacgtggaattttcggagaaacgccgaaaatttcacgtattttttggaaataattcttgcaatccgtttcacattgtgctatgataattcagcattccgcatggctgcggactctttgtttgtgcccatttgtaaaaaaacgggttagcagaggggaggaaacagccagaggtacaaactaaaatttttggaggaaatcaaacaatggcaagtgtcgtatccatgaagtccctgctggaggcaggcgtccatttcggtcaccagacccgtcgctggaaccccaagatggctccctatatctacaccgagcgcaacggtatctatatcgttgacctgcagaagaccgtgaagaagctggaggaggcttacgctttcgtccgtcagctgtctgagaacggccagtccctgctgttcgtcggcaccaagaagcaggctcaggaggccatcaaggaagaggctacccgctgcggtcagtactatgtcaacgctcgttggctgggcggcatgatgaccaacttcaagaccatgcgtacccgcgtggaccgtctgaaccagctgaaggccatgcagactgacggcaccttcgatatgctgcccaagaaggaagtcatgaagcacctgggcgagatcgagaagctggagaagtatctcggcggcgtgaaggacatgaagaagctgcccggcgctctgttcatcgtggatacccgcaaggagcgcaacgccatcgctgaggctcacaagctgggcatccccgtggtggctattgccgataccaactgcgatcccgacgagatcgactatgtgatccccggcaacgatgacgccatccgcgccatcaagctgatcgcttccgtcatggccaacgccatgctggagggcaagcagggcgagcagatggacgaggccgctgaggcccccgctgccgaataaactaagactctgcgggagcgcaagctccgatactatataaattggaggaaaaagattatggcttttaccgctgctgatgttaagaacctgcgcgaaatgaccggcgtaggcatgatggactgcaagaaggctttgaccgcttccgacggcgacatggacaaggccgttgagttcctgcgtgaaaagggcctggccgcctccgccaagaaggctggccgtgttgctgccgagggcatggcctatgccgctgtgattgacggcgtgggcgtggttgtcgaggtcaacgccgagaccgacttcgtgggcaagaacgagaagttcgtggactttgtcaagggggttgccgctaccgtggccgccaacaagcccgccgacctggaggccctgatggcctgcaagtacaacggcaccgacctgactgttgagcagcagcagcaggagatggtcctcgtcatcggcgagaacatcaaggtgcgccgcttcgccatcttcactgagggcgtttccgttccctatatccatgccggcggcaagatcggcgtgctggtgaacctgaaggtggagggcgatattgacgccaccgccgtgggtaaggacgttgccatgcagatcgccgctctgaatccccgtttctgggacaagtctcaggtttctcaggacgtgctggacgaggaaaagaagatcatgatggtccagatggagaacgatcccaagatggccagcaagcccgagcaggtacgcgagaagatcgtcatgggcaagatgaacaagttctactccgagaactgcctgctgcagcaggagtttgtccgcggcgatgtgttcaccggctccgtggagcagtatatcgctgacgctgccaagaagctgggcggcaagatcaccttcgtggatgccatccgctttgagaagggcgaaggcatcgagaagaagcaggagaacttcgctgaggagatcgccaagatggtcaagggctaagcccaacaccgaatatcgtctgaaaaaggacagccgcattgcggctgtcctttttgcttcgatcacgatgacggcagaaatcaagatccgtcagagaaaccgcctccgtgtttggcagagccaaacatggggacggtttcgtagttttgcccgtgttggatcggtcttttgagcggggagcggcaagcatggtcagttttccagctctgccggggccttgggatagtcggcaaagctgccgtcctcgctgggggtcaccagataataccgcagcagcttggcccaaccggtttcttctgccgtcagggtgttggcactgatggcggcgtccagagacttggcggcggtctgttcctgctccgggaacagctccccgtaaaaggcggcccctgtgatagcaaagcatctggtttcatcgtccatcactccaggataggccagcatttttgcgtaagtaactggatcatagaaaagggcgttgccgagaatttcatcatagctttctgaataggctccatccagtccctttgcggtgcagccccattgaatgtgaagtatttcggagtcagaatagctctcttggcccgccagccatgacataaatgcctctgatgtggtaaaattatcgtccgtactgcccagtttcccgaattcctgccaatccatagccggcaggttggtgaaaacatcccggcggtaggcataccgctcctcggcggagaggttttcattggttacaagctggttccacgcaatatagacctgccgggtagcgtctaccggctcctgcggaaggtcctgccggtgggagaagtccgggtcgccgttttcatccaccgggaaggtggaggtattgttggcggcggcgtagaagtctcccatatcctgcatcagctccatggagatgcccgccaccaggccatcctttatgaagaaatagatcgtctgatagccgcggccctcctcaaaggcgctccagatatacagatagtcatggggaaccagcgaatacccatccgcctccttgagaccgtacagcagcgttccttccgcctgatcctccttgccagagtgataggcgtccactacaaaggatttttcgttaccgacgctgatgccacggggcgtccagaagccgggggccatggtggaaatgcggcagatggtatccccggcggcctgcccctgctccgggtcggcctgaaggtggatgtagtccacatacagcccgccgcagaccgcgtggtggacggcggccaaatggaggtccgtgccctccgtgacgatcttctccggggccgtcagatggagggaggtgtgaaagggaaagggctccgtctgagttcccaaggtcagaaattcgtaccattcccggccgtcaagccgggggacctgccattctaaatagaagtccgatacgggccgcgccagatcacctacctgtcccagaaacggctggctggcccggtagagaaggaacccggcaatcagaaccggtagcagaacgcatacgctcaggaggaaccaccactttttgccggcgtttttcggcggcaccggttcctccggcgtttccgtcaactccgccacggaaacgcccagctcccgggccagtccgatcaggttgttcagatccggggcagagaggtcggtctcccatttgctgacggcctgacggctgacgcccaatcgggcacccagctcctcctgagaaatattcagcttttttcgatacaggctgatgcgctgtccaagtgtcatatcgcgtcctccttccatagggggtatcggtgaaatttcgacttcagtataccatacggggctgctattggctaccacccggctgtcaactatcggttgcgggcggaaaaaagaccggaattccaacaaaaaccggtcatggaattttcctgcgaaaatcttcggataccccctttccaaacgacggaaaataaggtaaaatagacactgataacatatgccacaggaggtcattatggaaaaaccggtatatcatcgtgtcctattgaagatcagcggcgaggcccttgcgggagacaagcattccggtctggattttgaggtcattggtcaggtgtgcgacgtcatcaagaagtgcctggacatgggcgttcaggtgggtctggtcgtcggcggcggcaacttctggcgtggcgccaagaacagcggcggcggcaaaatggagcggacccgtgccgatcacatcggtatgctggctacggttatgaactgtctggcggtggcggacgtctgcgagcagaagggcatccccgtccgggtgcagaccgcccttgagatgcgggccatcgcggagccgtacatccgttcccgggcaatccggcatctggaaaagggacgcgtggtcatcttcggcgccggtaccggcaacccctatttctccacagacacggcagcagtactgcgggcggctgagatcgacgcggacgtgattctgctggccaagaacgtggacggcgtgtacagcgccgacccagtgaaggaccccaccgccgtcaagtatgacagcatttcctatgatgaagtgctggcccagcatctgatggtgatggacaccaccgcaacctctctttctatggataaccacattcccgtgctgctctttgccctgaaggatccggagaatatcatccgggctctctgcggcgaaaacgtaggcacgatcgtaaaagaataaaggcgcgaaaggaaggaaccaagctatgttgaaagacgattacaagatctacgaggaaaaaatgaataagagcatcgactctgccgccgcggactttgcttccgtccgggcaggccgtgccaatgccgccgtgctggaccgcatcatggtggattactacggcacccccacccctattcagcagatcgcggcgatctccaccccggacccccggattttgcagatctctccgtgggacggttctgcgctgaaatccatcgaaaaggccattctgaactccgatctgggcatcaatccccagaatgacggccggaatatccgtctgaacttccctcagctgacggaggagcgccgtaaggagctggtcaagcagatccgcaagtacgcggaaaacggcaaggtggccatccgcaacatccgccgggatgccatggagtccttcaagaagaaggaaaaggcttccgagatcaccgaggatgatctgaagcaggcagaaaaggatcttcagaagctgacggatgacagcagcaagaagatcgacgagctgctggcccgcaaggaaaaggaactgatggagatttgatgagcgagacacgaaacacgctgcatacggcggggtgggctgccagcccacctcgccatattgcgattattatggacggcaatggccgctgggccacccaacgggggttgccgcgcaccgcgggacataaggcgggggcggagaccttccgccggatcgccacctactgcaagaacatcggcgtcaagtacctgacggtctacgccttttccacggaaaactggaagcgctcggagacagaggtctccgctatcatggcgcttttgaagaagtacctgctggaggctgtggataccatggagcgggaccatatccgcctccacttctttggagacatgacgcccatcgcaccggagctgcgggcgttggcccacgagacggacgagatcacggagcatttgtccaaggacgattttcaagccaatgtctgtctgaactacggcggccgggatgagatcctccgggctgtccgccggtttgcggcggagtgtgcggaagggaagcggaagccggaggacctggacgaaacgctgttttccacctatctggactctgccggcattccggacccggagctgatcatccgccccagcggggagcagcggctgagcaacttcctcctgtggcagtgtgcgtattccgagttttattacacggatgccctctggccggacttcgatgaggaggagctggacaaggcaatcgccgcctaccagagccgggatcgccggttcggcggtgtgaagaaataagcccttacaggtgttgaaaggactgaaattctatgttgcaaagatggttggtggtcatcattggcctgccgctgctgctggcggcgctgctgctgtgtccggactgggtgacggtgatcgtggtgtgcggcattgccgctgccgcggcctatgagctgctgcacacggcgggaaagaaagtgcccaagtgtgtctacgcgtttaccattctggctgccgtggcgcaggaatgggtcatctatgacgcgcatacctggcagttttatgacagttatcagtccgtgggcatgatccgcattttgtgcgtgccgctggcgctggtgacggccctgtttttcgttgccgtcaaggactacggaacgcccaacgccatgccctttgccgatgttgccacagcgatgatgggcggcacagtgttccccatgatgtacagcgccattttcctgctgcgaatggacggattgtacggcaagatgtatgtactgctgccattctgcgtggcctttctgggagacagctttgccatgtacggcgggatgctgttcggaaaacggaaaatggccccggcggtcagcccccacaagacgtgggcgggttctgtcgccggattgatcggcagcgccttggggctggtgctctggggcgtggtggcccggctgtggctgggctatgagccgaactacctgaatctgatcctggccggtctggtgaccaacgccatcgggcaattgggcgatctcgccatgtccctcatcaagcgggaggcgggggtaaaggattacagccacattttcctgacccacggcggaatgctggatcggttcgattccaccctgtttatctctccgtggatctatttgtttgtgtgcgcgggtatgctttaagagacatagaggacatactatgatgaatacgatctcaatattgggctccaccggctccatcggccgtcagactctggatgtggcggaacagctgggcctgcgggtggcggcactgaccgccaattccaacgtggagcgaatggaggcacagtgccggaagttccgtccccgcctggcggtgatgacggaggaagcagccgcaaaggaactggcagttcgcttgcaggacacgtctgtaaaggtgttggctggtacagatgctctggtggacgccgccgtgatcccggaggcggaaacggtggtcactgccgtggttggcatggtgggattgaaggccacgctggccgccatccgagagaaaaagcgtatcgccttagccaacaaggaaacgctggtctgcgccggtgaactggtgatgagtgaggcggaccgctgcggtgcggagatcgtgccggtggacagcgagcattccgccatcttccagtgcttacagggctgcgccgaccgtcgggagatccggcggctgatcctgacctgctccggcggtcccttccgggggatgggccgggacgaggtgggacgcatgactaaggccgacgccctgcggcaccccaactggacgatgggccccaagatcaccgtggactgctccacgctgatgaacaaagggctggaggtcatcgaggccatgcggctgtaccgtctgccgctggcgcaggtgtccgtcatggtgcatccgcagagcatcgttcactccatggtggaatttaaggacggagccgttctcgcccagttgggtacgccggatatgcgactgcccatccgctacgccatgacctacccggagcggggggagaacccggcaccgccgttggaccttttgaacagcccgcccctgacctttctggagccggaccgggagacttttccctgcctccgtctggcggaggaggcggccgaggcaggcggcacggcctgcgccattctgaacggcgccaacgaggaagccgtccgtctgtttttggcggaaaaaattggcttttatgacatttccgacctggttgcggcggcgcgggcggccgtcccggtgacgcaaacaccctcgttggaggaaatcttatcagcggaccacgccgcccgagaggccgtgaagtccgcatttgtaaggagacattcatgagctttgtctacatcctggcggcgatcttgattttcggcgtgctcatcgccgtgcatgagctgggccactttctggcggcgaagctctgcggtgtacaggtcaacgagttttccatcggcatggggccagccgtctggcaccggaagaagggggagacagcctattccttccgcatcctgcccatcggcggctactgcgccatggagggagaggacggagacacgggcaacgcccgggccttcacccgtcagggcttctggaaaaaattcgtgatcttagccgccggtgctttcatgaatttcctgacgggactgctgatcgtggcgatcctgttcagcagcgccgggaccttctttgtggacgggatcacaggccttgccccggaggtgtcccggaccggggaaaacggtttacaggccggggaccagatctataagatcaacggctggcgcacctatttcagcggcgacgcccagatgtttctgagctattccggcgacacggcggatattgaggtcgtccggaacgggcggcatattctggtggaaaacgtcgcccggcagacctgcaccgaccagcagggggagccttatcagggcttcggcctgtatgtgggacggctgtctgtcccggccaccgtatccaaccgcatccgttacacctggtatcagaccatggacttcgtgcagcttgtgtggttcagtctgggccagcttgttaccggcggggccggactcaatgacctcagcgggccggtgggcattgtgaccaccatcaaggacgtgggcaccgaggctcaggaaacggcggaacagaatgaccagaacggcctgctggccgcggcggagagcatcgcctatttcgcggcgctgatcgctgtgaatctggcggtgatgaatctgctgcccctgccggcgctggatggcggacggatctttttcctgctggtggacgcggtttccatggcactgttcaagcggaaggtaccggagaaatatcaggcggccatcaacacggcgggctttgtcctgctgatgggctttatgctgctggtaacattccaggatgtattcaaattggtaaagtaggcgatcaatatgacaaagaaattgatggttggcaaggtggctgtgggcggcggcgccccggtgtccatccagtccatgtgcaatacgaaaaccgacgatgtggccgctactgtggcccagattcacgcattagaggatgccggatgcgagatcatccgagtggcggttccggacgaggacgctgccaaggcggtggacaagatcaaggagcagatcgatattcccctgatcgcggacatccacttcaactacaagctggcgctgatgtgcgccgagcgggggatcgacgccctgcggatcaaccccggcaacatcggcggggaggagaaggtcaaggccgtggcggacatttgccgccaaaagaatatccccatccgcatcggcgtcaacggcggctctttggaaaaggagctgcgggccaagtacggcggtgtgaccgccgaggcgctggtagagagcgccatgggccatgtccggctactgaaccggttcgattttgacgatatttgcatttctgtgaaatgctccgatgtgccgctgaccatgcgggcctatacgttgttgagccagcagacggactacccgctgcatctgggcgtcaccgaggccggaacgccctctatgggtatggtgaagtctgccatgggcatcggcgggttgctgtgcatgggcatcggcgataccattcgggtgaccctgacggcggacccggtggaggagatctacgccgccaaaaagatcctgcgggcggcaggtctgcggaaagagggcgtgaatctcatcgcctgtcccacctgcggccgcacccggatcgacctgatccctatggcggaggaagtggagcgccgtttgatgaactgtacgaaaaacatcaccgtggcggtgatgggctgcgccgtcaacgggcccggagaagctgccgccgcggatgttggcatcgccggcggcaagggcgagggcctgattttccgcaaaggagagatcctttacaaggtgcctcaggagcggcttgtagacgcattgatggaggaaatcgaaaagctgtaagcagcttttacataagataggggaaagaaggacgcatgtcgagagagataccgttttttgaattatttgcgcagctgcagctctccccggagctgcggctaaagctgttgggggcggtgatcgccagcgcctgcatccatcaggacaccctctctatggagctggcgatgatcgtgaagcaccctctggagccgtcggatctggacgagctgaacagcgccatccgcagcggctatgggctgaatgaggtgcgattccgggtcacgctgaaggaggaacagctgccctctcagtggaaggcggtggccgcgccgtccgccccgtccgggggaggtccatcagggccggtcctgatgggcaaccccatcaaggtcaagcccgtggaaatgaaggcgctggatctgaaaatgggcaatgccacggtaagcggcaaggtgttctccgtggaatgtgtggagacccggcggcccggtatgtggcggctccatgtggagatgacggactacaccagctccgtgtccgtccataaaaacctgacggaaaaggaagccaagggtctggatgggaagatcaatcccggtatgtggctgtgcgttcagggcaagatggaacctacctgggacggcaaggacattcagctcaatccctaccacatcaacgtcatccagcacgaggaacggcaggataccgccccggtgaagcgcgtggagctgcatctccacacgaaaatgagcaatatggacgccttgacggacacgaaggaggtcatcaaggaggccatccgctggggccatcccgccattgccatcacggaccacggcgtggcccagtccttcccggacgcctggcatgccgctggggacaagatcaagatcctctacggcgtggagggatacttcatcaacaacgtggatgaccgcatcgccgtccatggccggggagactgcggactggacgatgagttcgtctgcttcgatattgagaccaccggcttgaaggtggaccgggaggccatcacggagatcggcgcggtggtgctgaaaaacggcgagatctgcgaacggttccagacctttgtaaatcccaaccgccgcctgacgccggagatcatcggtctcaccggcatcacggatgaaatgctgaaggacgccccccagctgaaggacgccctgacggaatttctgaaattcgtcaacggccggcccttggctgcccacaacgcggaattcgacatcgggtttatccgggcaggctgcaagaaggttgggctggaatttgaccccacctatgtggactccctgatcttagcccagaacctgctgccgggtctcggcaagtacaagctggacattgtggcggaccatctggacctgcccgccttcaaccaccaccgggccagcgacgacgccgccacagtgggctatatgctgatcccgttctggaaaatgctccatgaacgggggatccacaccctccaggccgtcaataaggagatggaaaagctgcggcctctgggcagcaagtccaaccgttttcccaaacacatcattattctggcccggaacaaggtgggcctaaaaaatctctatcagctgatctccgcttccaacctgaaatatttcaagcgggtgcccaccatccccaaaagcgagttgatggcccatcgggagggcctgatcatcggctccgcctgcgaggcgggtgagctgttcaaggcggtggtggatcacaaggattgggacgaactgaagcgcatcgcgtcattttatgactatctggaaattcagcccctgtgcaacaacgccttcatgctccgcaacggcgacgcccggagcgaggaggatctgcgggagttcaaccgcaccatcgtccggctgggagaggaactgaacaagcctgtctgcgccaccggcgatgtccatttccgggagccggaggacgaggtgtaccggcacattctgctggcgtccaaaaagttcccggacgccaacgagcccctgcccatctacttcaagaccacccaggagatgttggaggaattccggtatctgggggaggaaaaggcctacgaggtggtggtcaccaacacccgtctggtggcggatcagatcgagaccttcgagctgctgccggcggaactgttcccgccccgactggaaaattccgaggaggacctgaaccgtctggtctgggaaaaggtccaccggctctacggcgaggacccgccccagctgatcgtggaccgcctgaatgtagagctgggcggcattctgggtaagtatgacgtggtgtacatgtccgcccagaagctggtgcagcgcagcaacgaatgcggatatctggttggctcacgaggctccgtcggctcgtcgctggtggcttatatgtccggcattacggaggtcaactccctgccgccccactaccgctgtcctaagtgcaaaaacagcgaattcattctggacggcagctacggctgcggcgcggatatgccggacaaggtgtgccccgtctgcggcaccaagtacgtgaaggacggcttcgacattccctttgagaccttcctgggcttcggcggcggcaaggtgccggatatcgacctgaacttctccggcgaatatcaggcccgggctcaccgtcacgccatcgaaatgtttggagagacacaggtgttccgggcgggtaccatcggtaccctggcggaaaagacggcctacggcttcgtgaagaagtatctggaggagaacggcatcgtggcctgccgggcggaggaaaaccgcctgaccctgggctgcgttggcgtccgccgcaccaccggccagcaccccggcggcctggtggtggtcccggacgataaggatatggaggacttctgcccggtgcagcacccggcggacgccgatgattccgataccatcaccacccattttgaatatcactccatggaggccaacatcctgaagctggatatgctgggacacgatgaccccaccatggtgcgtatgatgcaggatctcaccggcgtggacccccatgagatcccgctggacgatccggagaccatgtccattttcatttccagcaaggtgctgggctatgagaatgaccctattctggggccaaccggcgctgtggccatcccggagttcaacacccggttcacccgccagatgctcattgacacccagcccaaggatttcaatacgctggtacggctctccggcttctcccacggtacggacgtgtggatgggcaatgcccgggagctgatcctcagcggcaccgccagcgttctggaaactgtgggctgccgtgacgatattatgctgtacctgatctccaagggccttgaccccaaaatgagcttcaagatcatggagaaggtgcgaaagggcaaggtgaagaagggcggcttcgacgagggctgggaggaggccatgatggagcacgatgtaccggactggtacattgagtctctggccaagatcggctatctgttccccaaggcccacgccgtggcctacgtcatgatggccttccgcatcgcctggttcaaggtccatgagccactggcgttctatgcgacctttttctccgtccgagccaaggcgtttgacgcggaatactgctgtgccggcatggacgcggtgaagcggaagatcaaggagatcgaaaacaacaaggacgccaccgctgtagagcagaacctgctgaccacgctggaggtgtgctatgagttctatctccggggcttccatttcgacaccatcaacatctacaagtcggacgccaccaagtttatcgtcacagaaaagggccttctgccgccctttgtgacggtccacggcttaggcgaggcagcggctctggacacggtggaaaagcgaaaggggaaggagttcatctccatcgaggagttttctatgtgctgcaacaagctgtccaagacccatatcgagcagttgaaggcactgggcgctttcgcgggcatggcggacaccagccagatcaccctgttctgactgccaacggacagaaaacagcaaaaacgaccgctgatgcggccgtttttgctatcttccggatttacttgaggggattcaggcgctgatccgggattcctcgttcttgatttcccagtggatcaggaaggtcagcgccccccggaggaggatgatggcacccaacgtaatcagttcctgaggctcccggacgatggccgtgcggagaacctcgccgcccagcttgaattccagtgccagagcaatgccctgcgccagaatcaggcggacatgggggtctttccggaaacagcccacaatgctccgcactgcggccgccagcagtacggccacgcctacgcactccagaaacagaacaccgaattgcacaagaaattgaaatccctcttccagaactgcaagtaatgtcattatgtgccctcctcaaacgtttgcgttaaggatatcatagcagaatttgaggaaattacaagaacaatatcagcggttatcaaaaaaacaggccgcccggatcttcgggcggcctgaattgcgtgaaagagacggatcaggtatccagcttggcattgcagcgagtcaaaaagcggtcattggtgatgatcgcccgggtgtgggtgcctgcgccgatggggcccttctcgtcccacgcctttacggcaaagtcgatcatcttgccgttttcggaaacggcggtgatctcagcctcggcccagaccttcatgcccacgggggtaggggcgtcatgggagacattcagatgggtgcccacgctgcctttgccctcttccaggaactgctgcaggcagttggcggcggcgttttccatcatggcggtcatgaagggggtgccgaacaccggcagcatcccggaaccggccacctgggcagtgagttcagaggttacggtcttttccaccgtggtctttgcgccaatttcaatcataatattgtcctttccgtcccgcggcgcgggactgcggtttctgttaaatacccagctccgtccagagatcgttgtacagcgtcagcgtgtcggcggggaggttggtatacagctcgcagcgggccagcacgtcatcgggagcggccatgatctcatagcgctcctcgtccagaggctcgccgtaagtctcctcgtagtaagcgggataaccctccagtgcctccagattgggggaagcatagccaatgtagtccatgttggccagattggattccgtggaggcgatgaagttgatccacgcctcggcctcctccttgtgctgagcggttttcagaacgcacatggcgtccacgaaccagttgctgccctccttgggcactacgaacttcagatcggggttgttgtccagcatggtcaggtagtcaccggcgtagtacatggcaatggcggcgttgctgccctccatcttgccgaagacctcatccatcacgaaggactggtacacgcccttgctcttggcgtctgccagcagctcgtaggcctcccggatctgggactcatcggtagtattgatgtcatagcccagatccagcagggcggcggccagagcgtcccgggagttgcggatcatcaggacgttgccggcgtacttctcgtcgaacatggcgtcccagctgtcgatgtcgccgtccaccatggtggaattgtagatgatgcccagagtgccccaggtgtagggaacggtgtacttgttctcgggatcgaagctcaggctcttgtactgctcgccgatcttttcatagttggggatgttgtcatagttcagctctgccagcataccctcgtcaatgagacgggcgatcatatagtcagaagggacgatgacgtcatagtcaccagcgccggttttcagcagggagtacagggcttcattgctctcggcggtctggtagttgaccttgatgccggtctcgtcctcgaatttgtagatcaagtcctcgtcaatgtattcaccccagctgcaaacattcacaacacgcttgccgctgccgttactgccgccggaattggaatccgaattggaatctgtgctgctggtaaagctgtagctattaccgccgcatccggtgagaaacaggcttgccgccatggtcatggcacaagtcaaggctaatgcttttttcaattgatcattcctccagtgtttttttgatttttctatttcaggcttacgccgtgaaaccgtttttatctccgctgctccgcggccagcttgcgctcctgtcgggcctcccgggcgttgatgaccgccagcaggatcagcaccgtcacaaacagcagggtggagatggcgttgatctccggggtcaccttcttcttggtcatgccgtagatggtcatggccagagtagaggaagaggaaccggcggtgaagtagctgatgacgaaatcgtcaatgctcatggtgaaggccgtcagcgcaccggagacgatgccgggcttgatttccgggataatgaccttccagaaggcctgcatccaggtgcagcccaggtccatagccgcgtccaccagattgcggtccatctgccgcagcttggggccgacggagaggatcacatagggaatgttgaacgtgatatgggcgatgagcagcgtcccgaagcccatggtcaggtgggtggggagccggaacagccccaacgtgttgaaccaggaggcgaagctgccccaaccgctgaaaaacgccacgaacagcaggcacatggaaacgccggtgacgatatccgcgttcatcatggggatgttgttgacggtcatcagcggattccggacccggcggcgcatggcgtaaaagccgatggcggcgaaggttccggccacagtggcgatgatggtggccagcagggacaccagcagggtggtgtacacactctgcatgatgatccggttgcggaagagcttcgtgtaccaatggagagagaagcccttccagaccatgttgctgttgccggagttaaaggaaaagacgatcagcagcacgatgggcgcgtagagaaacacgaacaccagcgccataaacaggcggtccagaaaagaattgttcttcttcacatcatcaccgcctgttcttcaccctcgccgaagcggttcatgaccaccatgcagatgaccacgatcaccatcatcacaagggagatggccgcgcccagatagggattgtacgcgccgcccatatactgctgttcaatgaggtcgcccagcagcatttccgtaccgccgcccagcattttgctgatggcaaaggtggacacggaggggacgaataccatggtgatgccggagagcacaccggggagggacaggggcaggatcacccgccggaacacctgaacggagttggcgcccagatcccgggccgcctcgatgagactgtggtccagcttgacgatcacggaatagataggcaggatcatgaagggcaggtagttatacaccatgcccagcaccacggccccttgggtattgatcatccggaaaaagctgatgtccgttccgaagatgttgttgtaaagggcgatcagcccaatcttccggaacagctgattcaaaaggccgttgttttccagaattgccatccaggaataggtccgcagcaggaagttcatccacatgggcagcataatgagcaccatggccagccgctggaaccgggggccctccttgctcattttgtaggacacggggtagccgatgagcacgcagatggcggtggcaatgagggccagcttgaaggagcgggtgaacaccacggtgtaggtgcccattttggcgaagttatccagcgtaaagccgccgacagaggcggaaaacgcgtaaatgaccaccatgatgatgggggccaccacgaacagcgccatccagatcacataggggatggcgaagcgggaaagacggttattcttcatccccgctctcctcctcatccgacgaaagggtggcgtcgtccagctcatcgtattcctcagagaaggaggaatagtcgccgaacataccagagtaggcactcttcttcatgacgtggatgccgtctggatcgatcttgatgccgatgcgggcgccctcggggcagtggtccgtggtctggatcagccacttgaagccccggaaatccacgatgatgtcatactgcattcccttgaaggtcacggaggtgacggtgccggtaagctggccctgctccacggggacgatgtcaatgtcctccggccggatgaccacgtccaccgcctcgttgggggcgaagccgccgtccagacaagggaagcgccgaccgtacatctgcaccacgttgtcctcgggcataatgccgtcgatgatgttggactcgccgatgaagtccgctacgaaggcgttcttcggctcattatatatatcctcaggcgttccgatctgctgaatggagcccttgtccatgaccacgatggtgtcggacatggtcagagcctcctcctgatcgtgggtcacatagataaaggtgatgcccacctgctgctgaatccgctttaattcgatctgcatatccttccgcagcttcaggtccagcgccgccagcggttcgtccagcagcagcaccttggggcggttcaccagcgcacgggcaatggccacccgctgctgctgaccgccggaaagggcctccggacgccggtgctcaaagcccttgaggctgacggtctccagcatctccatgacccgctccttgatctcagcctccggcagcttctgcatccgcagaccgaaggcgatgttctcatacacattcaggtgagggaacagggcgtatttctggaaaacggtgttgatctgccgctgatagggcgggacgtcattaatcctcacaccatcgaacaggacatctcccgacgtaggcgtcgcgaaacctccgatgatacgcagcgtggtggtcttgccgcacccgctgggtccgagaagtgtgaggaactctttgtcattgatataaaggttaatgtgatcgagaaccggctcgtcgtcgaatgccatgcagagatcccgcaggcgaatcaactctttggacatgtatcctcccccatttcataaggccgtttcccacccgttttccggtgggggcctgaaaaatgccgcctcttctctctgttaaggggggaccctgtttctttgaaattcggcaattcagaatcatagcggaaaacccttgaaatgtcaaggaaaacgcccaattttgtcgggcgtttttcaaaaaagatattaagaagatatttctgggaaatatttctcccggaaggggacgttttccactgtaaattcctgccccttcaggtagttcaaaagaccggcgtcggttggaaaatcgaaccgcagcttgtaggagtacaacgcctgccgggtctcatgatagcggcggttcacatcgcccttgccgtacttgccgtcccccagcagggggcagccaatctccgccatggaaacgcggatctggtgggtgcggcccgtcagcagacggcattccaccagagacagcccgccccggctttcgagtgtccggtaaagggtgacggcggtcttgccgccgggcaccggcttgtggaagaaccggacctcctttttggcttcgtttttcagcaggaagccctcgatttttccctccggctgcttgggccggcccacggtgatgcaaaggtaggacttttccagctcgtgggcccggatcttctcattgatgatccgcagggtctccgcgttcttggcggcgatgacgataccgccggtgttccggtcgatccggttgcacagcgccggggcaaaggcattttcccacttgggattccattcccgtttctggtaaagatatgcctgaacgtgattgatgagggtgttgaccttttccgtctcgtcagcgtggacggacataccgggacgcttgtccaccagcagcagattttcgtcctcgtagacaatattcaactgtggcttgaacaccgtgagaaagagattttcctcattgggcttgtcaaagaactcatcattgatgtataattgaagaatatcgccggtctccagacggacatcccgcttagaccccttgccgttgaccttgatccgtttcaggcggatgtacttttgcagcagagcaggggggagcagcggcaggttcttggccacaaagcggtccagccgctgtccggcgtcattttttccaatggtaaattcccgcatgagcatcctccgttttcgttgtggactgctctcatcatacccgctttttctcgtgttgtaaagcgcgggacgaaaatcaaagaggcgaagctatgaagaaacaaaagcaagagcagaccggtcaggtcaattttgtctgggccctggccggcggttatctgatctatttaggcggcaagctgctgtacagcctgtacagagacggaaccggcagttctccggtcctggtggtcattcccgctgcggcggtgtttatcggcgtgggcttctggctgctgcgccgggaatggaaggcgtatcagttcggcgccgcccacaaggacgatccctccacctggaacgatgatccggtggaagaggagcttcccgcgggcaacggcgacgaggaggatcccctatgacagaacggctgctggcggcgctgacggacaacggcaaatggctggaaggctttacccgcctgggatatgagtctacgttccgggaatactgcgatcgcttcacgccggactatctggcggcggtgcgggaagcgggggagtccgggcttcctgctttggcggacagcctgctggacgccttggaggcccagtggaagcaggcccgcttctggaaccgcacaacggtccggggcgaaaccaagcaggtggtagtagggtatctgacgcctatgcttatggcggatcaggaactgcggccctttgcgggcgttctgcgggaccgttggaacctgcgctggcccaaggatgtttatcatgccgccgggtatgagcggatctgtaagggcttcaagctgagaattttgggttttgaggtcccggagaagaaaaaagaggcgccgttggacgatgaaatttgatcccgccgccgtttttgaaaaaactggcggaaaatcaaaaaaactgtttgacattgcggatgcaatcctatataatactaaacgtgtcattgcgaggtagcttatgctcattgacgttagacctattctgcatatccccggcaaggaactgaattttcagtttgagctggatctgtccgatatggaattcggcggaagaaatcccatcagccggcccgtcattgtggaaggcgcggttcggaaccgggcggaagtcctttatctggagctgacggctcacaccacgttggacgctgtgtgtgaccgctgcggaaaggaattccttcaggagaaggcggtttcttacggttgtattctggcggaagagttgcagaacgaggaggatgacgagatcctcctgctggaagacggcaaggtggacgtaggtgagttggctcgcgaagcctttattctcgacatggacacgaaaactctgtgttctgaagattgcaagggactttgtccccgctgcggtgccgacctgaatctgggaccctgctcctgcaaaaaggatgtagacccccgtctggcggtccttgcaaagcttttggagaacaaataaagtataaataaggccgcctggcctttgtagatcaaggaggtgtcacaatggcagtacctaagggaaaagtatccaaagcaagacgcgataagagacgcagctccacctggaagctggctgtccccggtctcgttgcatgccccaagtgcggtgctctgcacctgcctcacagaatgtgccaggagtgcggcagctacaatggccgtgaggtcaaagttgtcaagtccgtggcggcgaagtaagagacaattgcttgctttaggagggaagagaattcttccctcctttacttttgcgcggaaccgtaagggtaccgggtcagcgcgccgtgaaaagtctctgttttcccttgccatacaggggaattacggatataatagattcaatcattcaacttcttgcggcggcagcgaaacacaccaacgccgctcaggaaaggagtcatcttatgtcgaaacctatcatcgccatcgtgggccgccccaatgtgggcaagtccatgctgttcaataagatcatcggccgccggctgtccatcgtggaagatacccccggcgtgacccgtgaccggatctacggggagagcgactggcagggccggaagttcaccctcatcgacaccggcggcatcgagccccggacggacaatcagatcctggctttcatgcgttctcaggcccagatcgccattgacaacgccacggtcatcgtgttcctctgcgacatcaagaccggcatgaccgcctccgatcaggaggtggcttccatgctccagcgctgcggcaagccggtgatcctggctgtcaacaaggtggaccagggccgcagcccggacatctatgaattctacaatctgggtctgggcgatcccatcgccgtctccgccgtccacggccacggtaccggcgacctgctggatgcttgcgtgcagtacttcccgccggaggacgaggaggaagaggaagatgacgccatcaaggtggcggtcatcggcaagcccaacgccggcaagtcctctctggtgaacaagatcttaggggaggagcgggtcatcgtgtccaacgtggcgggcaccacccgtgacgccatcgactcccgtttcaccaacgataagggcagcttcgtctttatcgacaccgccggtatgcggaaaaagtccaaaatcgaagaggatattgaaaaatacagcgtcctccgggcgactatggctatcgatcgggcggacgtgtgcctgatcatgatcgacgccaccgagggcgtcactgagcaggacaccaaggtggccggcatggcccatgaggcgggcaaggccagcatcatcgtggtgaacaaatgggatctggtggaaaaggacgataagaccatggcccggatgacggaggagatccgccgggatctggcctatatgacctacgcccccatcctgtttatctccgccaagaccggccagcgggtggacaagctgttcgacatgatcgactatgtggccaatcaggccgctttccgggtcaccaccggtatgctgaataccgttctggcggacgcccagacccgcgtccagcctcccacggacaagggccgccgcctgaagatctactatatgacgcaggtgggcgtgaagccgcctcacttcgtggtgttctgcaatgaccggcggctgttccacttctcctatcagcggtatctggaaaactgcatccgctccaccttccgtctggagggtacccccatcatcctgtccatccgggaaaagggcgataaggaggattgaccgtgcagagcatctttccaaacggcgcgccgctgccgctgctgctgggcgtcgcggcggtattcgcctacctttgcggctgtttcaacggggcggtcatcgtctccaagtatatcctgcggaatgatgtgcggaaccacggcagcggcaacgccggcctgaccaatttcttccgcaccttcggcgggccgctgacctttgtggtgatcctgtgcgacgtactgaaggcagttgtggcgctgctggtcagccaatggctgatgttcagcggctatacgatcttcatctccgcagactttaccgttgcgtattgggacaccttcgccaaatactgggcgggtctgttctgcctgctgggccatatgttcccctgcatgttccagttcaagggcggcaagggcatcctctccggaggtgttgtggccattatgatcgactggcgcatcgccgttgtggtctggggcggcttcctgattttgactgccctgacccggtatgtttcccttggctctctgtgggccggggccagctttccctttatcagctggtactgctacccccagacgccgatcattgtactggccttttgcctgggaggattgatcgtctggaagcaccgggccaatatccagcgcttgctggcgggaaatgaaaacaaactcagtttccatcggaagaagacttaggaggataacatgaaagcggttgtagttggcagcggcggctggggcacggccctgagcatggtgctctgcgacaatgggcacgatgtgaccttgtggtcccatgacccggcgaaggctgcggagatggcaaagacccgggagaattccaagctgaagggtgtccagctgccggacagcctgaagatcagcggagatttggactgtctgaagggggcagaactggtgatctccgccacgccgtccttcgccgtgcgggagacgggaaagaagatcgccccatacctgacaccggagaccgttctggtcagtgtttccaagggcatcgagcgggatacgaacctccgcatgagccagattttggcggaagtcaccgggaacatctgtaaagtagctgccctttccggtccctctcacgcagaggaagtaagcattcggatgcccaccggctgcgtgtccgcctgtccggatctgaaagtggcccggctggtgcaggacgcctttatgaacgactatttccgggtctataccagtgaggatatcgtgggcgtggagctgtccgccgccatgaaaaacgtagtggctctggcctgcggcgtatgtgacggcatgggctatcaggataatacaaaggctttgctgatgacccgcgccatggcggaactgacgcgccttggcgaaaagctgggcggcacccggcagaccttcggcggtctggcaggtatgggcgatctgatcgtcacctgcacctccatgcactcccggaaccgccgcgcaggcattctgatcggacagggaaagtccgcacaggaggccatggcggaggtgggcgccgtggtggagggctattacgccgcagaaagcatctaccagctctctcagcgtgagggtgtggaaatgcccctctgccgcagcgtctatgaggttctttatcatggcgtggccgtgcaggatgtggtgagcagcctcatgcgccgggccaaaaaggacgaactgacagagaccacctggctgtaatgcatcaataaaaaaccaccggaacgtgctgttccggtggttttttctaagttttatttaattccgcacttccagctgatcccaaggtcacgaagattgcggaggaaccgcaaagggaagtaagactcatcaaaaacgtgcttcgccgggaaaccggcagagctcatttcaatgggatcagagggaatgaaacagcaaacggaagcgggggagtggtgcaagtgaaaactgacctgcagcataccaatagaaaaagcactcagaccaaagtctgagtgctttacctgtttatctgtacaattagaccgctctggtgaccttaccggaacgcatacaccgggtacaaacataaacatggcggggggaaccgttaacgatcgccttcacacgtttcacattgggtttccaagtccgattggaacgccgatgagagtgagagacctgaatgccgaacgtaacgcccttatcgcagaactcgcactttgccatccgttgcacctccttgctgttgcgtaattacatgcttacatacaagcacaagtagtatcttagcagattcaaacacaaaatgcaagaaaaatttgaaaaaaattgaaaagtttttttgatgggccgttcagcctgaaaacggtgaaagtcttgcgcctatgtggaaaatcatatataatgagaaagaacgaataaattgattttctggccgctggaccgtgtgtgcatttggacgccggaacagcggtgggcacattatgaaagggtggaatacgatgagtgaaaaaggcaccagcctggcacaatatgtggagcatttcggactggaaattctgaaccatggagatacctatgaaacggacaaggtagaatctaccaacgtcaaccggccggatctgcagatcctgggcctgtttgactatttcgacgcccgccggatccaggtcatgggcaaggcggagctgacctatatcatgaaaatgagcgagaaccggcggaccaaggtttttgatgacctgttttcctacaccattccggcgctggtcctggcccggaatatggaatgtcccgcagagtgcctgcaatgcgcccggaaccacggacggacgctgctgcggacaaccgagcggactgcggatttcaccagccataccatggaatatctcagcaagcagctggctccctgcatcacccggcacggcgttttgctggacatttacggcgaaggcgttatgatcaccggtgattccggcgtcggcaagagcgaatccgccatcgaactgatcatgcgcggtcaccgtctggtggcggatgacgccgttgagattcgccttgtggccgaccagttgatcggcacggcgccggaggtcatccgcaactacatcgaactgcgcggcatcggcgtcatcgacgttcagcagctgttcggtatgcgggcggtcatgccggagtctcagatcgacctggtggtggaatttgagccttgggacagctccaaggcctatgaccgtctgggaatcgaggatcggtttatcgacattctgggcaaacaggtgccctgcgtgacgctgcccatccggcccggccgaaatctggccagcatcgtagaggtggcggccatgaacaaccgtcaccgccggtatggatacaatgccgcggaggagttggccagaaaagtggatctgcatgcagatctgggcagcaaatcggccaatcagagaacataacggcgattggatgtaaggaggtccactatggactggacgattgaatttgataaggctatcgaacagtatctgccggatctggaagtgcttcaagacgagcctatgagccggcacaccaccttccgcatcggcggtccggcaaagcggatggcatttccttccagccgggagcagctggtgctgctgatgagctttgcaaaagattacggcgcaaatccgctggtcattggcaacggctccaatcttctggtcccggatgagggactggaccggctggtgatcgacacctctgccaacctgaaccgggtggagcggggaagcgggaacaccgtcctggcggacgccggtgctacgctggcccggacggcggatctcgcctgcaaatcggggctgacggggctggaatttgcccacggcatccccggcacggtgggcggcggcgtttgcatgaacgccggggcctacggcggcgagatgaagcaggtgcttcgatccgcggcggtgctgttcccggaggagggtatccgggcgctttcctgcgaggaactgaatttgagttaccggcacagtctgctgacggagcatccggaggcggtggtgctgtacgcggaatttgaactgacgcccgacgatccggaggccatccgggcagccatgcgggagctgatggcaaagcgcaaggccagccagcccttggaatggcccagcgcgggcagtaccttcaagcggccggagggccactttgccgggacgctcatcgaccaatgcggtctgaaaggactgacggtggggggcgcgcaggtttcggaaaaacacgcgggcttcctcatcaaccggggcggcgcaaccttcgcagacatggcggaactgatctgtcaggtgcagcagcgggtactggaggaaaccggcgtcacgctggagccggaggtcaaaatcgttaaataagcgggtgaatacatggagattctgatcatttccggcctttccggtgcaggaaagagccgggccgcctcttttttagaggatatgggcttttacattgtggataatatgccggcggccatgatcctgaaatttgcggagttctgcgccggtggcagccagcgctatgacaaggtggcgctggtgtatgatgtccgcaccgccaacagccccacagagctgttcgatgtgctggacgtgctgaagcacagcagcggcgcctgcagcctgctgtttttagaggcggagccggagaccatcatcaagcgctacaaggagacccgccgccgtcatcctctgatgcagcaggcggattctctggaaaaggcggtgcggaccgagcaggagatgatggaacctctacgccagcgtgcggatgtggtcatcgacaccacccatctttccacagcccagctccgaggtgagctgctgcggcatttcggtagcgataccacggaaaagggcggtatgagcgtcaccatcacctccttcggcttcaaatacggcctgccgatggaggctgatctggtgttcgacgtgcgctgtatgccgaaccctttttacatcccggagctgcgggaaaagaccggtttggatcagccagtggcggattatgtgttttctttccgccagacacatgattttatggaaaagctccgggacctgctgaccttttccctcccgctgtacgccgaggagggaaaaacggagctggtcatcgcggtgggctgcaccggcggccgccaccgctccgtagccatgacccacgccctggcggaggacattcggaaccttggataccgggtccgggaaaatcaccgggatatgaaccggtgaccgcctaagaaaggaggacgcatgtccttttcctacgatacgaaaaacgagctatgccgcctgccggtacagaagttgtgctgtgcccgggcggaggcctacggaattttgctgttttgcaataccttcagtgccacggaggtccgcatcatcacggagaacccccattttgccgcccggctccccaaactgttccgccgggccttcaacctgcaattcgaccgccagccggagccggagcaggaggagggcaagcggatcttccagatcacagatcaaaaaaagctggaccatatcatcaatctgctggggtttgatccccagcaaaatctggtgctccacatcaatttcggtatggtggaggagacctgcgaccgggcggcgttcctgcggggagccttttttgccgggggcagtatcacggatccccaaaagcgctaccatctggaactgaccacctcccatttgcaggtgagccgggagttagattcgttgcttcaggagtgcggctatccgcccaaaagtctcagccggggcggcagcctcatcacctatttcaagcagagcgaccagattgaggactttctgacgctgatcggcgcacccgtggcagccatgaacgtgatgtccgccaagctggaaaaggacctgcggaatagcgtgaaccgccgcctgaactgcgacagcgccaatctggataaggcggtggaggcggcacaggagcagatggaggccatccgccgcctgcaagcggcggagctgctggagcagctgccggacaagcttcaggaaacggcggcgctgcggctggaatacccggagctgagtctgtccgagctggcggcggagtttgacccgccggtgagcaagtcctgtctgaatcaccggctgcggaagctgctggagctatccagagacctgtctgaataatacgattttacaaaagaaagagagaacaagctatggatcggtgtgaacaagcggttggttaccacaagaaaggcttcaactgctgccagagcgttctggcggcttttcaggatgtgatcggactgacggagacgcaatgcctgaccttgggcggcggcttcggtgcgggcgcgggcaccggcgagctatgcggcgctgtgaccggcgcggtgatggtgctggacctgctgacccccgccaatcccggcgatgtgatggggtccaagaaacggtctgtgggacaggccaaggagctgcaaaagcggttcgcggagcggtttgacgccctgcggtgcgcggatcttctgcaaaagaagtttgtcccggacgataccacccccgcagccaaggctctggggcttactggccactgtgacattatgatcgccacggcggtcgagatcgtggagcagatgctggcggagcggtgatccacgaaaaggaaagcgcttttcagaaaggacgctgactctatgaaggagaaaaagcctgttggtcctcacaagctgttgaagatatgcagacggcttttcttttccggcgcgctgaccatgctggctgcggcatatctgatcggcgaatcctatcagtggcggggaaacgatgtatcggtattcctttggatcgcggcaggtgttggaatcatgatcaaggccggaagccttctgaccgccttttcgaagctacgctgtccctattgcggcgcgtccctgatggccggcggccagatgccgtccagcctgcctcatttctgcccggactgcggaaaaacgctggatgactgcgattaaatccacgcaaaagatatatagtaaatcaactttacacaagttgaaatagaaacaaatttggcaaatacataagagagaaaacaggaggtggcctatggccttcacccatctgcacgtgcatacggagttcagcctgctggacggcttctgcaagatcaaggagctaccgggggtggtgaagtccatgggccagaccgcctgcgccatcacagaccacggcgttatgtacggcgtcatcgacttctaccgggcctgtaaggcggagggcgtgaagcccatcatcggctgcgaggtctatgtggcccctcagggccgcacccggttcgataaggtccacgaattcgacagcgagagccgccatctggtgttgctgtgcgaaaacgaggagggctaccgcaacctctcctacatggtgtctcttgcctggacggagggcttttacgtaaagccccgcattgaccaggagctgctgcgggagcactccaagggcctgatcgccctatcggcgtgtctggcaggggagatcccccgccgcctgcggaacggggagtatgacaacgccaaggcctacgcgctggaaatggcggagctgttcggcccggatcggttttatttagaattgcaggaccacggcatccgtgatcagaagatcgtgaaccagtctatcctgaagatccatcaggagaccggtatccccatggtctgcaccaatgacgcccactatctccggaaggaggacgccgaggcccatgacatcctgctgtgcatccagaccggcaaaacggtggacgatgaaaaccggatgcgctacgagcctcagaacttctacctccgcagcgaggaggagatggcggcgctgttcgagggctacgagggcgcactggaaaacacccagaagatcacggagatgtgtaaccttgaatttaccttcggcaagtaccacctgccggaattcaagctgccggaggggtatgacagcttttcctatctgaaaaagctgtgcgacgagggctacaaggcccggtacggcgatgatgacaaataccggggccagttgaaatacgagcaggacatgatcgagaaaatgggctttaccgactatttcctcatcgtgtccgacttcgtgcgctacgccaaaagcgtgggcatcccggtgggaccgggccgcggcagcgcggcggggtccatggtcagctactgcctcagcatcaccgatattgaccccatgaagtacagtttgtactttgagcggttcctgaacccggagcgggtgagtatgccggatatcgacatggacttcggtgatacccgccggggagaggtggtggactacgtccgccgcaagtacggcgacgaccatgtggctcagatcgtcaccttcggcaccatggccgcccggggcgtgatccgggacgtgggccgggtgctgaatatgccctacgccgatgtggacgtcatcgccaagctggtgcccaacaccctgcacatcaccctgaatgacgcgctgcggctcagcaagcagctcagcgacctctatgaggccgacgagcaggtaaaaaagctcatcgacaccgccagggcgctggagggcatgccccgccacgcctccacccacgccgccggcgtggtcatcacccggaagccggtgtacgaatatgtacccctggcgaaaaatgacgaatccgtggtctgccagtatatcatgaccacgctggaagagctgggcctgctgaaaatggacttcctgggcctgcggaacctgacggtgctggacgatgccgtgaaaatggtgcagacccggcagccggacttcaccttggatgacatcccggagggggacccggagacctacaaaatgctctctgacggcaaaaccaacggtgtgttccagatggaatccaccggcatgaccggcgtctgcgtaggactgaagccccagagcattgaggatatcacagccatcatcgccctgtaccgtcccggccccatggattctatccccaagttcatcgcctgtaagcatgaccccagcaaggtcagctatatcatcccggagctggagccgatcttgtccatcacttacggctgtatcgtctatcaggagcaggtcatccagatcttccagcagcttgccgggtacacgctgggacaggcggatatgctccgccgtgccatgagcaagaagaaggccaaggacgtggctaaggagcgggaggcgtttctccacggcgacccatcccggaatatcaagggctgcgtagccaacggcatcgaccctgccgccgccgaaaagatctacgatgagatcttcgccttcgccaattacgcattcaataaggcccacgccgtttcctatgcggtggtggcctaccagacggcttatttcaagtgccacttcacccgggagtatatggcggcgctgctgaccagcgtgctggataactccgacaaggtctccggctacatcggcgagtgccgggagtgcggcatcgccctgctgccgccggacatcaaccgctccgcagaccgattcacggtagaggaggggggcatccggttcggactggtggccatcaagaacatcggccggggcttcattcaggcagtgatgcgggagcgggagaccggtggcgactttacatccctgtacgatttttgcagccgcatgaacggcagcgaaatgaacaagcgggcggtggaaaacctgatccgttccggtgcctttgactccatgggtgcccggcgttcccagcttatcaaggtttatgagtcggtgatggactccgtggcagcccagcagcgggaaaacgtggagggacagatggacttcttctccatggccgccgacaatgatgaaaaatcaaactccgtaaaggaaattaccttgcctgatattccggagtatacaccggaggaattgatgaccatggagaaggccaccactggactgtacctctccggtcaccctatggaccattatcgggacgctgtgcggaagctccacgctcccaccatcgtttcaattatcgaggacttttcccgggaaaacggtccggagcgcttcaccgacggccagcggatcaccattgccggcgtcatcacctccagcaagacgaaaaccaccaagaacaacagcctcatggcctatgtcatggtggaggacgacaccgcctccatggaactgctgtgcttcagccgggtgctggagacctgcggtgcttacatgaaggaaaatcaggcagtggtggtaaaggggcggctgtccgtccgggacgaaaaggccccccagatcatgtgcgactccatttaccccctatccacggtagaggggggcattccggaaccccagcccaagcaggaaacggcagcgggggagaccctgttcctgaaattccccagcatcaacgatcccgccatccgccacatgaagctggtgttccagatgttccccggcaaaagcgtggtgaaaatggtcatggcggacacccgaaaggtctatgctacccaagcactgttgcacccggcgctggtgcaggaagctcaggagactctgggtcacgaaaatgtggttgtcaaataatagccaaagatcccaaaagcccggctttcggaatattccggaggccgggcttggtttatctgttcagttgccaacgaaaaaaccggccctccgaaaacggagagccggtgtagatttggtcagcgctcttcccggaagaagctgagacccagagaggcggggggctgatcctcccgctttttccgcagggaaacgatgatgagcaccgccagcgttaccacataggggagcatcttgtaaagctccttgatggcaaggttggtgccggtgggaatgtagagatacaggatgtaaaatccgccgaacaggatggaagccagcacgctgacgttgggccgccagatggtgaagatcaccagcgcaatggccagccagccgcggtcgccgaaggcgttgttggaccagacaccggaggcgtagtccatcacatagtacaatccgccgagccccgcgatcatactgccgatgcaggtagccagatacttgtacttggtgacgttgatgccggcggcgtccgccgtggatgcgctctcacccacggcccggagatgcagtccgggacgggtgtgcttgaggaagtaggaggccagcagcgccagcagaatggccagatacgccaggaatccataggacaggaatatctgaccaaaccagccgcatttggcggcgaaggggagggatttgctgaaataggcgctggtggcggaaagggcgatggagggaacctcgctgcccgtcagcttgatgagagagccaccgaagaagttgccgatgcccacgccgaaggtggtcatggcaaggccggtcacgttctggttggcccggagggtcaccgtcagcaggcagtacagcagacccatcagcaaagagcccagcagggagcacagcatagggattccaacggccagaaggccgttcatagaggccgcaggggtggactgctcgtagaagaacgcaccgatgacgccgcagatgccgcccacatacatgatgccggggatacctaagttcaggttgccggatttctccgtcaggatctcgccggtgctgccatagagcaggggaataccctgcatgactgcccggggaaggaatgaaataagatccatggtttatgcctccttctttccgcccttgcgcaagctgacccgataggtgatgaaaaattcgctgccgatgatgaaaaacaggatgatgccggtgagaatgtccgagaaggactgattcaggccgaaggtactggagatctcgctggcgccccggcccagcaccaccagcagcaggctggtgaagatcatgatgatggggttgaatttcgccatccacgataccatgacggcggtgaagccacggccgcccacgatagtggtggtgagggtgtggtccgtaccggcagtgagcagcagacccatgaggccgcacaccgcgccggaaagcaccatggtgcggacgatgacccgctccaccttgatgcccgcgtagctggcggtccgctggctttcgcctaccacggcaatctcgtagccgtgcttgctgtaattaagatagatgtacatgaacacggtgagcaccgccaccacaaggatcaccagcaggtatttctgaccgccgaccaccggcagccagccagcctccgtgccctggttgatgatgccgatcttaccggcgcccttggggacctcccacacgatgatgaagaaggccgcaagctgggtggcgatgtagttcatcatcagggtgaacagcgtttcattggtgttccacttggccttgaagaaggcggggaggaagccccagagggcacccgcagccagtgccgcggccagagagaccaggatcagcactgcgttggggagcttgtcagccaagcagatcatgcaggcagccgtggccagacagccaatgagcacctgaccctcggcgccgatgttccaaaagcgcattttgaaggcgggcgtcaccgccagagaaatacccagcaggaccgccaggttctggaaggtgacccaggactttcgggcggagccgaaggcacctttgaagatcgtggcaaaaatattgacagggttttcgccggtcagcagcatagtgaccaccgcgcagaccaccagagccagcagaatggcacagccccggatggcgaagctcttgtaccagggcagggtgtcccgcttggcgatgtggaacagagattgctttttattcatctgtcttgcctccctccatgcgggtcatcagcgcaccgatctgccgcttgtcggcagtgcgggcgtccaccacgccggacacctgaccgccgcagaggaccacgatccggtcgcacagctccagcagcacgtccagatcctcgcccacatacatcacggcgatgcccttcattttctgctccgtcagcaggttgtaaatggtgtaggatgtgttgatatccagaccgcggacggcgtaggccgtcatcagaacggcgggggcctgcgcgatctcacggcccaccagcaccttctgaacgttgccgccggacatccggcgcaccgggaagctggtgctgggggtcacgacctccagctcctgccagatgcgctgggccagatcctccgggtccttccggttcaggaaaacaccgtgacccttccgccaggagcggagcatcatgttgccggtcatgcccatggagccgaccagacccatgcccagccggtcctccgggacaaaggacatggcaatgccgctcttgcggatgtccatggggtccatgcccaccagatttttcgttttgccgtcggcgggatcgtaataggtcacgctgccggaggcgatggggtagaggcccgcaatggattccagaagctcccgctggccgctgccggccacgccggccacgcccagcacctcaccggcgttgacggtaaagctcacattgtccagacgcttgacgcccagctcatcaaacaccgtcaagccgtccagcaccagacggggcgttacgttcaccgggtcaggccggtcgatattcaggctgacgctgtggcccaccatcatatccgtcagggactgctggtcggcgtccttggtggccacgtcaccgatatactcgcccttgcggagcaccgccacccggtcggagacgtccagcacctcgtggagcttgtgggtgatgatgatgagggatttgccgtccgccttcatgttccgcatgatctggaacagcttgtccgtctcttgcggcgtcaggacggcggtaggctcgtccagaatcagaatatccgcgccccggaacagtaccttgacgatctccaccgtctgcttctgggaaacggacatatcgtagatcttctgattggggtcgatgtcaaagccgtacttatcgcagatctccttgactttcttgccggcctcggccaagtccagcttgccctccagacccagaacgatgttctccgtggcggtgaacacatccaccagcttgaaatgctgatggatcatgccgatgccatagttgaatgcgtccttgggggaggcgatggtcacaggcttgccgtgaatatagatctgtccctcatcgggaaagtagatgccggaaagcatattcatcagcgtggtcttgccgctgccgttttcacccagcagagacaggatctcgccttcgcgcagttccagattgatggcgttgttcgccacgaccttgccgaaccgcttcgttacgttttccatttttaccgcacacgcaggagccaaggcagtcaccctttcttcagcggcgggggagaaagcacagtcccgcgccggatcgttcaatatggataattatagcatacacccggcggcttgtaaattcaaagtacaggcctgacgggaaaaaatccgggaaaaccggagccgtggaaaaggaaagccggactgcctgaggcagtccggctgtttgggatcgagaagcgatcagccgccgaagttggtatccagcaggttgatgccgtcgatctgcagatcgaaatagggagcggaacggaaggtggactcggcaaagtagccgtccacgatggcctcggtgtcgggagtgtagttgggatcggtgtccacgtcagccttggaggaggtcagagtctcacccttcacggtgaaggtggagcagtcaaagacgtgacgggtgccgttctccagttcggccttcacagcgtcgatggcctcctgagtgccctcagcggcagcagtggtgttgacatcggtgagcaccacggaaccggtagccagagtgccggtccagtcggcgtcgatggcctcgccgttcatagcagcggtgatggcatactcatagtagggagcccagtcgatccgggaggaaacgatgaaagtgttggggcaggcagcctgggtggagccgttgtaggagatgttgggaacgccggcggtctcgcaggcagtgggagcgcccatggagtcagcgtgctggctgatgaggacgcagccgttggcgatcagcttgttggcgccttccttctcagcggtctcgtcataccaggaaccggtgaaggtcacgtccatggtgacagaggggcacacagacttggcgcccagatagaaggaggtgtagccagagataacctcggcataggtgaaagcgcctacatagcccatcttggcctgatcctcggtgatgtaaccgttggcgatcatgtcattgagcttcataccggcggcaacgccagccaggtaacggccctcatagatggaggcgaaggcgttgtggtagttgctcaggccctcggtgtgagccttggtgccggtggagtggcagaactgcacgttggggaactccttggcagcctgaatcatgtagtcctcgtgaccgaaggagtcggcgaagatgatgttgcagccgtcatcggccagctcagcagccttgtcgtagcactcctggccctcgggaacgttggtgatgatcttgtactccacgcccagcttttcgcaggcttccttagcggcgttgatgaagttcaggtcataggtggagttctcatcatggagcatgatgaaaccgaccttgaaatcggtagcggtctcggcgggagcatcggtcttggtctcgtcagctttggtagtatcatcgctcttagtgccgccgcaggcggaaagggcgaggaccatagagagactcaggagcagcgcaagaaacttcttcatttcaataaatcctcctcaaattaaatcctttttttcggcggatttccacatagaacaaagaaacccgtcacccatatcataccgaaaaaaccggaaaatggcaacgccaaatagtcatcaaattcatcttgaaaagtaatacctttttggttaaagagtagacactataagcacaggtaataccttgcaaaagctgtgcagaagacaggcggtcgctttttcatgaccgacgccataaaaaacaagactgtcgataaaacggtaaattctccgcgacggtaaggaaggatgtgtgcgggaaacccaagaagggtgtcctgtgccattgaaatcctcagttttcagaacttttataaagttctgaaaacttgttcaacggggcgaaaagactttttcgacacgctgaaacgccgcgcaaaatacgcggcgtctttcgctatggatattcttcgttaagactcctcttcgtcctccggcgtgggggtgttgagcaggaggtcgatgatctcactgtacagcttctccggggcctgccggaaccgggcggccaggatctttcccatgtcctctctcggcaccatgagcttcaggtccatcacgctgcccatatcgtcatccagagacagggaaacggtgaaggtgccgttggggcgcggctccgtagagcttttcacctgattcttccgccgcagggcccggttgcaggcattcagattcttgtcacaccgaagccggacggagtaggggaggctggtctcacagatctcactgttgcgccggcccttttccgtaatggcatagaggccgctctcctcgtcaagagtcaggtgttctgtttttacaagatccgccagacactcggaaaaatcgaagtagtcaacggcatcgtcgcagagggtcagatccagcagcgtgtcgaagggcaccggttcaatgacccgggcggccagatataaaataaggaacttgatctccagcttgtcctggataaatccgcgtgcggtcatggaagctctcctttgtatgtgaatcgttctttcatttcagtataccccagacgggcatgattgtacagccggaaatttgtcgaagcccggcgaaatttcccttgacggttctaccacgccttggtatgatgaagttaacataacatgaaagggcgggataccttgaaaaagagagcatgggcgctggcgctggcgtttcttctggtcctgacaggctgcggcaaaaaggaggaaccggtccctgatccggagccccctgcggcagaggaacccattgtgacgccggaaccggaagcggaaccggagcctgccgtaccggcgggaatgaatccgctgacaggacttcccatggagccggaatatgaacggaaccgtccggtggcggtgatgctgaacaacctgaaaaaggcccagccgcagcttggcaattctcaggccgacatcatctatgaggtccccgccgagggcggcatcacccggatgctggcagtctaccagaccttggacggcatcgggacccttggcagcatccgctcctcccgtccctattacattgaactggcgctgggccacgacgccctgtacgtccatgccgggggcagcccggaggcgtatcaggatctgaaaagctggaaggtgaacaatatcgacggcgtcaacggcagtgccagccagagcgccgtgttctggcgggatcaggaacgcagaaagaccatggactacgagcacacgctggtgacctccggcgagaagatccagagcttctgggacagcagcaagtacgccaagacccatggggacggatatacctattcccagacctttaccgacgagccgctgaccggcggcgcgacggcggagcacgtcaagctggcctacaccagctataagaccggcctgttcgactacgatgccgccaccggcaggtatctggtgagccagtatcaggccccctatgtggatggcaacaccggcgagcaggtgagcgccgtgaatctgctgcttttggagacgaacatctccgtgatctccggggataaggagggccgtctgaaggtccgcatcaccggagagggagacggcctcctttgccggaacgggcagagtgttcccatccattggagccgcgcggaccggaacagcccctttgtatacaccacggcggacggccagccgctggctctgggccggggaaacagctatgtctgcatcatggaccccaaaaccagcaaggtagatgtacttctggtaaattgaatctgaacgcaaacaagcccggagacacgaatgtgtctccgggcttttccttatttatgacagcaggcgcagaagttcttggcctcctcgtaatcctccgggagggccacggtgttgggcgggaaaaattcgcccacagggaaattgatgttgcggaacaggctgcaaggatcgtcggtgctgccgcaggagcactctttctccggcatacagtaatcgtacaccggcaccaggagctgggaatcccgctccagacggacgatggagaactgccccagagtaatgtagatccggcggccttcgtctccgccgcaaagctctccgccgaagcactggctgatggccgggggcacctcgcacagatcgcagtcgcagtcccggcggctgcagccgctctccacgagccgggcgtccagaacgatggggtccaccgcctccacaaccgcctcgggtaaattggaccggcgcagcatggggatatccggctccccggagcggaacttggaggagaagatcttggcgctgccctcgctgccgaacaggatggcccgcttgtcaaagacgcacaggccctccaccgtcaccggcgcgggacagctggtataggcttgcagggtcacgttgtagaaaaaccgcatatccaccgtgtagaaaccccgattgaaattgaccggctccacatccacatagacatacagtaggtccgcggacccgcccttgacggagagggcgtgattgatgacgtccacatactggagcttcgggtagaaccgcaggtcctcgatgcagtccttatcccggcaggaatcatagatcttgcgtgtatggacgcaaaccgcctcacggatgccgccggtgccctccacggggccgggcatgactttctcaggcattgtgttacctcctaaacgatgtagcgaaggaaatttccttcaatccagtctatgcggaggcttccataaggtgaaaaatgggggacccccacttttttcatctggcatatccgggcgggggccgtcatacactggagcaacaacaaaaggagggacgacccttggaacgaagagaatgtgagacgcgctatgaactggcggcggccatcctgcccagccgcctgcggcggatcgccatggagctgccggagacggacaagaaacgggcggaggaattccggctgcgggcggggcactgtctgtcggtgctgctgccggagggagagcggtcgctggaggccatcgtcaccacggaggaattggagaccttgtgcgacatcgccgctgaattttcccgctacgcctccatcgaaacactacggcaggggtttcttccggtgcggggtggcttccgggtgggactttgcggctccgctgtggtgaaggacggggaggttaccaatctgaaacagatctcctccgctgtgatccgcatttccagggagcagaagggcatcgcgcaggccgtggccccccggctgttccgggacgggcggttcgtcagtaccctgctgctgtccccaccgggaggcggcaagaccacgctgctgcgggatctggtgcggcagttgtctcaaggggagggcgtcccgccccagcggatcaccctcatcgacgagcgggaggagatcgccgtcatgtatcggggccagcctcagatggatgtaggcccccggacggacgttctcagcggctgtcccaaggcactggcgatccccatggcgctgcgggctatgaatccgcagattatcgccgtggacgagatcaccgtccgggaggatctgcgagccatctcgcaggcggcgggctgcggcgtggcgctgctggccaccatccacgccgccaacgtggaggagttacaggccaagcccttgtatcaggaactgctggccgggcgggtgttccgtcaggcggtgctgatccgaacaggtccggaggggcggctgtacgccgtggagaatctgccgtgataaaactggtgggcagtgtgtgcgtgttgttcgcgggagggagcgtctggtggctgcaaaggcaggagcaacggcgacggcggcagatcgtggcggaattggcgtcgacattggagcgcatggaaacggccatccgactgaaccggacgccgctgctgccgctgttccgacaggcggcgcggggccgctgccatgaggtttcccagctgttcgagagaagtgcggcggcgttggcggctgggagatctccggaaaccgtctggtgtcagacagtctcctgccttccggtgtcggaaacggacaagcgggccttgtctgaactggtcaaagccttgcaaggcgatgaaacgagtgcatgtaaaggtatattgcttgcaaggaaagagctgcaaaacagcttgtcacaactggaaaaacagcgcccggaggaggaaaaacgcacggcggccctttgtttttccgccgcggcgctgctggtgatcttactgatttgaggaaggaacaatggatgtagatctgattttcaaaattgccgctgtggggatcttggtcgcggtgctgaaccagcttctggtccgctccggccgggaggagcaggccatgatgaccaccttggcgggtcttgtggtggtcatgatgatcttggtgcgggagatcagcggactgttccagctcatcaagaccctgtttgatctctgagatggcgctggtgacgcaggcggcggcgctctgcgtgatcgcggccctgctgggacttgtcctccgccggagcaacccggagatcacgcttttgctggcattggcagcggcagcggcggttttgctggccttagcggagccactgacggaattactgcggtttctggaacggctggcggagcagagcggtgtctcccggacgctgctgacgcccctctataagacggtgggcatcgcccttgtggtgaaagtgggcggcgggctgtgccgggatgccggggaaagcgcactggccgccgcactggaattcgccgggacagtctgtgcccttttgacggcgttgcccctgctgcgggcggtgctggagctggtaacggagctgagatgatgaaacacttgaaaatctgctgctttttgggactggccctcctgctgctgacgctcccggcccggagtgcggagctgccgccggaggtggagcgggcgctgccccgagaggccggtcagcttttgaaggatgtggaccactgggacgtgaacagctttccggaggggctttgcgccatctggaaccacctccgaaaagacgtgaacaccgttttgcggcgtcagacccgtggggcggtatcagtgctgctggtggcggtgctgtgcggattggtcagcggctttcaaaagggtgtgggagacgagagtcggtttctgcctatggcgggtgggctggccgtcaccgctctgacggcaggcagtttggacagtctgatgggggcggggactgcggtcatggagcagatgaacaccttttccaaggcgctccttcccacgctggccgccgtttccgccatctccggcggggccgtgggcgcgacgctgcggcagatcgccacggtgtttttcgcggacctgctgctggggctgattcacggactgctgatgcccatggtctatctctacgccggggcgctggcggctggctgctgccttgcggacaaacgactgacggcggtggcggagctgctgaaaaccgtctgcaccaagctgctgaccgccgcactgctggcctttaccctctaccttaccgtaggcggcattttcgcgggaacggtggacagcgccagagtgcgggtgacgaaaaccgccatttccggcatgatccccgtggtggggggcatcatcgcggaggcatcggaaaccgtgctggccggggcggggcttttgaagggggccatcggcgtgttcggcctgctgggggtgctggccctgtgtgcctatccttttttacagctggggatccagtacctgctctacaagctgacggcttttttggcctccgtcattggagatacggagctgtgcggattgatcggcggccttggcggtgccttcggtctgatcctgggcatggtgggaagctgcgcgctggtgctgctggtgtccattctggcctccgcagctgtggtgacatcatgatggcggcggcccgggcatggctgacagctgtagtgtccgtgacgctgctgctgtctgtggtacagacgttgataccaaagggcagtctccgggagatcgcctcctttgtggggggactgcttctgctggctgtgcttttgcggccccttgggaatgtggacctgtctgccgtctcgctggatctgtccgcctaccggcagacggtggagcggcggcaggcagaattggagcaagaggggcagaaagaactgctgggactcatagaagccgaactggaatcatatatatcggacaaggcggctgatatgggcctgacgctccgggtgcaagtcaccgtggagccggacggcagcggcgttcccgtccccgtttctgtggaactgacggggccgaggtccgaagtgctgtcccggtggctggaaacggagctgggcgtcccggcggaaagacaggtgtggaatgaaaactgaaggagtgcggaagctatgggaccgatacaaatacgcggcactgatcttgctgatcggcgctgggctgctgttatggcccggtgggagcgggcacacggcacagactggtcagagcgaagcgccaccggcctatacagccgcggagacgctgcgaaaggacttggaggaaattttggggcagatacagggcgtagggaccgtgcgggtgctgctgacggtggataccgacggagaacggcagctggcccagaatacggagctgcggtacagcggcagtgcggcggcaccggcggactattcccggacctcggagccggtcctgctggacggcggggaccgggaggagaccgttgtgacccggacggcgtatcccacctatcggggggcgctggtggtctgtcaggggggcgaccgggccgacgtgaagctggcagtcaccgaggcggtgtccgccttgaccggactgtccagcgaccgcgtcaccgtggcaaagtgtcagtgatcatttggaggaggaacaaagctatgagcggaaacgcgaagcggaaccttgtggtaggcaccatggcggtgctggtgtgcgcggcggtggggctgaactggaaatactccacgcaggaggccctccagcaggcagaggagacaggaacgaaaattctgggagaggccacgctggtctccggtcaggagggaacagagctggcggaggacaccgtctacgagggggacgactacttcgcctccgcccggctcacccggcagcaggcgcgggacagcgccatttctctccttgaggatgccgccaagcaggaggatgcggacaaagaggtggcaaaccaggcgtcggagagtattcaggtgctggcgtcctacacgctgaaggaagcccagatcgaaaatctggtgacggccaaggggtacaccgactgcgtggcctttatgggggatgattccctgagcatcgttgtatccacggcggacggaacgctgaattccacggatgtagccaagatcacggacatcgccatgactgagaccggctatgccgccagcgccattcggatcatggcatcaaattagctgttgtaattttcggaattgcatggtagaataacacattagaaatgaagttcgccgccaagatacaaaaaggagaatcacaatggctgaaaataagggttatatgacgctttccgacgagcagggaagcatccacatttccgaggaggtcatcgccgccatcgcggtgggcgccgtccgggaggtggaaggcgtttccggcatgatggggaatctgggtaccagcgttgcggatctggtgaccaataagaagggtgctcagaagaacgccaagggcgtaaagatcgaaatgaccgagaccggtctggtgctggatatctacctgacggtggcatacggccacgctatccctgaggtggcagagaatgcccagaaggctgtggcctctgcggtcagcgatatgaccggctgcaccgtggaaacggtgaacatccatgtgggcggcgtgaccttggcctgattgccagactgaacaagagagaaaaggacgagagaagctatgacacggaataccgcacgggaaattgccgcgcatctttcctacgaattgagcttcacggataaaaccgtggaagagctgctgcaggagcggctgaccagcgaggcgtttgccgagctggcggaggaagactccctgtatacagaagcgcccaacgccaagcaggtggcgtatatcacccgcctggtgaccggtgtgaatgaacacgccgccgagctggacggctatatcgccaagtatgctaagaactggaagttctcccgcattcctctggtggcctccgccatcatgcgggtagccatgtacgagatcctctacatgcaggacattcccaatggcgccgccatcaacgaagcggtggagatcgccaaaaaatacgagacgccggaaaccgtgaaatttatcaacggaattctgggcagcttcgcgcgggaagagatctcccagtaagcatctcaacaaaccggcagagcggatgcggcacagaccgcctccgttctgcttttttacacaaggagacgccatggaacagcgcaactgggggatcgacctgctgcggatgaccgccatgtggatggtggtcattctccatattctgaataagggcggcgttctggctgccgcggcgcccctgtctgcagggcaggggaccgcacggctgctggagactgccgcctactgcgccgtcaactgttacggactgatctccggatatgtaggcgttcagcggcgcttccggtacagcggtgcgctggccctgtggctgcgggtggcgttctacacgctgggcatcacggcggtatttgcatgtctgatgcccggcagcgtcaacggtgaccgggtgctgcgggtctttttcccggtgctgttccggcagtactggtatgtgacggcctacttcggtatgtgcctgttcatcccgtttttcaatctactgctgaaccgcctttccaagggacagctgcggctgctggcgctgtccatcgtgctggtgttttccgttctgccaactctgcggcagaaggacgtgttcctgacggacaacggctacagcgtgctgtggctgtcctgcctgtatcttttgggcggtatcctgcggctgtacggcaggcaggagcgaaagctgttccgctgggcggcagtgtatctggggtgtgtgctggtgacctggcttgtcaagctggcaggggaccggctgtggatggcccgaaccgggcacctctgcgacaaggttctgctgaccacctacacctcgcccaccattctgctggcggcggcagccctgttgctgtgctttacggggctgcggattggtcccggtttcggcagtttcatcgaaaaggcgtcgcccctggcgttcagcgtgtacctgatccatgcccatccgctgatctgggagcactggctggcaggccggttcgcgtttctggcggacaagccgccgattctgctggcatcgggcgttctgggcggcgcgtttgccatctacctcgtctgctctctggcggacgtcctgcgggcaggcttattccgcttgttccgtgtcaaagcgatttcccggtgggcggaggaagccgtatcggcccggctccgtccccaacttgagaaggagtgactatggaacggcatatcttcagcgtcacggaggtcaacgagctggtgaagctcctgctggacaacgagcccatgctgtccggcatctgcgtccggggtgagatctccaactataaaatgtacccctcggggcaccactatttttccctgaaggaccccaccggagccatccggtgcgtcatgttcaagggacaggccctgcgtctgcggttccgtccggaaaacggcatgaaggtgctggtgaccggccgggtcagcgtctttcccagggacggcgcctatcagctttactgcgacaccatgaccccggagggggcgggagatctggcgctggccttcgagcagctgaaggagcggctttataaggaaggacttttcgatgaggcccacaaaaagccgctgccccgattcccggagcgcatcgccattgtgacctcctcagcgggggcggcggtccacgatatgatccgtattctgcggcggcggtatcccttggcaaaggtgatcttgctgccggtgcgggtacagggggcggaggccccgccggagattgcgggggccatccggtacgccgacaaatggaaaatcggcgatgtcatcatcaccggccggggcggcggctctatggaggacctgtgggccttcaacgatgagcgggtggcccgcgccatctacgcctgcgagaccccggtgatctccgccgtaggccatgagccggacgtcaccatttccgactttgtggcggacgcccgggcctccacgccctccaacgccgcagagatcgcggtgccggatcaggtggagctgcggcggcagctcagcgacctggcggagcggatgaccggcagccaagcatcccgcctgcaagccctgcgggagcgggtggatgcgctgggccgcaaacgggtcctgacagaccaactggcctacgtacaggacaagcgcatggagcttttgcacttgcagcagcgccttggagatctggcaaatgccgagatcgcacgaaagcaaaaaacctttacagctcttgcggcgtcactggatgctatgagccccttgaaggttctgggccgaggctacgccgtggcccggaatgaggcggggcaggtgctgaaaagcagcggggagacccatataggcgagcggatacatgtgacattgggcagcggcggcctgaccgccgtggtggatcatatcgaggaggcgcgaaatggcggctaaaaaactgagctttgaggaaaagctgtcccggttggaggagatcgtggcagcgctggaaaaaggggatgcccccttggcggattccctgcggttatttgaggaagggaccaaactggtcaacgcctgttccacggagctggacaaggcggagcagcaggtggtcaagctgatgaagggacccgacggcgcacctgtggagctgccctttgaaagtacggaggattgacatggaaaagactgcgtttgacgcccggtatcaggaatatctggcggccatcgaggactatttgaacagcctgtttgcggagaagccccattgggcggatctctatgaggccatgcgatatagcgttctctccggcggcaagcggctgcgtccggtgatgacgctggagtttgcccggctgtgcggtctggactggcacaaggccgtgccgatgggctgcgcgctggagctggtccacacgtattctctgatccatgatgacctgccctgcatggatgatgacgatctccgccggggtaaacccaccaaccacaaggtctatggcgagaccttggcagtactggcgggagacgccctccagcctgcggcctaccgcctgatcctgacggctcccggcctgaccgacgcccagcgggcggattgcgctttgattctggcgaacgcgtccggctcggacggcatggtagcggggcaggtgctggacacgctgcaccatccctctgcccaggatgaactgacggaggtccaccacctgaagaccggtgccatgatcgccggagcctgtatgctgggcgtcggcgcagccggcggcagcgaggcggcccggaaggcagcagaaacctacggctatcagttgggtctggccttccagatccgggacgatatgctggacgtcatcggaaacgccgacgaattcggcaagcccatcggctccgacaaggacgagggcaaggtcacctatgtggacctgctgggactggacgattgcggcaagctggtccatgagctgacggaacaggcggtctccgccgtgtccgacttggaccgggagggctttttgaccgcattggcggaaagcctcactgagcgcatgaaataattcatcaagcagccgggagggaagacctcccggttgtttgcttagaaaaactccatcggccccgtacacaacgaagtcggcaggatgggccggggcctggaaagctgttaagatgccgccaaaaatcactcgtcgggtccacgaagcacaccgtcagccgctctgtatatatacggaagctgttgcatattttcgcaagccatgctatactgatatgagctaagcggcggcgcagtattctagtcagatctgccgtttccgagggaggacctaaaaagcctccaaagggcacacctgtgaaacttctggtgtctgcttgagacgcccagtcttgggtggatgctgggaggaagcgcgtttttcgcgcttgcggactcagggcgatttccaatggcatggataccccgaccctgtttccgtggagacctgttcttgtgcgtggacgtactcccattgtggtaagcggatccatgtacgaagcagatgatgaacctgcaatgcggtgcatcgtgccttcgggtgcgtaacgctgtgtgcagccgtagcctgccttgcgtgaagctggtgaatgtgggatcaacacggcgctgtcctggccgggacggcgatcgtgatcgcccgctgaaaccagttttgcaaaagaggctaaagaaacggacagactgtggtggaaaacacctaggctgttcatgggaagcgaatcagggattgcagtgcggactcagtggcaatcgggtagcgcgatcggcgacggcgcgcctcggaactgaaaggggaaccgcctccatcggcaacgagaggtgttccgtggggaaaacaaacccgcacctaagccgcaagatttacctgatttgctgccgctgacttagcatatctgaatgataacggaggcgtttttttgaaaaaaccttccaatccgaaaaccggcaagaaggaacataaccactaccgctgggcgctgacggcctttgtcatggccgtagccctgtccggtctgctgagcctgagctccgaggccattttggagaacgccgatctgctgctggcgctgctgatcctggcgctgttcatcggacttggcatcctgtttgacatcatcggcgtggcggtgactgcggcggacccccgcccctttcactccatggccgcccacaaggaaaagggcgcgaaagaggcgctgaagctcctgcggaacgcggaccgggtgtccagcgtctgcaatgacgtggtgggcgatatctgcggcatcgtctccggcgctaccggcgcggtgatcgtggcccggctgcaaaagggactgaacctggaaagcgtgctgatctccgtgggcgtcacggcgctgatctccggcgctaccatcggcggaaaagcgctgggaaagcccttcgccatgaaccagagcaagcgggtggtccatctggcaggtcggtttctgcatttgtttcatcgcggctgagtctttgctgatccatacagccgcaggaggtcattgtgattctggattccattcattcccctgaggatatcagggcactcgatcaaaatcaactgccgcagctttgtaaggagttgcggcagtttctgctggaaaacgtgtcgaaaacaggcggacacttttcctccaatctgggcgttgtggagctgacggtggcgatccaccgggtctttgacaccgcccatgaccgccttgtgttcgacgtggggcatcaggcctacgtccacaaggccctcaccggccgtcagacactgttttccacactgcggcagctggacggcctttccgggtttcctaagccccacgaaagcgtccatgatgccttcatcgccggccacgcctccaactccgtttccgtggcgttgggtatggcgagggcaaggaccttgcagcaccaggattatcaggtcatggcgctgatcggtgacggcgccctcaccggcggactggcctacgagggtctgaacaacgtcggggcctccggtgagcatatgatcgttcttctgaacgacaacggcatgtccatcgaccccaatgtgggggctttgccgaatcatctttccaagctgcgcagcaaacctgcctactaccactttaagaaatggtatcggggcctctttggagagtctccctcccagtccgccatctatcgctttaaccatcggctgaaaaccagcctgaaaaagacactgtggccgggaagcactctctttgaggatatgggcttcacctatctgggacccatcgacggccatgacctgccccgcctgtgcgatatgctgacgtgggccaaggagctcaccggcccggtggtggtccatgtccatacccagaagggtaagggatacgccttcgcggagcgggaccccggcaagttccatgggatcgcgccctttgatccggaaaccggacttttgaaaaaagcacccggagagaccttttcctccgtattcggcaagaccctcagcgactgcgccggggaggacagccgcatctgtgccatcaccgccgccatggaggaaggcaccggcctgacagtattcgagcaggcccacccggagcgattcttcgatgtgggcattgcggagggtcacggcgtttccatggctgccggtatggccaagcaggggatgatccctgttttcgccgtgtactccacctttttgcagcggagctacgatatgctggtccacgatgtggctctgcaaaagcttcatgttgtccttggcgtggaccgggccggtctggtgggtgctgacggcgagacccaccacggctgtctggatgtttcctatctcaccagtattccggggttcacggtcctgtgccccgccagctttgcggaactgcggaccatgcttcatcaggcgctgtttgagatcgacggcccggtggcgatccggtatcccagagggggagagggcgtttttaacgcggacaccagcactcaggccgtagtacgcatgagggacggccgtcaggcagtcctgatcacttatggaacgctggtggagcaggccctgtccgccgcggaggagctggaacgatccgggatctccacccgcgtggtgaagctcaaccgcatcgcccctctggacacggcggcgatcctccgggagacagagggagccaagacagtcctgattttggaggactgttttgaaaacggcagcgtgggccagcagctggctgcggccatggaagaggccgggcagagctgttctcacacgatcttgcaaaatctgaaggatcactttgccccggagggcacggtggatcaactgcggcatcggttcggccttgacgctgacggtgtggtaaaaacggtaaaggaggccatgtcctgtgagcaataaaacgaggctggatgtgctgctgacggagcaggggcttcaggaaagccgccagaaggcacaggccaccattatgagcggtctggtgttcgtcaacggtcagcgggtggacaagcccggaacggcggtccccaatgacgcgaagatcgaaattcgtgggaatactttgaagtatgtgagccggggcggtctgaagctggaaaaagccatggcggaatttcccattgagctgaatggctgcatctgcggagacatcggtgcctccaccggcggctttacggactgtatgctgcaaaatggagccagcaaggtctactcggtggatgtaggctacggccagcttgcctggaagctccgcgaggacccccgtgtagtgtgcatggagcgcaccaatgcccggtacctgacccatgagcagatcccggacgagctggattttgcctccatcgacgtgagctttatttccctgaagctgatcctgccggcggtggccaacgttttgaaggacggcggctatgtggccagtctggtaaagccccagtttgaggccggtagggagaaggtaggcaagaagggcgttgtccgggacccggcagtgcacaaggaggtgctggagcactatctggagcacgcaagggaagcgggcttcggtgttctgggactgacctattcccccatccgggggccggaggggaacatcgagtatctgggcttcctgcaaaagggcgcggaaaccaccgccgcttttgacttggacgctctggtggaggaatcccatcaagccctgaaggagcacggagaggggacggtataatggaaccgaaaaaaatcattctctgtccgaatccggaccgggacaccggaatgaaggccacaaagtctgccattgccattttgcgggacatgggctttcagacggtggtctgttcgcccttccgggacccgaagaccgacgcctttggagacctgccctccaagccgctgctgacggagttgaagggcgcggatctggtcatcacccttggcggcgacggaacgatcctgcatctggccaagctggcggcgctgcacaagatccccatgctgggtatcaacatggggggactgggctttctggcggagctggaggtcggctctctgaacgctttgcgcggcctgaaaaactgggattttcccattgaagaacgaatgatgctggacgtttccgttctgcgggacggcaagcagatctatacgaatatgggtctgaatgacgctgtaatccgggagggccccatctcccatgtgatccatctgaaggtattttccgacggaaagcaccttgcggacattgcgggagacggcgccatcattgccacccccacaggctccacagcttattcactctccgccggcggcccggtggtggagccggtggcccagatcctgactctgacacccatctgcacccacaatatgcgcttttcctcttacgttctctctccggaccacaccctgacggtctctttcgagcgcaatggccgcaagccgatattcctgtttgtggatgagagtcgggcgttccctctgcattccaacgatattgtccagatccgccgaagccggtatctgacccggctggcgcatctgtctgaaaagagcttctgcgaagtattcgcgcaaaaaatgctgccgggaggttttcagtcatgaaaaacaatcgccaatccatgatccttgacatcatcgcaaaggaacacatcgagacccaggagcagcttctggagcagctgcggaagcggggcgtggccagcacccaggccaccatctcccgggacatcaagcagcttcatctggtgaaggagcctacgggccacggcacctacaaatacgcggtttccagcagccgtgcccgtctgaacattgcggacaagctgcgcaccatcttccatgagagcattaccagcgtggactgcgcccagaacatcgtggtattcaagacgctggccggtctggccggcggcgcttgcgaggccctggatcacatggatgtcaacggcatggtgggcacgctggcaggggagaacacggtcttcgtggtcatgaaggacaacgcctgtgcggagaccttctgccaggagatccgggaaatgctgtaaaccaccggcagaaacccattccgaagggagacgcggaacatgctggaattgcttcacattgaaaatatcgcagtgatcgagtctgcggatatatccttccgccccggcttcaacgccctgaccggcgagaccggcgccggcaagtccattgtgattgacgccatgagcgccgttttgggcggacgggcctcccgggaactgatccggaccggcgcggacaaggcctttgtcagcgccgttttttctcaggtcccgtccacactgccgggactggctgacaacggcgtcacacctgacgaggatggcaatctgctgttgcagcgggagatcggcggggacggcaagaacgtctgccgcgccaatggccgccctctgactgttacccaactgcgccagatcggcggggagcttttgaacatccatggccagcatgacggccagcagcttttggatgaggaacagcatggcgcatatctggaccgcttcgggcggatggaggcccccttggctgcctaccgcagcgcctatgacgccatggcagccatccgggatcaaattcggtccttacagatgaatgaggcggagaaggcccggcgcatggattccctccggttccagatcgacgagttggagcgggcggagctggtccccggcgaggaggaggaactgaatgcccggcgggagctgctgcgcaacggtgagaagtatattgccgccctgtccggggccgattactgtctcagcggcgatgacaacggtgcaggcgcggtctcagccatccgggaggcagaggaggcccttcggggcatccgcaccctcagtgatgagttgggtgagctatacaaacggttggaatccattcgctgtgaagtatatgaccttgccgagacgattcgggataaacgggcagaatttgccttttctcccgcggagttggacgccgcggaggcccggaccgaccagctttaccgcctgaaaaagaaatatggtgccactgtggaggacatgatcgcctatctggaacagtgccgcagtgaactggacgccatggagacggcggacgataccctaatcctgctgaacggcaaattgaagaaggcggaggctgttgtccgtgccgccggcgcggaactgacccaaaaacggaaagcggctgcccaagcgctggagcagcgaattcagtcggaactacgggatctggacatgaacaaagttcgctttgctatcgaattcacggaaaaagagcctgccgccgacggctgcgacgtgatccggttcctgatgtccgccaacgcgggagaggacctgcggcccatcgctaagatcgcctccggcggcgagttagcccggatcatgctggccctgaaaaacgtgctggcggagcaggagtccattgccacgctggtattcgacgaggtggataccggcgtttccggccgcgcggcccaaaaggtggcggaaaagctgactcaggtggcccggcacaaacaggtactctgcgtgacccatctgccgcagctggccgcaatggcagacacccatttttccgtggaaaaaggggagagcgggggacggacgttcacaagagtcatccaattggaccgggaggcccgcaaagcggagttggctcggattaccggcggcagtcaggtaacgcccgcgctgctggaaagtgccggcgaactgctggatcaggcggacgcctatcgaaagcagcattttgtgtaagcctgtctttgtattgcctccttgttgcaaagcttcacaaggaatttgtgtacttttgctgtcgccccctcgtggggtatgcgggttgaaatgtatgggcgcagagcgtatgaagcagatgacggacgccatcacactattcaatcttgtttttgaaagagaaatggagacacaggcaaatgaacaccgcactgaacaagaaattcttttcctatgtcattccgtccatcctcgcattcgcattgtcgggggtttacaccattgtcgatgggttctttatcgggcaaagcctcggtgatacaggattgaccgccatcacattgggctatccgatttccgcgctgatcggagcggtcggtacgggccttggcctgtcgggagcgattcgctttacgatcttgaacgcgcagggggaaacccaaaagcgtcaggagtgcttttccggaacaacgctgctgatgctgctgactgccggtttattgacggcgatcctattcgcgttcgcccagccaatccttcatctgctgggtgcaagaggcaatatgctcacgctctgtgtcatgtatgcccaggtaatcgcgctgggcgctgtttttcagcttttggcaaccggcttcgtcccatttatccgcaatatgggcggggcaacggttgccatgatagccatggctttcggctttgcaacgaatattgcgttggactatgttttcgtgtgggccatgaactggggaatggccggcgctgcatgggcgaccattatcggacaggctgtgaccatgatcgtggcagtcattttcttccttgtaaaaaagagcggattttgcctgccggaactgcgggagttatgcaggctttggaaaaatgtcctgatcgtcgcgatctcgccctttggtttgaccttttcttccatcatcacgatgctcctcataaatcgctttctgcttctgtacggggacgagcaggcagttgcggtttacggctgtatcggctatattaccgctattctctatctgctgctgcaaggagtaggcgacggcagtcagccgctgatcagccagtattacggaagggatgaccgatcttccgttcaggctgtccgaaagctggcctacctgaccgccgttgcgatcacggcagtctgcacgatcggtgtctatcttgcaagagcaaaagtcggcacgctgtttggcgcttcgacagaggcaaacgccggggtcatccggtatctcccactttttctcgcaacgctgctgtttctggcgtttgtccgtattacaacatcttacttctacgcaacggaaaagaatggactttcctaccttctcgtatatgctgagccggtctgcacgctgctgatgcttctgatcctgccgccaatgctgaagctgaccggtgtctggcttgccacgccggtcgcgcaggtcatcacctttgtgatcgcatgggccgccaagcggcgtgtagatgtaaacatttagagtgacaccatgatgcaccgtttgcagaggtacggaaccgtgaatagcaaaagacatccaagaaatttgatccttggatgtctttttgtcagtagttcttttcattcggttccatccagtgcgctttgcttcgccaaatctcaggaagtggatccctcccgttcccggagaaacttaatagtgtcattaacgttgggatcgttggggcagatcgacctgatcgtgatcaaaggaggtcagccgtttcacccgcgacctgcggcagggcgggatgattcgatttgagccgcaaggcaaaaaaataagcacatccgagcggatgagcttagtaaattaagcggttagaataaaaggttgatataaaataaaccagccaaaaataatacaataagaaagacgatcattgtattttgaacccgtctatcatggtgatcgctccttggttttaatttcttatggccattggaaaagccagatgaaagtgattacttcaattccgaaaagaaaaagaaggagctttcccggcacagaagtcagaaagtctttcatttcatccttgaaacgcataacaatccccccaaatttattgtagcaaagatcgcaaaaatgtcaagaaggggagatggcgcatacgcgaggaatccaccattgtcatcaaggcgacaggccgatactcggaaaaggtcaagtggatgggaattgataaggggcatgatcctcaagatggtgaacaaattgatcggcagtgcaaaaagacggtcaattatctcaaaaatttgccaagacctttctgcgcgggagattccgtatttctgaaagcatgaacagaccgccgctctcagagcggcggtctgttttattatttggacggtgtatcaaagctggggttcagataatagacgtttttgctgttcatccgctccttggccagacgcagcgcctcgccaaatctctggaagtggaccacctcccgttcccggaggaacttgatggcgtcgttgacgtccgggtcatcggaaaggcgcaggatgttgtcgtaggtgacgcgggccttctgctctgctgcgatggcgtaagaacaacattccaaatgtcgaattgtgtctgactaaaatcttttattcttcccatttttgtgctataataaacaaatactggggacttgtcaaccactttgacaggatctaacggataatcaattataagggagggtttccatgagtactgagtacaaaagagagcgcaaagaggaaaagcctgtactggcaatttgctatgactttgataaaacgctgtcaccggacgacatgcaagcgcaagggtttatccagtcggtcgggtatgatgtagagacattttggaagaagtcaaatggattagccagcggcaatgacatggatcaaaacctcgcctatatgttgatgatgcagcaggcagcggaagggaagaaactctttactcgtggagaactaatgaagtgcggaaaagaggtagtgcttttccctggtgtcaaggattggttcaagcgaatttgtacatatggagaagaacacggcgtacttgtcgaacattatatcatttcttccgggctgaaggagatgatcgagggaaccgatgttgccggtgaattcaagaagatatatgccagttcatttttctacaatgaaaaaggcgtagcgatttggccggcccaagtagtcaactacacgaataagacacagttcctattccgtatcgaaaagggtgttttggatatcaatgaccccggtgtaaatgattcttttgcaccggatgagatgcgtgtcccgttccgcaatatggtctatattggggacagcgatacagacgttccctgcatgaagctggtcaatgtcaacggtggatattccatcggcgtctacaacgcggataccaaggacaaaaccaaggtctacaagatgatgcgggaaaatcgtatcaagtattatgcccctgcggattattctgagggtaaggagcttgatatcctgctcaaggcgatcattgaccgtacggcggaaaatgaagctctggaatcccggttctatgcttataagagagagcagaccgatgcagacaagcagacgaatgaaaccgaacgcgaaaaggttgatctgcttatcaaactggaaaatagccgtagctttgccactacacatgccgtcattgaaaaaatgcggcagatcacagtatggacgaaagacgaaacagaaaatctctttactattgcagtaaacaacagtcaagtgttctatattctgggtgatatggacgttaaagcattctaccaaaagctgctaaacggatgtaaagtgccgtcagagaatgcagagaaaatcaaggcgcgaatcgaagaaacggatagattatgaaaaaacagtaagcaagcactctgcttgcttactgttttcttttcagaaattccagtgaatttcaatcggaacgtcctgcgttccgggaactcgtttaccaacggtgatatagtcaattaaaatttccaccatctcgcgggtcaagtgttccacatgggtgtagcgctggatgatctcctttcgctgatcgccggcaagcatctgggcctccaattcttccaaatggcggtcagcttccttgatctgatattctgtgcgttcacgctctttggaaaagtcatttgccatagtaaaatagtccttttcactgacaaggccttttactttatccttatagagcgcaagcaaataattactgttatcttccaattgcttttggagttttgccttggccttcagacaggcctctttttgctgctctaaattctgcttgaactctacgctgcgttccaattcgtcctgatcaagataccgctgtgagaggttattcaactcctggatcacgattttttccaatttatcaaccgcaatgaaagccccaatacaggcgtcctttgccacatgccggttggagcattgcagataatgcttaccgcgatttttggatgaacgcatcgtatagccgcagttggcacagcgtaccttgcgggcaaacaggccgacagtccccacatcaaaaggctttgcgcgggcggcaatgatcgactgcaccagatcccacaaatcccggtcgatgatggcctcatgggttccttccacacgataccagttatccttaggacggggtttattctgcttggttttataggaaacgctgccatacttgccctgcaccatatttcctatgtaaatttcattggtcagcatatcggaaatggcaaaatacttccaaagtgtgctgttcctgcgctttggctgctggtaccgcaggccgtgctgccgtttatattctgtgggattcggtacgccgcgctcattaagcatccgggcaatggcggtctttccgtacccttgcgaaaagagggtgaaaacctcccgcacaattgcggctgcctcttcatctatgatgaggtgtcccttttgctccggatctttctggtagccgtagagcgcaaaagcgccgatatgaaagccgtttttgcggcgattggtgagaacggcacggatattttcagacatgtcctccagataccattcattgaccagaccattgatctgacgggatttcttgttgcccttgttcgccgtatcagcgttgtcaaccagactgataaagcggatgccccaaatggggaaaagcccattgatatacttttctaccaattccaattcgcgggtaaaacgggactggctcttgcaaagaacgatgtcaaacttatgtgcttcggcatcgtccaacagacgcttgaattcaggccgattccggtcagaaccggtgtaattatcatcgctgtaaatgttatatacttcccagccttgctgaatggaatattccagcagcatggccttttgattttggatgctgttgctgtcatccgtttcctgtttcttgttgcggtcttcttcagacagtcggcaataaatcgcaaccttttccatttgctttgcctccgatcaatatgaatcaacatataaaaagacccgctttcatcacagcttgagcgcgatgaaagcgggttgatgtatttgcaccgatattcagttatctggcaccggacagaatcatcttggatcgttccagctgattgatcaactgaatccaaatgttggtatagttctgaacggtggtgcagtcctcgccgcttttaaagtagctcttgcaatgagagttattcataataaaattcctccttaattgaaagtatgccggtatccggctgggcagaagtaaaatttttgctgcccttatagagttattggggtgaaattaaaatttaaacagtggatttaattgtgataatgtaaattccatggaaatcaattggttcagcgaaggcagataagaaatacctgccctgacttcaatcgtagcagggttaatttgaaggcttttcaattgcttgaacctcttttttgcgttactgaactttcttttgatgcgttctttatcgaacaacttcgattggttgatttcacttaggaaagcaattaaatgagtctttttcgcataggaaatatcctgcgcagcaagatatttttttgctgctgataacgtgtaatacggcgcatctgatacaagtctgcatataatgcgatacataatagagcccccattggctgcaagatcaaaaagctggctcgaccaagatgcatctttatagagcatataccgttcaagttcttccagtattcccgggcgaagcagagaaacttccactcggagtatacgatctgatttttcccaatttgtatgatagccttcgtgtttaatctgatacagcttgtcatatacagtaacctgataataagtatttaccatccgaaatgagtgggcattccgctcatcaccgtccggataagattgtttttcccatcttgctgcaaaggcgccttttttcaaaaggtgtatgtatgtgtcaatataccgttgctctggaagcagtacatttctgcacagatccagccggttcagctgcatttgttggctatggagtttaataggaagtaaactcagaatttctctgattgcagcatcaattttatccatattttgcagggacggaaagaataatgcagcggcatcatcgtatcccagaattttagccggtgttatgacaaggtgcaatgtgcttcctggaatattggtattcctatggaggaaaaaccttatgccgtcactgcaccagcgattaaaatacagtcgattgccattcttgtagcacatgccttgtttgcccttcgcgtagtcaaaaagcgtgtttcgcagcttttcggtttcttcaacagaaagtattgcagtaagttcaaatgtatgaatggtcatttccataacaaacacttcctttacaattcatgtttgatcgttttcttttttacacacgaaaacgaaataataagtagtaacgaaattacttttgtgttagtggaaaattaaatttaaaacacacattttgtgtaaatccaatttttaatataagctctctatatttatggtaaatagagtaatagaccatcaaaaattggaacaatattactattaataatagatacgattgttggattaatcatactaataatgcaatgttgaaatgacgtactatccgcatggtacaatgtctgaaaaattacacgtgtgttcctacctcaaaaattatcgagggaatactcgaagagatatcttttaaatttaatatgtaggcagtgtgcacggtttaaagatgctcgtttactgctatcggactgttacagtcagaataaaaaataaaacactgcttttcgcagtgaattgtattgattccatatgcgatgcagcatatgtgtaagagatttggggataatttcctgctgctcgaaataagatgtggcttatttaaaacattctaattctaaattttatatattgattttttgtaatcaaagtggtatttagtgtagagaaaggagtgagcggatgatgaaaaaacagaattgggctgatgctgtggaggcaatttatcatcaaaaagaattgcttgatacggccatgtgcagctatggagagaatgtctatgaccagatcataaagcgtttttttcgatgttcgctcgccccgattgaacagggaaaaattgaagttcatcttctgtttttgcgcaacataatgattccggatgaattgccggatctaaagcaaatggatttctctgtactggacatatcatggatcgccactcaaaatacatacattaagaaaatcgttcatcaaaaggggaaggataatacagatacagatgatattcgtgtcattgccaaacgagatccgaaggcacggaaaaatcttagcaaatgacttaagcatcttccgaaaacgaaaatcgaaacggacagctacattgctgtccagctaatcgaacagaaaaataccctcgacctttccagcctgaaatacatggcggagcaggtcgagggttcctttacgtttacggtattggatgaaagggaaaatctgtacttcgtgaagggagacagtcccatgtgcctgtattattatccccgatgcggcgtgtatctgtatgcgtccacggaggcaattctgaaccgggcactgggacgtttgaatctgccgattggcaagccggagcggatcatgctggactgcggggacattctgaagctcacgcactccgggcggcgggagatgtcctcctttgatgcatccagcctgatggacccgtggggcagcttttccatgtggcctacgccgacaagatcgcgcacccgcagacattccgtggagcaggaatatctggaggagctgaaaaatgttgccgcctgttgcggctattctccggcctctgttgacaggctgctggaatctggcttttccaccgatgagattgaagaattcttatatgaagggacgatgtatcaatgagtgtttatgaagtggatgccaaagtaaaggaactgcgggaattacgcaatatggaagcggaggtgaagtccgccattactgcgattgaggattccttgaaggcggaaatgctggcaaaaaatacggaggttctggctggcaaggattacctgattacatggaaaaccatcattaccaaccgttttgacagcgcggctttcaagctgacccacgcagacctgtttgcacagttcagccgcagcacaaccacgcggcggtttgtgatcgcgtaagggggagcgtccatgcaggtagtgattgtggaaccaaagaagaaacccacggtgcagaacatcgatgatggcctcgaagccatgcagaaaatcgtaggcggaaccattcaggccatctatccttttgaagaaccgattgcactgatctgcaacgatgaaggcaagtttctaaatctgccgctgaaccgggccttgcgggacaatgccggatgtgtctacgatattgtggcggggacgttcttcctctgcgcggcccctactgacaaagacaacttcgcaagcctgacggaagaacaggtgcagacctgcctgaaacgctttgccattccggagcagttcattcaggtgggtgacggtgtgtttgtccttccggctccgtaaagtgtaccgttagggcgtaccctaacggtacagcaaaaaagagtcccattagggtttctttccgcattctggcacgtgccatttgtggagagaactctaatgggactttcacttattgctgcgaggcgatgatcgattcgcaatattttttcaatgtgggaatgtcatccgtgatgatctcccaagtggtttcagggtcaacggtgccgtagctgtgtgccacaatgttccgcatggccttgatctgccgccaaggaacggcggggtgctgcgcccggaactcgtctgtcagcttgcctaccagttcaccgatttgcagaatacagagagcggcagcgttgcggtagatggggtcattctggaaagtctcggcgctgttgccgaatcgctccactgtctgctcaatctgctgacagtaggaaacgatatgttccagcacgctgatatttcggtcaagaggcttcatacagcagcacctcatcatcccggatggaatccaaaaagcgttggtcaagactggtggtaggcactaagtccacggagcacccaaaggagtcctccaagtcaaggagcagtcccgctaactgaaagcccttaatgctgcccttatcaatacgcaggtcgatatcgctggaatcggtcatatcaccgcgggcgtaagagccaaacagataaacacgttttgcgccgtactgcgctgcaagcttggagacaattttccgaatctcatccagagtataggttttcacggaggacacccccaatcgaaaagattttctaactgtagtatatcaaggaaaccaccaatttacaagcgaaaggagtgacacattttgaaaatcggctatatccgcgtcagcacacaggagcaaaacaccatccggcaggaggtgctgatgaaatctctcggtgtggatgagatctatattgatcggatgagcggcaagaatgccaaccgtccggagctgcaaaagatgatggagtatgtccgcaagggcgataccgtcattgtggaatccatcagccgctttgcccgcaatacccgcgatctgctggaattggtagagaagctgactgcaaagggcgtggagttcgtcagccgaaaagaggccatcgacaccaccacacccaccgggaagtttatgcttaccgtattcggggcggtcgcggagctggaacgggaatatatcttgcagcgccagcgggagggtatcgccattgccaaagagcagggaaagtacaagggccgtaaacccatcgacgcgccagagtttgagcaggtcacagccagatggaaaagcggagccatcacagcagccgaggccatgcggacgctgcacatgacgaaaacaaccttctatcggagagccaagatgatttgaagaggaaaaatactccgcacagtcacaaaatgtgttacaatgaccttgcgaggtgagggaatcatgctgatggacatcaaggaactgcaccgctcagaaaagagcgtggtcacactggtgatcgacccggataccggcactcgctatgtacggaagcagctgcaaggttcccatcctgtctatgcacagcttcaggccatttcccacccctatctgccgaatatcattcagctggagcagcaggcggacggcgttacgctgttagaggaatacattgatggtgcaagtctggcggagatcaccctgccggaaaaacaggtcattgcattgatggaagaactgtgcgaggtgctggtattcctgcatggacacgggattcttcacagggatatcaaaccctccaatctgctgctggccccggatgggcatatccggctgatcgactttgacgcagcccgtgaggaaaagcccagtgcagacagcgatacccgtctgttggggacgaaaggctatgccccgccggagcaatatggctttgcccagaccgatgcgcgggcggatatttacgccgtgggcgttaccatgaagcagcttttgggcaagcgggcagagaagtgcccctaccggcatattctgcgtaagtgtacggagtttgccccaaaacgccgttacgccacggcaaaggctctcctgcgagcattgaaaaccagaaccttgcagctgtggctgccgtggctgattgctgttgctgtactgctgggcgcaggtggctttgcatggtggtatcacagccatcaggcggagattacagagggccgctaccccgatgagccgctgctgttctatgccgctatcggggactatctgattgccaatatcggagatttgcggcgcagcggtcaaacccaaaccatgacacttgatttggatggggacggtcaaaaggaaaccatcgaactctacggactgggggatgacattcacggagatctgacggttggcaccgaggacggaaactggatggatctggttggctgggcaatttcagatacctctgcatgggagcgcctcagctgtgaaccgtattccgtgacgaatctgccggatgcatactatgtgcagatcacctgtctggacttgaatccaacggaaaaggatggtatggaaatcgtgatttccgttggtgatatggaaacagaaacggtctgcggcgtgtaccactataccggagcagctgatgaggatggggacggttcagacccggcagactatatgggccggatgtggggcggcgcaaatttcaaggtggatgccaatttcaatatggcaagcgaactcctgtataatccgtatcaggcgcagaacggctatcaatacctcagcaatggtgttcagccggactgggagggcgaagtggattatgcaaaataccgctatgcggtaagcggtcaaatgacactgcgagagcgatacgaagcgttgaacgaataaaaagagggtgctgacctatgtgcggtcagcaccctttcctattccagcacttcaatattgtggtcatacagcaactcgttggcttcgataatgctctgatgatgcccgatggcgtacagcagaagcgcatcccgcggatctctggggtacagttcccggtagccagcctgcttcaaaagcacctgtacttccttgtcgtccagttccagaccgaaggccagcgcaatcactttgtcccgcgaggggtatttcctgccgagaaaaatctgatacacataggctttattcaggttggaacggcgtaccacatcggctttggagcagttcttctgtttcagccagccctccagatattccggcagactgtcaagttgcatttcgctgcggttctcggccagatagtccagaatattgtccgaacggctgatctcatgcgccagttcatctgtcgttttcatggaatgcccacctccgaccatcatattacgcccattataacacgaaaaggttagctgtcagctaaccttttctctcatttttcgcagtatgatttcagtcagaagatggcactttcatcaaaaacagcttgagaacttcctcggccagctttaattccctgtctgtgcagcgggaaagcagcgcctgtacaccggaggaattccctatctcttggccggaaccgttgatgatatagtccattggaaggtgcatggattgcgacagcttgataagggtgtcgatggacatctgggaggtgccgacctccagctgcccatagtagccggtgccgatgtcggcaagctcggacattttctcacgggtcagcccaagttcctgccgccgctgccgcaggcgctgtccaatctcaatcaactgctgcttctccattacgctgcacctcccctttttcgttattgcttattgtaatatgaggagcagtgtagtaaaatgtgtcataagatatctaaaatcattatttataggaggtagccatgttttgtcagtcttgcggtgagattcttcctgatggtgcacatttctgtcctaaatgcggacaaagttgcgctgcacaagtcgaaatacccgataatatcaatttttcatttgatgatgaattaactcccgttgataaagaaacagaagtagtatgcagaaaaacaactacagataaagagacttccactcccgaaaagaaaaagccggcagcaactcataccgatgctcctgctatcggctccatagagtggcgttattggaatgagaatggcagtcacaatgggcttgccgagtattatgacggcacactctttaccattccgtttgttccaaatggtgacgacattgatatgccgctcatgtcaaataatgacgtaattattcccgggccagtcgggcaattttccattggaaagaatactcggcgcattttttatttgaacgaagactatcaactaatcgcgtgcgaccttaacggtaagaataaggtcttgattgctggcgggaacaatgagcatgtcattgattttgtattgaatgaggatcaactttttctcattcttcaggccaaggacgatgaaaaattcctttttcaaatcagtcaatccctggataccagcaccatcttgaaaaagggatacagtcttcgcggtctggcagcagatcagaattacctatattacattgatggaactgccctgacccagcgcgatttgaaaagtgggacagaaaaagtaatcttagatcgtacaggtcttaatacgtttcagatgtacaatggctatctggttcttaccgtttccgataatatcttttcgcaacatgatgcggataattatattctacttattgatccatcccgaatgctccagcgaaaagtcgcacaggttgcggctaaaaatgtgaactgctattgggatcatgttttctatacggatgtaaaaaatgagtatatctggacgatctcacttaatggcggagaaccgcatttgctaagaagtaaagcctccagcaatctaagtattgcctgtggacaactattctttgttgattgtgcaagtgtgaggattgtatctattaatctgcaaactggtgaagaaaccaattttctcaccggaaaaacagcgaaatcttcctctgacggttatatactgccgccgccaaaagacttgagcgggcgcaagaagccgggatatatcgtttcctctaaaaagaaagccccggaagaatcaaaaccatcggaagatataaagactgctgctgtcaaccgtgaacaggaaaaaactgcttcgccctcgaatgcggattcagcaaatgcggagaacagtgaagggattaccgaagaaatcaaggaaattaagaaaaaagagtattccactgaaatggatcagctctggagaagcaaaccattcaaagatgtgttcctttacaactttgtaaaggtattacttgagtttttattcccgctgttcataggaatcgttatgtgggcaggcggctcgatacaaattttctttgaacgacacatcgatagctctcttcttctgataatcactggcctcattttaataattgtcgggatagcagcaatcatcttaatcgcggtaggtatgatctatatctgtatatccttgaacgaaaaaatcagcggcgcagagggcgaggccatcaagaaaaaatatactccttttggcattaatgactcatacacaccaatcggaatttgtggaggccgaaatgccgttgctgtgattgtctgctggggctcagcatttatattgcttattcttttggctgatatattcacactataagccgtactgaacgagggaggcgatttgtgatgcaattatatggatttcaaatcaatgagcaaagcgtttccatgcagcggaaagcttattactgcaagctgattgcggatactgaccagttggcgcgtcagattaaatactatccattgtacgaggaacacaggaccatcaaaggtgtttttgaaaatcttcttaaagaccgggaagtgttgtatgctccgctgtttcggtatgtatcagacgaactgcaagcacatgggatttacaactatgactcgcagcgaattatagatgcctgtgatgctgtcagtgggaaatatatttcagtttacatggacatccaggaacagtgctgtgaaatcgttggtgccctggaagaggaaatgcagctgcggcagctgcgcaaagatacaaggggacgcattggtgcgattggttccggcgtaggcggcttggcagttggaatgctgaaagctggaacactcaacattgcatcaggtgttatccattccgcagggaatgccgttggaaatctgttctccaaattgtattgcgataatcagttggacgagctctatcatacccatgctacccgccaatcgctgcttaatgggatgcaggcggattgccgggctattcctacagtgatcagcctgatccttcaagcagaagcagatactacttggcaatacccgtttcaaacctcccgacttactgatatcacagcaatttgtaatcaaatttctacgaaagcaattccgcgcagcaaatgggagcaattattgactggctgcatcatcaactatgcaccttttctgccagagttgtatgagtttgctgagaagacgctgggaggggatgacggcaatcttttgaaggtcgctcatttcttctctgtgattcggtattttcagcctatagaagaaaaggaacagcgtgatgcaagcttccgagaatatcagaaaaatgccgaagagaagccaaaggcattcttcggaagccgactgcacgaagcggaagctttcctctccacgagccaaatctatgatgatgtctattgtattgtagaagatgttctctctcccgattttaatgacatgattcgccatctgctggacttccgtacatatatcaatgataaaggcgaagaagatgggccgttatttgatcgcaggacaagacgccgcatgatattctttgagtttgatagcccgtcaaagcttggcaagcaaacctttattcggcaattttgtgatacctgtcacgcaaagctcatgccaggtgaagaagcgtttgcgttcattgacataaccagcacatggactcgcagagagggcattttaatcacgaaccgtggcttttacctttcggaatcatgcaatgctgtcaggccgggttctccgctgctatatgaaaggatcagccgaatagtatgcgaccctgttatgaaaatagaatatgacggtgcgatcgttaagccaaaactccccagtaatgaaaaaattagaaatttcctgatttttagctgtatgtatttcaaattcggacaatttgaggagtgaaatcaaatgagtagtacagatggacgcccgttggtgtcaacgcaggattcaggacctgaatccaacaagagcggtacaggttgtttgggttgtctaagtcagattgtcggcctaatttttatcatttatattatctctgtgggactccgttcttgcggaaaaagtgatactgataagccaaaagattccggtggtcaatcttctgtacaaactgagacagtaatgcagcaaccagatagtacagatgcggccaatgatagttccagttttgccgatgcagaaacgctttctgataaagcggccagtgttgaaaaacgatattttcacaaattctacacagacatggacaccgttgaaatccaccactttaaggaacgtaatgaacttcttgaaaactcggttgaattgttagaaaaagctgcacagggagattttgaatttctcgactatcaggtgaagatattgtccaccagttattactacattacatcagatactacatctgaatactactatgtggggaaaacaaaggataatcgtccggacgggttcggcatgatattcgggatgtcaaccggcagtggaacctacgcattggccgatggatttatgattcattacatcggagacttcaaaaatggtgcgtatgacggatttggcgccttgttctcagcggacgagtatgacttgagcggcatgattaacaacatcgtacagtccggtgaaataacatccgatgaagtgttggagaatgcggttgagtatctctttaactatgtgtcttacgaaggacatttcaaggatggaaaaatgaacggaaaaggaaatgagttttcttttccaaatgtagaagttgggcttccgtttgacttcaacaatgatccgattgacggctaccgttattacaatatctatcctgacgtcattatgggagaatacaagaacaacgcacttaccggaatggtcaaggagtattggcataatcacctctggtacagcggtgaaatggacgatggccaggaaagtggaaagggtgcttggtattacaataatggacaggttatgtatgagggagagttcaaaaaaggaaagcagagcggaaaaggctcttactatgatgaaaatggcaatctgatttactctggtgaatgggaaaatggagactacgcacattgatgctgctcatactttaggctaaacaaattagggaacgctatcaaactcaggatagtgttccctaatttgttgacagcgctctggagatgtttccttttgaatctccagggcatttcttatgttgtccttacatgatcgcagcatctgcggcaagatcctcagtgaggtccgcgatggtatcgccggtgacctgcatggtggcggcagaccaggggcagccggaggcaaactgcgggaacacaccggtggtgtgatccacaaaataggcgtcgaagccggcggttttgatctgctcctcggtcagattccgggtcagctgatggaccagcgtgccgatcatctccaaatgccccagttcctccgtgccgaccgtggaagcccaagggccacaagtacgaaaaatccttgcgccgcaagggttacaggccgaaaaagagagggaaaacgcgaatgtacaaaatgccggttggctccattcctttgacgcggactaccactatcgcggctccgaccttcactaccatgtgaacgtgtctgccgcgctttcggagggaggggcggtatggtgaaggagtttatttcacagctcccgccggacaagctgtcgccctttgcaaagcacccctatcgggtgcgggaggatgccgccatggacgagctggtggagagcatccgtgtccacggcgttctgtcgcccttgttggcccggccaaaaggggagtgctacgagctggtcagcgggcatcggcggcgcttggcggcgcagaaattgggcttgcccaccgtgccggtgctggtgcgggagatgagcgacgacgaagcggtgatcctgatggtggacagcaatcttcagagggaaaacctgctgcccagcgaaaaggcattcgcttacaagatgaagttggaggcaatgaaacaccaaggaaaatcaacttcggtgcaactcgcaccgaaattgacaactgaacaaatcggatatgaagccggtattagtaaagatgtggtcaaacgatatatccgcctgaccaaccttgtcccgccgctgcttcagatggtggacgatggccgcatcgccttttctcccgccgtggagttgtcttatcttacccgcgatgagcaggcggagctgtgggacttgattgggcgggaggatgccacaccgtcgctgtcacaggcactccgcatgaagcagctttcccgcgaggcaaagctgacgccggaggtgctgtacgccattcttaccgaggaaaagcccaatcagaaagagcaggttcgcatcaaaaccgagtcgctgcggaagtatttcccgcggaattattctgcgcagcagatggagcgggagatcatcaagctgctggaggcccgttaccgcgcgaagggcaggggagagcgatgattttcgcatactggcgctatacaaatttcttccgtacaatgacggcagaaaggggagagctttatggaacaaaatttaccgccattgccgccggtcatttttgagaacggtctttactacgagctgcggggcgagcagtattatccctgccttttgccgccggagccggacaccacggaggacaagctgctggaaaccatcatacgccagatggcggaagcacagggcatcaacgaggacttgaaggcgcgggatcaaatggcgtgggtaggtgcgatgaacaacatcaaaagcgccgcgcttgagatcctgcgagagtccaaataacgccccaagaaggaaacaaaagcaaaaaagcaacgcaagcggagacaggtcaaatgcctgcctccgctatttttatgccccaacgggcaaggaggaacaatatggattatttctatgagcatgaatcagagctatttacattttaccgtgttccaaaggtgctgtttacggaggaaccattcaaaaacatgaattgtgaagcaaaattactttacgggttattgctggacaaaatgggactttcccgcaaaagcgggtggttcgataagcaagggcgcgcctttgtttactatggcatcagccacattatggaggacttgggctgcgcccacagcaaggcggagaagctgctatccgaactggagcaagctggcctgctgcgccggaaacggcaggggttggggaagccgtctgcactgtaccccctgaaattcgaaaaccgaatttcttgactttcgattttcgaatttcaagaacgctgaaaatcagcgcacctgaacgctgattttcagcttctaataagactgagtagagcgatactgagataaatatataccaagccgaaaaaagaataatagggaggatcatcagatgaagaacaaagagaacttacgggaaaagcaggtaaatctccgcttgacgcaggcagaatatgagcggctcacccgcaccgcgcaggaccacggcatcgggcgggcggcgtatctccgcatggtgctgcggggcgcgtggctgcgggaggacggcagaaaatcagaataactttttccgctggaatttgatgcaggccgtcacacggtcacggatataaggaacatcccgcttggcgtaaaactccagcggatctgaaagggccgccatgatctctttttcggcaaagtcgcagcgaagctgcggcccgtatagattttgcgccgcgtggacctgtcggacaaagcccgttttcatgggctgagccttgagctgccgcaccaatgcgtccggctcgatctccatgggatagtcccgtgtgttggacagcaggcccgcaccaaagtcgaagatggggcagtagtcaaagccatcaccgcagcgcagcacagcgatgttgttcagatgccggtcctcgttgctgaacagcatatccacctcgaacagcagcgtcagataggtgccaaagcggtcaagtcccgtcagccgctcaacctgctccaccaaccacgcaaggcggctttgaagattgggcaggcggtttaccgcggtctgccagtccgggccaacgccttttcgcagcagctccgcaagggtcaggatggcctcgccctgacgtagaaaattggcactggaacagccgttgcgggtatgaccgtggacttccagccgctccatgcggtaggtcacatagcgaaagcccaacgcgtcggtattggtttgtgtcagcagcgcagaggtcacggcttcagccagtccctcgtagccgaacagatccagcttgtaccagcggccatctgccagccatttttcctgattgcccttagacgaagtttccgcaatgcggcttcccgttgtcagtctgatcgacatattcagccctccacaattttgatccagcacgaatcctctgccatgcgcccttcggtcttgcggatgatcgccagcgggtcatagcagtccagtcccaagtcagacaggtaatatttcaaaccgtcccgctcctgcggcacacagcggtctttcaagaaggtttgcagatcgtcccatgtgggcttgcggttcacgccgaaagcggtggaaaggggagaactggcctcgttttcgatggcaagttgatgagtggtttggtcagcgcagatcttcgtacaaagcttgttcccatcgtagtagtacaggatcaggagggcgtgagcgctgcttcgggcattggccagaaaggcatcgtaatcagacacggcagggcggcggatggtgatgctttccccatcgaattgcagcgttacggtgcggctgccctcagagatgcccaggtccttcatccaagcagatggcagagccacgcggtagcccttggcatccggaccggcgtttccacccgccttgttgataagaatatttgcagttcgttcctcgtgcagcacggtcattcacctcaaaagtttctcacaattattatatctattggacaccaataaatcaagaagttaattttacaacagcattgtcacgaaaatgaaaccgctatacggaagctgctttcgcaagcatagcatttggccgtccaaatgcgcttgttaggggaagcaattcccctataaccccttatgaattgaaaggaaaaacgatcatgagaaaacgaccaatcaaaatatcgctccgtttgaatgagcaggagcatgaacatttgaaacagcaggctatgctctctggcttcccaatggaagtattcctccgtgcgctgatctctggcatgaacctccgatcccgaccactcgctgaatacgccgaaatccggcgtcaactcgccggcattggaaataacatcaatcaaatcgctcatgttgtcaacacccgcggctttgccacgaaggaagacattgccgcagtcacgacagcacagcgggtgatctggcagatcgcaaagcggctttgagatagcttattccaagatatatgccgtctgaacaaggccaacgacaaaaagcagagcgcgcagcctcctttctcaaggctgcgcgcccgtttttgttatatcgatcaattcccgcttctgggacgcaagcatcgaaatattgcttgtggagatggcattttgtggtataattattttgtgaaattataagtacaggcggaggagagcgacctatgacaatcagtaagaagctggaaacgatctatcataatggacaaccggacggtatccgctcaattcgccggaatctctcaacgatgaccacctatgtaattccccgcccactcctatcagaggcaaaaagtatttccggaattactcgtccgggtatttactatttgatcaacgagagtgatgacaacagaattgcgcaaatctatattggacagacgcggaatggcatcaatcgtttagacgatcacaaccgttcaaaagatttctggaacaaagcaattatgtttcttgctgagagtaagacatttacgctggatatgatcagcggccttgaaaaatttgcaattatgaaggcgcaggagtccaaacgatataaggttgaaaacagcgttgttccgaagtatgagatcgatgaatatgaccttgtagcagtggaagaaatttacgatgaaatccagtttatcatggccacacaaggctataagatggatgatgcgaaaaggacgatcaatgaggaacgcattcttcatacctcgcggaacggtactgctgcccgcggtatgtatgacggtgagaaatttgaagtgctggacggttccgagatcaacatggataagccggcgcatttgcagagctataataggcttagagatgagctgctgtccaagcaatctattgtcaaggctggagaaaagtacatcttgaatgttacattagatttcaacacaccgagcggtgcaagcaactttgtacttggaggctcgacaaacggttggatagagtggaaagacagggacgggaaaaccttggacgagctgtttagaaagcaattataaatgatggggaggcccacgatggcacttgaaaataaacttggcatcaccaactccgccgagcttgcccgcgaggaggaacggatcagcaagaagaaagccgtagaactgtttgaaagtggctctctggacaagctggcacccggcagattcgcgtcgctgcaagccattcataaggcgcttttcaaggatatttatgactttgcaggcgaactgcgcacggtgaatctggcaaagggcaatttccgctttgcccctttgatgtatctggaggcggcgctggctaacatcgacaagatgccgcagtccacctttgacgagatcgtcgaaaaatatgtggagatgaatatcgcccacccgttccgagagggcaacggccgcagcacccgtctgtggcttgaccagatgctgaaagccggtatcggacaggtggtggattggagcaaagtggataaggaggattatctcctcgccatggagcgcagccccatcaaggacgtggaagtcaaggtgctgctgaaagcggctttgaccgacgagatcaacagccgcgaggtctatatgaaaggcatcgaccacagctactattacgagggatataccacgttcaaggcggaggaactgtaaatcatatgagatagccaggagggacaaacggtgaataaacgaaaaaagtatttgatattggctatcatagtagtgtgcgcctttgccattgtcggacctctcattattaatgagtgttataagtcaaatagcggatatattacattatggtcgcctgcagatatgcttgcttactacggcgtagtgcttggcgcattagtagctattattacagtagtcgttacaatcggattcacacgcaagcaaattcaaatggagaatttcctaaagcaggaaaatgaaaagtggacgaaaatagaggcaatctttgcaaatgctatcgataaaattaatccgatgcatccgctaatcgaaacaatggataccggaatgaaagaccctgctgcagcaataactacatttcaaaaatatagaatgatgtgcaaaatcgctttggatcaattaaatgcacacttatgtgtaaatgactatccaaaagtcaagaagttgattgatagtatctgcaatgctacagaaatattcgacaaaatttcagacggagagatccaagcatattcgtctctgcgtgactattccagtcttgctgttgtaaaagagacacttaaaattgaaaaagaacatcccggcacttttccagcagaaacaattgcttttgactatgatgttctcaaaagaaccaacgggttgcatctggatgatttaagtaagagaattgcggaacaaaatcaccaactcgtaaatgcgtaccaagaaatgtatcgtcctttacttcaattgaaaggaagcattttttcaaaaatttatagtgaaacaggcgaaagcgccgacaatattttggatttcgaaaggaaaaatcagtaatgccgacacttgaatggattggaaagagcaaggtgatcaatcaccatcaggacgtgccgtttcgggtgttggagcgcaagtatagctttgatgaaaatggacagcacaacgaagataacggcagcgaaaacatgatcatccggggcgataatctggaagccctgaaagcgctgctgccccggtatgaggggcgcgtcaagtgcatttatatcgatccgccctacaacacaggcaacgagggctgggtctacaacgataatgtcaatgacccgaagatcaaaaagtggctgggcgaggttgtcggcaaagagggcgaggacctgacccgccatgacaaatggctgtgcatgatgtacccgcggttgaagctgctgcaaaagctgctggcggacgatggtgttattttcatcagcattgatgatactgaatttcaccatttgcgtttgatatgcgatgagattttcggaaattttgcagaagcggtcgtgtggcaaaagcgaacatctcctgacgcaagaaagatacttagtagtgggcatgagtatgtactaatatacaccaaaaacccagatcaaaacttggggcttagacgacttcccttagagcgcaaagatattgaggcatataccaatctggacgatgatccgagaggaccgtggatttcttcgccttttactgcgccgggttaccgcccaaatcaaatgtatccaataattacgccatccgggaaaagtgtagtaccgcccaaaggtcgctgttggagtaacattgaagaggtatatcgacgcctgcgttcagaaggacgaatgtggtttggtgcggatgggaacggagtacctcgcagaaaaacgtatctttctgaacgggaaggacgaggtatatggacttggtggacaaattcagaagttggctatacgcagatggcaacccaagagttagcggctattcttggaaaagctgtatttgactatcctaaacccgtaagtttaattagtcgcataattcaaatggcatcctcggatggcgatattatcctcgattccttcgccggttccggcaccactgcccatgctgtcctcaacatgaacaaggcggacggcggacaccgcaagttcattcttgtcgagatgatggactacgccgacagcatcaccgccgagcgcgtgaagcgcgtgatccgtggctacggcgagggcaaaaacgccgtggagggcacgggcggcaatttcagcttctatgacttgggtgaaccgctgcttgtgggcgattgcctgaatgaagcggttgccccggagaaaatccgagaatacatctggttcatggaaaccaagcagccctacgccccgcccagcggcggcaatccctattatctcggcaagcacaacaacacgggctattacttctactacgagccgcagcgcgtgacggtgctggattatgcgttcctctccaccattacggaaaaagccgatggaacggtgatctatgcagaccgctgttccatcagtgaggacaagctggcaaaaatgggcgttacattcaaaaagattccgcgcgatattagcaggttgtgaggaatatatggaaaaaattcttattttattgaaagaagcaattgtaccaatagcaacttgtgttctgtctgggattatttcctatattgtatctgtccgaactgcgaacaagtgggttcctgcatatagaaaaaagtacgaagaacttcggattgaagttgccgagtctcttacaatgtatgcaaatctttatacgaaccccattgatattgcaaaaacagagaatcatcagttgccgcagaattatgcagaagcatcatcgaaattgcggaatctggcttcaaagttaaaggctttctcggaaactatgcctcccagaataagaaaagttccatcaaaggaggcaatagatgacgcttcgagctgcttaattggactgtctaacagttttacaacaccgtataactctaatatttcagatgcagagcgaagaaatacatacaaatatgagaatgacctaaggcaaatactacagctacctcttgtaaaaaggtgaatttatggaactgaaatcttatcagaaaaaggtcatatcggacctgacccgctatctggaactgctgaacgaaacaaagagtgacgcagcggcgtttcgcctgttttggcaggagaaatcagccccggctttagggcgataccaaaacgtgatacccggcgttccgaacctctgcttcaaggtaccgacaggcggcggcaagacctttattgcctgcaacgccgttcgtcctatctttgacgcactccccgctaccaagacaaaggcggtcgtgtggcttgttccctcagacgcgattctgacgcagacggcgaaagccctgaaagacacatcccacccctaccgtcagaaaatcgatgtggatttcggcgggcgcgtggaggtctacaccaagcaggagcttttgaacggtcagaacttcaatccgactgccgttacggagcagttgtcggttatggtgctgtcctacgattcgttccgtgggcgcggcaaggaggtcttgaaagcctatcaggagaacagcaaccttgccgagtttgcaaaggtgctgggcaagcctgacagccccattgaaaaagcggatgaaaccgccctgttccagattatcaaccagcttaacccgcttgtcatcgtggacgagagccaccatgcccggtcggaattgagccttgaaatgctggaaaacttcaatccctgctttgtgctggatttgaccgccacgccgaaaaaggagagcaatatcatttcctatgtggacgcggtgcagctgaaaaacgaacacatggtaaagctgcccgtgatcgtctataaccgggacagccaatccgaggtgctgattgacacaatcgacctgcggaacaaactggaagaaattgcaggtgcggagtacgccaagacaggcaaatatatccgccctatcgtgctgtttcaggcacagccgaagggcaaggaggacgcgaccacctttaaaaagctgcgggacaagctggtggacgccgggattcccgccgagcaaattgccattcgaaccgccgatgtgaatgaactgaaaaacaccgatttgatgtcccccagttgcccgattcggtatatcatcacggtcaatgcgctgaaagagggatgggattgcccctttgcctatatccttgcgtctcttgccaataagacaagccaagttgacgtggagcagattttgggacggattctccgcctgccccacaccagccagcatacccagagtgcgcttaatatgtcctatgtgctgacttcttccaacgacttcaacaatactgtggcgcatatcgtcaagggcttgaacagcgcaggtttcagcgataaggattatcggatcggtgagcccgaaaaaccgcaagtacccgaacagccagcagagcaaatcacgctgcctgacccgcagggagcttccgaaccggaaagcgcagaggacgatttttcggggctggatgggaaattgatcggggcagaattggagcggcgcagagaacaggcgcaaacgcctgaaactgccccgaaagccgacaccatgctggacgctgccgcagaggtcgaaaaggcgtacacagacgctatccaacagaccggcaatgatccggtgatggacaatcttccgtgggaggtacgggataaagtgaaatcatttcaggtgaatccgcagttccgggaggatattgaaacgctgcaaatcccgcagtttttcctgaaagttgagcaatctttgtttacggacggttcttttgaactgctggataaggaaatgctggcagagggctttaccctcaagggcaaggcatacgatattgactttgccgccgcagacgatgaaatccgcgaaatcgacgtgcgggagcaggacggcggtttgccgaaggtgttcaagatggagagcgccgagcagcggtacttcaaggagtggttcaacaatctgccgccggagagccgggtgcgtcaatgcaaggacatgatgttcaatcagcttaacaagctgaacatggtagacgctgccgaactgaaagcctacataaaccgcattgtggacgacatggacaaggcacagctcgccgccatggagaaagccccactgggctatgcggcgaagatccgtgacaagatcgaaacgctgctggaagcccactatcgggaaacctttgaaaagtggctggaaacggagcgtattgtctgcaagccctatttccgtctgcccctcgcaatccatcccaccacccatactgacatatacgcccgttcgctgtacacggcggaggacggcgacatgaacaagctggaagaagagctgattgtggagttgaccgccctgcaaaatgtccgctggtggcacaggaatattgccagacaagggtttgcaatcaacggctttatcaagcattaccccgatattctgattatgaccaaaagcggcaagctcatctgcgcagaaaccaagggcgaacacctgaaaaacgatgacagccgggagaaaatcgcactcggtcaagcatggcgtacatcagcgggcaaggactatcgctattacatggtatttgagaatgaggaaaacctcttgccgggtgcaatgagtatgagccagtttatcgacacgattaaggcgctgtaagggaggtgcgtgttttgaaactgccatatgaaaacgaactgtatgagctgcgaaagtggatagactttacaaacgcaaacttgcagatgcagtttctccacacacctcaggaaattcagcgtgtccaccaatggatcaatgcaattacgagaggaatacaagcggactatcctttttatgcgactacgtgaatattccgcgcgagattgcgcagcgtgaccgctgagattgagcatccattccggcggaattaagcaccctcgccgccgtcgttgagcattgcggcaaaacgtagatatgcatgtaaatttcggagttgcaagtccagatgcacggtggaagaagtccactatcacgggaaattagatccaccgtcacgggcatgaggtccatagtgagcagagggcatggtgcggtgttttaaggcgtttatccggtttcttcgagaaatatctcggcgttgcctaaagcagcggcgtgctgccggctacataggcagaatggaggtagagtgcgatggctctttggggcagtcgaaagaaattcgacaaaaacagtgacggcaagttaagtcatcaggaatggtggcactggtatcgaagcaccagcggcccggaaatcgaacaggcggagcgccatcaggcagcgcaggtgggagagaaccagagttcctggctgcatgaagttgttcgcattacccacaccgctaccggaaactacctgagtgccgtctgtgaactgctgtcatccatgccgccaaaggatgccaaggaactggcgtggaaagcactgctctgccaactgactgtcgcgcttgcggagagcggtctgtggtccaaccaagagaaaacgaatgccggactattcgtcaacggccagagtttctatccctaccgggctgccgtaactgaccttgcgagaatgagcggaatttgcagcgaggacgaacttgcgcgggcgtgcctaaaccgccagcactgtttcaggcggagggcagcctgactcaggaagactgcggcgccttctggaaacagttcatcgcgcagctgccgccctactatgatgaaacgcagccggcattcgaaaacggtgatttggacatctgcctgccgctatgcgtcagcggggatacggaggacgccatccgggcgctcttcgaaaacctttgtacgccaggatccggctggggtaatgcccctctcgcgctcggagccgctctgccatttcccgcagatttcctgcctcattgtaggcgtcaaaagaacagcactccagccgcgtccatccgtcaacgacactgatgtccagcttcgcgccaaactcaccggctttcccgcttttccccgcacaatgggccgaacgaagggctggctcacgctgacgatccggtcaggtacgctgtgggtacggttatcgtacatgtacttctgctgttcatagacggtgcggatcgtgtctaaacgctccgcctggcgagggggcagattttttccgagggacagttttccatcgatggcattcaggtcgcgccggaggtaagtcagctgctttaaattaatggaggatttatatgaaagaagatagaactgcgttttggttccgaataagagttattttatccactcttcttgtactcttaggtgctggtctttttttcgcaggatattatggttatgccaaaaaatggggtattcctattgaagtgtcattctttggctctggcgggatgattattgcaggatttgcaatccgcgccacgctctttcattgtccgttttgtggggcacatatttatttaagaaatccagtattattgtacttttactcttgcccaagttgtgggcacagcgttggtaaaggaaaagcctcatatttaaacagaagactctcaacaaatagtgttcacgaatccaaacactcaaacgtcgcgcattatcgaagaaaagtcataactattattgcattacttatatcttggtttatttgcgccatattgctctatatttttaacctgtttaacggatattgcggaatattattaatcataagttctattccaatattgctctccgtttggacattacgttgtcccaaatgtggcgcgtggatagcaaagcaaactcctatatgggaatttcttcactacaattgtaaaatatgtggattttctgctgatgaaagtgataagcgagaataattgaaagatgtacttctccgtgcagtttatgacaaagtcgaaaatacactttctttctatcaaacatggtcggaaactcccgacgaggtctccgccaacgcatgaagcaggcagccaaacactgcaccgtggtgattaaatccttaatgactacgctcccctgtgttgcaaatatactctttcagcaaaacgagatgggtgctattttcctgaatcctgcggcatttggcgagttggtggtaattgtccgccatattgaagcagaacctgttgttgtccagttctgggctgagattcatccgcgaattgtgaatatctcccgtgagttatatgcagatggtcattgttcgaccgcagcagaaaaggcggtcaaagaagtagaatctcgtctgcgcgagaagttttcagagttaaaacccggcacaacagttccctcaaagattggtgatgtgattggcgcactcataagcgaaaatggcgttttcaggttctgcgacacatctactaccagcggcagggactaccgacgtggaatccactctctgtttgaaggaatcatggcagcctatcgcaaccctgcggctcatgctaatcttcaatatgaaaaacgtgaggctatggagcaaatcatactggcaagccagttgatgtatgtgttagaaaagcctcaattatagtgtaacagaatcggcatcatgctattgacatgatgccgattctattatatttacatatccaacaataatattcttgcccgtttctgcacctgccgctccatcatccgcaatcttttttcgggcaggttatagcgcgggtgcttcttaaacttgaagttcagcagatgccgcagcttctcgcgcagctccggcgtcagcgcgtccttggctgtaccgagaaaatcatcgtacacactgggatacagcgtttcgatatattcctccaatgcggtctcgttcgcccaggcgtccgcgcctgcaaagttaaagagggaattgccatggtcgaacaggggagcgggggagacgatagtattcgtccggttatcgaccattacgccaaagttcccgaaatgccggtccacattgcagatcaccgcatcaaacaccagcatttcgttcagcgcgttgacaaacttatctcccatcttttcataatacgccctgacagctcccatgccgcccttagaaacgagatgtccgatcgggaggtaggcatacgccttgtcggtaaaaagctcgcaggtggagcagagaacgcctttccaacgggataagccgtaggggattgcgtgaacgcccatggcggcggcgatttgtgcggcgtaaaactcagaatatggctcgttgccggtattggccgcgccctccgtgccgcccttatagagatgcactttaccgccgatgcgccgccagcatttgcggagcattccgttggtggtaaactccgggctggagagcagggaagtgcggacgctgctgccatagccggtaaaggcaagctctgccagaacattgctgaatgggttgtcgtagagatttaccttgccgaaagaagcggtgtcaccgtcctcgacgacccaatagcaatcgttaagcgatagtcctttacaaacactgataatactgagcggtcggttgaggtttaagccgcattttgccaaaaggctatggacgtaggcgcgattcttcgggatcgtgcggcggcgcagccaacggctcaatccatccggcgtaagcgtcagaccaagcggcagaaatgccgctttttcttcgtttgtccaaaggatttggatctccggctcactggtatctgttgtcgcggagaatttaaccaacggttcatcgaactgctttaaaatatagttcatgataaatccccctcaaaaagttacttcagaccacacaggaaattttctacattcaaatactgaacaccctcggcaaacgtatcttttccgcgataaagaacgaatttaccgctgatcgggccaaagcgattttcaacgatttggcatttctctgcatcacgcagatgaagtgtctgcttttcgttgacctcggtgctgtgcttgatttcatagatgcggcaattttgacctgctttatcgtaaatcaccatgtcaaactcgccgccggcatcgaacttgaatttgaacgcttccatcgtactgggcgcggttttgcggacttccagcagaacaatgtcctccagcatccggccctttacatcgtccagaatctttcctgtgatatatgccttatctgcttcggaaatcgatgcgaaataggcatcctgcatcaaggagtagactaaagcctttgcgatggcatagcgcataccgggctgggaaaagacgatatgctctgcctgcttaccgctttcataccgttccggacagttgacgatcagatccagcataagcagatacttcttcactttgtcgatatgctcctgcgtgattggaacggttgtttcactcttttccttgacctcaatgatggcctttaatcgctccaatatttgcttttcattgacatcatagagaacggtcgcccgttccgcagggagatcatgtaaaagcagttcctttgcggagccaaaatcatgggacttaaattcgtcctctaccacgcgcagcacaaagcggtggttcatgtgctgcacaatgcagttgataacgttggtcagttcgcctttttcgtaaagctcacgcagttgattgaagtattcgccgtaatggtcatttttcagcgtgtgctgaatgttacggctgatggcggtatcaatatacttccgtgtgctttcgtcgtcccgaaacgcgacctcgtcaaaggcggcatccggatcgtcaaagctcatattttccattttcagcgttccgccgtattcaatataagaatcgacagaacggatgttcaggagccgcgcatactcccgaaagggaataaaagaggtgtggatcgtcacgcttctgtcgtacagttcatcgcggtttgccatagcgaagccaagagagtccgtaccggaaacaacgattttcatgcccatcatactgaacacatcggaaagcacggcagcggtgtcgatgaagtcgctcaggagcgtaatttcatcaataaacacataccgatagcccagttcaaacagaactttcaagtcctttgtcaaccgtgacatatcatcggtggtctgcaccttgatgtaggccgttttttctatgggcagttcggaaagcatttgaaacagaagtgttgtctttccggttcgacggagaccgtataaaatacagatcttcccatcgtaggagccagccacaaacttctgcaaggtgctgaagcagtcacgcttgccgtactttgccacgctgtttgccaacgcctgcaagcccgtacacgtgacaacattcgtatgaaactctggcatttgcgagagtacggcggctgtgacaacaggctgaccatagctttccagcttttgataaatcgcatggtatctggccgtgtttgctttcgcggcatcgttttcgtaattctgatagttgcgcgtggacataccgaggtattccgcacattgggcctgattcagcccttttgaaatacgcaattcttttaaggtcacgctcatcacctcgcctttattatatcacagtatacgcaaaggacaagaaaaatacgcaaatatttcgctttttcttcgtctattattcgcctttcttctttgggagctgtgtaagcgcatctaattcttcataggtcaattcgccgttcacatagcggtttcgggcattctccgcttgtgctttccagatttgaaatgcggcatctgtgtaaatggccggagtacggcgaacacgcatatcataggttttgatccgctgccggatgagctttaagccatcatcggcagcgattttcttttcatgcttctctttgactgcgagttctttgcagctttttccggtatcaccgactgaccgatcacaataaagagctttggaagagaaagggataaagtaacgatgacaatattcacactttttcaattcaattccttgctcgaccatctccagcagttctgtcagcagcgtcgcgcccaaatcgtccgagccctcgatgcgggcaaaccggacggactttggtggcgtcgaaatgcggtctgccgccaacaccggatcaaaattctgctcatctacatacagctttcgttctgcgcgcatcttcaggtccaaaccggcgatcgctgtggcagcttgaaaatcgtggctcatatagagcgccaaacgctgcttggcgctcaacttagatctgtccggcacgagcacggcatctgcaaaggcggaaagttccttttgcagtttctcaaaaccttccatgcgttcatcaagcacgtctgccagcttttcttcaaaaaagagggactgcacaaagcgttccccgaaaggatggatcgcgctcagcgcatttttgatctcggtaatggcttgattttccatcatgggcgttgttcgcaccagtaatttcgcccgtaaagaagcgaaatctgtggacaaaaaggcaataagggttgtcccgagacgatattccacgggcttgaaatccgtttctacatattcctttttggggccaaaactcaagcaatacaaggctctcaaggcttttcctccattcgtggacacagctgtgcaatgcgtgtggtatatcatttgtaacgcaattagtttaccacatattgaaatctccgtcaacgcttgctatcatttttgtggaagttgaaattcgatgcaaacgatcttccacaaaattgaatgaccgccggagcgtttctctttcggggaagcaggccatgaccgtctgaggacgcgagcgtgccaaggagcagaaatcgagtttccgtcaggcaggaaaccgcttccgggaaaacggcaaacaagttcaccggtctctccgcatagtttcaaggaaaggggggagcaggatggcaagcaaaccggagttgctgcataatcgggcggcagacgagatcgggcaggactttcttctcgcgtaccagcgagccgtcctgctcgccttgcagcgtcaaggggttcttaacgaaatgcaatttaaagactgcgtacagaaattggagaaatatacacgaatgaatggaggaaatgaataatgttaaaagcagcattctatcaggtagaacagtgccaagaaccgccagaggaaatcagagcagaaatgcaggaattcgccgctgatgttgggttgggattccatgcgttttacatggattctccaaagccgtggtatctttccgagcccagcagcgtacttcggaaaatggtggaggatgcgtctgaacgaaaatttgacattctgattatcgagcggatgtcggattttacaaactgttgtatggacgcacagaaggtgcttcgggcgatgaaaaagcaaggtgtccggattttttactggaacgaacatatgcttgaacttgatgagtacaccgatgaaccgacttcccaactgcaaacccatctcattatagaaaatatcgctcggcaggaagaacttcggaaaatgaagaatattttacgttggcaatttagttctcacgaagcaacacagtgaaatatcttttgcaatcaataagctgtaaagcaatagtgcctttcagtatccgcacagttgcaaaggcatgtgattcgccgtatgatacccgcaaaggaggcggttttatgttacaagtagcggcgtactgccgcgtatccacggataaggaagatcaggcgaactcgtttgaggcccaacagcgatatttccgtgattacatcgagcgtcagccggattgggtcctgcaaggcatctatgccgacgagggcatctccggcacgtccacccgcaagcgcgtggagttcaataaaatgctccacgcggcggagctggggcagatcgacctgatcgtgaccaaggaggtcagccgtttcacccgcaacacggtggacgccctgcaaatcacccgtgacctgcgtcggcggggcgtaggcgtgctgtttctcaatgacagcctggatacccgcaccaacgatggggagcttcgattgacgatcatgagttccgttgcgcaggacgagagccgaaagacctcagaacgctccaaatgggggcagacgcgcagtatggagaagggcgtcgtctttggcggctcgctgctgggttatgatgtgatcggcggcaagatgaccgtcaacccggagggcgcggaagttgtccggctcatctttcataagtacctgcaagagcgcaaagggtgcagcaccatcgcgcgggaactgcgggaggccggtatcctcagcagcaagggcaactgcctttggtcatctgccaccgtgacaaagatcctgaaaaatgaaaaatactgcggcgacctgatccagaaaaagacctacacaccggattttctgacccatgaaaagaagtacaaccacggcaaggaaccgctggtagcgctgaaagaccaccatgaggccatcatcgaccgggaaacgtggcaggcggtgcagcgggagctatcccgccgcaaccgcgcaacgggctgcggcggacatggcaaccgctatccgctctccggcaaaattcgctgcggcgagtgcggcaagagcttctctcaccgtaccaaaaagcggcaggacggcagctcctattaccgctggtgctgcttcaccgctaccaacgaaggcctgcggcgcacagacggcgcgggaaatgtcatcggatgcagtgttgggcggcagatacgggatgatattgctatggatcttctgcggcgctccgtgaacaccgtgacgctggataagaaagcgatcatatcgaatctcacccgcattgtggaaagcgttctggtgtccggcgaggacagcggtgagcaggagctgcggcggctggagctggagcttgaaaagctacaagcccgcaatgacaccatccatgaccgctttttcgacgagagcatcaccaaggctgactatcagcgcgccaaagcccgctgtgaaagtgaaatgaaccgggtgcaggagaaaatcgccgcgatcaaacagcggcagacgctgaacaccgacacgcagaccctaaaaccggacatccgcgccgccatcacaggcatcgtcagcggacgcacggcggacgatgacttttacgggcacctcctccaacagatgaccgtgtaccgggacggcagggtagaggtggcgctcaatctgctgcccgccaaatgggtctatgtactggacggactggaaaaataccgggcaaaaatagggggccatgacgcttcctctgtgccgatgtcggtcagcaggcccttcagctccggatagggcatggagtagcgctgggaaaggtagcgcagggacgcgcccagctcgccgtcgggaccgccgtactggctgatgatcaccgccgccagcttggggttgggtgtggcgaccttcaccggatattgcagctttttctcataaacaaacatcaggcgtttcctcctaactcccagggccatgggtcattgagccaggtgtagccgtcctccagaaccagctccgcgctgtccagagggccgtatttggcggtatacttttcccggccctccttggccagcttgatataggaggcgtacagtcccagagcctcctggtcctgcgggtgtgtatccagatagagattcagctccgtgacggcgaagtcaagggccatcagctccaccagtgcggtgtttggcagcttggtccgggcctgaatagccgccttaaacggcaggtccagccccggaaacagggtgccggtctgcaaagcctccgtccggctgtaccgggtgggattattgctctgcatgggaatatatgggaaagccagtgccgcgcagccgggcagggtgccctgaccgacctcgcagaccgcgggcttcacttcgggtttttccatagcttcgtgatcccctccttattgaaagcgcccttgggcgcgtaccctatcctatgcggaaggggcaagtagggaacttgctttcccgacaaaaagtcgctataatgacatattggataagctgcggcgcataggctgggccgaggtgattggcatgatcctgctgattcggaaacgaacgctgctgtatacatggctggcggtctgtatgatcggactttccgccatttttctggcaggctcccgacgggccttcacgcccactggggcgatggggcaggggagccgcgttcaaaccgtggtcatcgacccgggccacggcgggcaggacggcggcgccgtcgccggagacggtacggaggaaagccggatcaatctggcgatttccctgcagttggaacagctcttgcgctttgccggtgttcggacggagctgacccggcgggaggacgtcatggtctgcgaccccggactggaaaccatgcggcagcggaaggtgtcggatctccacaaccgggcgtcatttgtcaacggcatccctaatgcggtgctgttgagcatccaccagaacagcctgccatcctcgccggtgacccacggggcgcagaccttctggaaccggcaggagggggcggaagcgctggcccggactctgcaagccgggttgaacccggcggtcaacacccaccgggccaaggaaccgaaacagatcccggacagcatctatttgatgaaccatgtggacgctcccgcagtgctggtggagtgcggctttctgtccaacagggaggaggccgcgcggctccagcaggaggactatcataaaacgctggcgacggtcatcgcggcggggtatttgcgatggatggccggagaggataggaaatgaaagcaaaaacgctgttttattgtacggaatgtggaaatgagaccgcaaaatgggcggggaagtgccccgcctgcggcgcgtggaataccattgtggagcagccggaacgccccaagggaacagggaagggggcctctgtccgggtgggcatgacccgccgccgggcctgccccgtgacggatctcaccgctgacgaggagatccggtttcccaccggcatgggggagttggaccgggtcttgggcggcggggccgtgaagggctcgctggtgctggtgggcggtgcgcccggcatcggcaaatccacgctgatgctgcaaatttgcagcaaattatgtgaattttcaaaggttttgtatatttccggtgaggaatctgagcaccagttaaagctgcgggccaagcggctccatgtggaaagccagcagcttttggtgctttcggagacgaatctgggggatgtgctggaggccgtgaacacggagcagccggatgtgctgattgtggactccatccagaccttatataacgacgcgctggacgccgccgcaggcagcgtcagtcaggtgaaggactgcaccctgtctctgatgcaggtagccaaggggcaggggatcacggtctttgtcatcggccatgtcaacaaggaaggctccattgccggtcccaaggtactggagcacatggtggactgcgtgctgtactttgagggcgaccagcacaccagctatcggattttgcgggcggcgaagaaccgcttcggcgctaccaacgagatcggtgtttttgaaatgcgggacgaggggctggcggaggtggagaacccgtcggaaatgctgctctccggccgaccggaggacgcccccggcacctgtgtcacctgtgtgatggagggggtccggcccgttctggcagagcttcaggcgctggtggtcagctctgccggcggcaatccacggcgaaccagcaacggctttgattacaaccgggcggccatgctgctggcggtgctggaaaagcggggcgggctgaaggtctccgcctgcgacgcctatctgaacatcgtgggcggtctgtcactggacgagcctgccgcagatctggcggcggtgattgcattggcgtccagctatttggacaggccggtgcccagcgatctggtggccatcggagaggtgggcttgaccggggaactgcgcagcgtcaatcagttgggtcagcgggtgtctgaaattcagcgcctgggattccggaggtgcgtggtgccggctcatcgggcaggtaccataaaggcgccgaccggtctgacggtgatcccggcccggaatatcggtgaggcgatccgagccgcgctacgtcctgcggaatgaagtgtacacaggcgccgcccaaggccggttgtcctgcggcggcagcgctgtccaacgtgcagagcccgtcgctttgataaacgcatttactggtgcatgggatcataacatcaactcatttctgttcgatttgcttgtagcatgacccatccgccggattttatgttgaatgactgaggagaggagacgtttgcgggatacagtaaattgaacaaaataaaaattttgttcaatttaagggagacgttttcagcctccctcgacatttgaccgctttttagcgcgaatatcccgccagccagctatgtctgattatcgtaccgaagcaccggagatcctgcgggattttctttcttatcacgagaccatcaaggcccattcccagcgcaccgtagatgaatactacctggatctgcgaaatttcttccgctatatgaaacagatccgtgatcccgatctggctgacaagtctctggatgagatcagtattatggacgtagatctggaatttgtcggcagcatcaagctgtcggacatttacagctatatgacctacctcagccgggatcgggtccggtttcagaacagctcccattcggactacggtctgaacgccgcgtcccgtgccagaaaaatcgccacgatccgctccttttacaattacctgaccaacaaggcccatctacttcgtgaaaatcctgtcaaagatatcgacgcgcccaagctgaaaaaggaattgccacgctatttgacattggagcaaagcaaggatctgctcagcgccgtggacggtaaaaatcaggagcgcgattacgccatcctgaccctgttccttaactgcggactccggatctccgagctggtaggattgaatttgcaggacattcaggatgagaccatgcgcattcttggtaagggcaacaaagttcgtattctttacctcaatgacgcctgccaagcggcgctgaaccgctatctggcggtccggcggcccatcaccgggcgggacgccaacgcactgttcctgtcctctcagaacgagcggatcagccggtccaccgttcatgccatggtgaaaaagcggcttttagaggccggtttggacgccacccagtattcttctcataagctgcggcacacggcggcaacgctgatgctgcaaaacggcgtggatgtccgggcggtccaggaggttttgggacatgaccacctgaataccacggagatctacactcatattgataatgaagctctgcgtgtcgccgcgaaggcgaatcccctctccaaggtggatatccccaagcggaaataaacaatatcgaaatatgaaaaggagaaggacggaaacgtccttctcccctttttttcttcttttcttcaatcacaaaaatgcggaatcctctgcactgcggttgccgatcagcagcatattcagcttcccccaccgccggatctcctgtttggagaacaacagccgttggcgcaggctctcgtccagttcctgcggattcagcgtcaccagacagcgaaaggcgcagggcatcaggtccgcgctggaaatgccgcagagaagcccatcggtatagtctcgcatctccaacggattgaaaatatacagcaggtcttcctccagcggattgagctggttgaaaaaggtaaaccggatcagcatatcgctgtaaacaacgtgccctgtataataggattcattgctgcatccgttgccagaaaccgagcagagcgtaaagctcgccacataggtgccgggccgctccgcgtgctcgtgaatgtcgatcacaccgtccttcaaacggtgatagcggccgtcataaaaatagaaatacagccgcttagcctgaaaaaacgggctccgctgcagcgtccccaccgtgggcggcggggacggcagaagggtcggctgatagctggtcagctgcccgaaggaaacctgcagcgcctgactgatctcatataaagtggcgatatcaatggagatctctccgttttcatatttacagaccgtggcacggctcttgtggatgacatccgccaactgctgcagcgtcatgccgttggctttgcggtatttgcggatctgaccgccgatatagatattgatctcgttcatacaacttgtttccttaaaatatccatttccttcttcttgatcggacacaccgcttattgaggttgttttccatcagtatatatcatttcaagaaatttttcaagaaaacatttcctgaaacgaaactcctgctgtttgctttttttccgcagcctgatagaatgttctcttgttgaagacaaaaagatagaaatgagtgtgcaaaatgaaaaacaaacacagtggtttcagcggctctctgggcttcgttctggcggccgcaggcagtgccgtaggcgtcggcaatatctggcgcttcccctatctctgcgccaaggacggcggcggcctgttcctgttggtgtatctggtgctggtgctgaccttcggcttcacactgctgaccacggacgtggccatcggccgccgaaccaagcagaacgcactgaacgccttcgggactctgcataagaagtggcgttttctgggttatctgaccttcctggttcccaccctcatcatgacctactactccgtcatcggcggctggatcgctaagtatttcgcggtctatctggtctctgacggaacacaggcagctcaggatggtttctttacctccttcatcacctctcaggtctccccgatcgtctttatgctgctgttccttgcattgacggcgtgggtggtttatcgcggcgtggagaagggcattgagaaatattcccggtatatcatgccggtcctgctgcttctcgtcatcgggatcgccgtgttctctctgacgctgagccacacggatgacagcggcgtgacccgcaccggtcttcagggtcttgccttctatctgaagcccgacttcaccggcatgacgctccggagctttttgaacgtggtgctggacgccatgagccagctcttcttctccctcagcgtcagcatgggcatcatgatcacctacggcagctacgtcaaggacgatgtggacctgaacaaggccaacagccagatcgagatcttcgacaccggcgtggcttttctggccggcatcatgatcattccctccgtgtatgtgttcttaggtgtggacggcatggccagcggtcccagcctgaccttcatcagcctgccccgggtgttcgcctccatgggcggcgtggggcgcatcgtcggtattgtgtttttcctggcccttggcttcgcggcgctgaccagctgcgtatccgtcatggagactctggtggccaactgcatggagatcttccacaagagccgcaaggagatgtgcgccttggtggggatctactctctggtgaccgccgtgaccatctgccttggctacaacgtgttctactttgagctgaccctgcccaacggcagcgttgctcagcttctggacgtgatggactatatcagcaacagcttcctgatgcccttcatcagcctcctcaccagcatcctgatcggctgggtcatcggccccaaatgggtcatcgacgaggtggagaaaaacggtgagcatttcggccgcgccaagctgtacagcgtgatgatgcgctatgtggtgcctgtggtcatgctgatcctgttcctgacctccaccggcttctggaacctcctgttccaacattgagaaaccttcatcaaactccatcaaaaagcgggagcctttcggctcccgcttttttgataattcggtaacttaccgcttgttggactttctccagatgtgcatcgtctcggcggacttgatcagctcgtcccggaaatcggggtgtgcaatgccgatcagggcctcggaacgctcccaagtggacatgccctttaggttcaccatgccgtactcggtgacgatatagtgtgcgcaggaccggggatcggtaacgatggagccgttggtcagggtggggacgattcggctcttcacggtgccgtccttggcagtcatggtggaggacatgcagatgaagctcttgccgcccttggagaggtaggcgcccatcacgaagtccagctggccgccggtgccggaaatgtgcttgatgccggcagactcggcgttgacctgaccgaagaggtccatatccacggcgttgttgatggagataaagttatccaacttggcgatgacctgaacatcgttggtgtaatccacaggtgcggccatcacatcggggttctccttgatgtagtcatacagcttctgggtgccggcagcgaaggcatagacctgacggcctctgtccacgttcttgttgcggccggtgatcttgccagccttggcaatatccacgaaagcgtccacatacatctcggtgtgcacgcccagatccttcagatcggactctgcgatcagggagccaacggtattgggcataccgccgatgcccagctgcaagcaggcgccgttggggatctccttcacgatcatctcggcaaccttgcggtccacatcggtgggaggagcgccggcgcccatagcggccacggcggggttttcgccttccacgaccatgtcaacatcgcggatgttgatctcagtgccggtcaggccgtagacccaaggcatattctggttgacttccacgatgatcttcttggcgtgctccagcatatcgccaatgtgggaagcggaaacagcgaagctgaagttgccgtgggcgtccatgggagtcacctggatcatagccacatccgtggtggcgttgccgtcccgatagaaacggggcagctcagaatagcgcatggggccgaaatagcccatgcccttgccgatgatcttgcggtccatgccgctgcagtgccaggagttccaggtgaagtggtcaccagcgtcatccgccttgcacacctcgggcatccacatggtcacgccgccgtggatcttcacgtcaaacagctcgtccttccgggcagccagagccttgtccagagcgacaggctgattgcagcaccaaccgtaatccacccagtcaccggacttgacaatcttcaccgcttcctcagcggtagtcagcttctgctgatacagttcctgaacattcatcgtcttttacctccatatttattctgcatatccgcaaagttttccttgtatcgttaaaatcttatcatattcggcccggcaatgcaagcaaaacgtgaaaaaaatcacaataattcaaatcacacgccaattagcacgttcactcataacaaaatacgtccgctctctcctgttctcaccacacctcaatcgcttgtaactgcgtgctttgaagccattgtgagcgcaaaatcaatgtggaacggcaaaaaaggagcagaccgttcggtctgctccttctttcagttgaaattactcctcaacaggagcgtcctcctcgtcagcggcgggagccagcagagcgcggatggacagggagatcttctgcttctcctcgtcgatggcagtgatcttagcctcaacggtctggccctcagagagaacgtcctcaggcttctcgatgcggcgatcagcgatctgagaaatgtggatcaggccgtccacgccgggaaccacctcagcgaatgcgccgaagggcatcagcttgacaatacggacctcggcggtgtcgcccacgccgtacttgttcatgaacacctgccagggatccacgctgtggtccttagcacccagagagatcttgtgcttctcagcatcgaaggagatgacgtacacatccatggtgtcgccaaccttgcagatctcggcggggttcttgatgcggctccaggacagctcggagatgtggaccatgccgtccacgccgccgatgtccacgaacacgccgtagctggtcatggacttcacggtgccggtgtagtgcttgccaacctcgatggtgctccacacggcctcctgagcggccttgcgggcctcgtcagtgacgctgcggatggagcccaccacgcggcggcgggcacggttgacctcggtaatgcggagctggaccttctgacccttcatggcagacagatcagcgccgcggggctggccgctctgagaagcgggaacgaacacgcggatgcccttgacggaaaccacgatgccgcccttgttctcctcggtgacagtgccttccagcacggtcttctcctcaacggcagtctcaatgttctcccagatcttcacagcgtccagacgcttcttggacagctcggcatagccttccacatcgttgacgcggacaacataggtctcgacctcgtcgccgaccttcacgatatcctcgggcttagcgctgggatcgtcgctcagctcgctgagcttgatgtacgcatactgcttagcgccaacatccacctgaacctcggtgggggtgatggcggtgacaatgccggttaccttctctcctgtatttaaagttttgaaagactgattcagcagttcctcaaaggactcttccatggtctcggtgctcttgatttcttcgctcatcgttgtttttacctccttaatgatgcccgcgggtgtggatgcgccggccgtcagcccggcaatacggcagcctgcaaagtctgcggcggaaagctcgtccgccccttcgatagaaaggacacgggaacagctctgccggcagatctctgccagatgcttcgtattggcgctctttcggtcgccaaccaccaccatcacgtctacctttgcggcgatctccgccgcttcgttctgacgtttacgcgtagcataacatattgtatcaaagatttttacgtttgtacattctttttttaggattttgcaggaactttcaaaaagttcacgaatacaggtggtctgcgccacgatgctcatgggcatttccggctgaaaatcgccgtttttgacccattccgccacagcctccggcccctggaacaccagcggatgaacgcaccaactggcaagtcccatgacctccggatggtgcggctctccgatgatgaccacctgccgtccctcctgctccgcctgggacaccagctcctgaatgtggaccacgttgggacaggtggcgttcacgcagcggacgccccgggccgccaatccgtccagtacgcttttcagctctccgtgagaccggatcaccaccgtatcccccgccgccagcgtttcagggcggtctgttttccggacgccccgggccgccaggtcattgaccacatgggtgttgtggatgaggtcccccagcatccagcagccctgggtctcctccgctgttttctgggccagctccacggcccgctttacgccgtagcaaaaaccggcgctttccgccaggatcacttgcacagcggcgcacctcccacctgctgtccgcccagagcgtaaatctcccgcagaagctcatccgcgatcttctgcatttcctcagcagtcccccggcggccggtatataccggcgtatagggctggccgatgatgatgcgtgtcctgtggaaagtccgcttttctccatccacgaacaccggcaccagaatggcgccggtgcggacgccgatcaccgccgcgccgctgtgagcgtgggccggcaggccgtctgtcttgccgatgccgttccggatggtggtgccctccgggaagatcagcagattgtggccgccctgaatggtctggatggcggttttcaccgcctgaatatccgcgccgccccggttcacggggaatgcgccccccacccggatgacccatgccagaatgggattccggaacagttcctccttacccatgacgcgaagccggtaatccatgggcagtgccgttgccagcaccaacgggtcccagttgctggcatgattcgccaccagcagcgcgccgtgacgaggcaggttttccaagccctgaaccgtgaccggatgcagcagacggcagatccacttggcaaccgtgaagatcagaggaaaaaacggcccgaagggctgcgttgtacgcctctcgttcatcggctcgtcctctcgcggatgatccggaggatcgcttcctcgctctgccggaagtccagctccgtggtatccagcaaaatggcatcctccgcctgcttcaagggtgccgccgcccggtgggaatcgttatagtcccgctggcgcatttcctccagcaccttttcgtagctttccggcgttccccgctgctccagttcccggaagcggcgcatggcccgctcctccacggaggccgtcaggaagatcttcaccgtggcatccggcaggaccacggttccgatgtcccggccgtccatcaccacgttgttctcccgggccagtttccgctgcatttccagcaggtgcgcccgcaccgccggatgggcggagaccgcagaggcgtacagggagatctccggcagacggatctggtccgtcacatccgcaccgttcagtgtcatgtgctgcaggccgtcctctccgtaatgcaggccgatctccaattccggcagcagcgcggcagcggcctcaccatccttggggtccacgcccttggaaaaggcggcgtagccgatggtgcggtaaatggcaccggtatccacatataaatagcccagagttttggaaacgcttttcgccagcgtactctttccggcgccagatggtccgtcaatggcaatactgatggttttcaatgctgttctctcctttattccttctcattcgcggcggactgtcccgccagacggccggtggcccaggcgatctgtaagttaaagccgccggtataggcgtcggtatccagcagttctcccgcgaaatacagatttttaacaagcttggactccatggttttggggtccacctcccctaccttcaccccgccggaggtgacgatggcgtccgtcacgggacagggggcggaaacctccacgggaaaatgcttcaaaacccgcagcaggctttgccgctgctcccgggtcaggtcatggaccttctgccgtccggggatgccggacagctcaatgaccaccgggatcaacttctgaggcagcagatcatccagtccgttctggaaatcatggttggcgtatttggcaaaatccgccagcagccgcttgtccagctgctgttcatccagcgcaggcttcaggtcgatctccagccggtaacgctttttggtaaaataccgcatatgggcggaggccgacagcaccagcggaccgctgacgccgaagtgcgtaaacagcagctcgccgaaatccgtatagatcttcttatcgttttcaaagaccgtcaggctcacgttccgcagactcaagccctgcaaacgaacgcaggggatccccgccgcgatgatcccctgcaagggcaccagagacccctgcagcggcgtgacggtgtgccccgcctcagccgccatccggtgaccgtctccggtggagccggtggccggatagctgacgccgccggtggccagcaccaccgcctgagcggaatagcgtccccgctccccaacaacgccgcagaccgcgccgtcctcaatcttcagggccgacgcccggtcccggaggacctgcaccttcagggccttcagccgccgttccagcgcggcgctgatgtcaaacgcgctgtcgctgacgggaaacacccgattcccccgctcagttttcagcgggacgcccaacttctcaaaaaaggccatcacatctgcgctattgaaacggttaaaggcgctgtaaaggaattttccattacgcagaatattggccaacagcccctcaatatcggtattgttggtcacgttgcaccggccctttccggtgatattcagttttttccccaatcgttcgttgggttccagcagagtgacctgcgccccctgctccgctgccgaaagggcagccatcattccggcggcgccgccgccgatgaccacgatctttttattcatcgtccgcaccgccgaatacatcgtactgatcccacagccgttccagcgtggtaaaggtcttcgtcacatccgtgcccatcttggtggcgatccccaccagcagggcattgatgagcgacatgggcgccgtcatggaatcgataaaggacagcatctcgctgggagccagcagcgccgcgctggacatctgggccaccggagactgcttctgatccgtgatggcaatgatctccgctccccgggaccgggcgaagcgggctgcgttgatggtgtccttggagtaccgggggaagctgaacgcgatcatcacgtccccctctccgctgcggaacagctgctcaaagatctcaccggcggcgctggcctgtaccagcgtcacgttttcaaagatcatctgcatgtaaaaatacaggtagcccgccagatgggtagaggaccgcgcgcccaaaatatagatatgccgggcgtggacgatcttctccacagccgtctgaaaggtgtcccggtcctcgtccatggagatctgccgtagattttcaatatccgcctgcaatacgctgctgagcacgtcccggtcatagatattctccgccgcctggatccgctgtgtcgaggtcagacggttccgggccatctcctgtaatgccttctgcatggcgggatagccgtcaaagcccagctccgcggcaaagcggaccaccgtggattcgctgacctccgtcagctttcccagcttgctggccgtcatgaacgccgcctggtcataatggtccaggatatagcgtccaattcgtttttgcccctttgaaaaggtggaaaggttgtcctcgatcgtatgtaacacactttttgccatgattttcttcctccggcggcacacaacgccgcgtttgattccggggcctattctaccatactttccgccggattgaaactgatttcttccctttttcccctgcgtttttcataaaaaatagccgcaatgcggctatttcaaggaggctgcaaaacctgacgctttcttcggaaagcggtcattcctctttcagtccggcgatctcctccgccgttaagtaccgccactgccccagcggcagcgccccaagctccagacaatgctcccgcacccgctggagccgcaggacctccagcccgcactgggcgcacatccgccggatctggcggttccgtccctcgtggatgatcacgctcagctctgcccggtttcccttccggctcagttcacgtacctccgcggggcggatgggcagccccaccacgtcccggatacggctcagccgttctgccgcgtgttccacaggcccggacaccgtcacccgatactccttggacacctcatggctggggtgcagcagccggtgggtcagggctccgtcattggtcagcagaagcagcccctccgaatcccgatccagccggcccacgggataaacccttgtggaaacgccggtcagcaggtccatcaccgttttccggccctgctcgtcagacacggtggtcacataacctctgggcttattcagcatcaagtacactgcctccggttcccgtcccagaggaacgccgtccacccggatgtcatccgtctccgggtcggcctgctggcccaacagggcggtctctccgttgacggtgacccgcccggcggtgatatacccctctgctgcccggcgggaacagaccccggcagcagacagcaatttttgcaatcgttctttcattctgatccctgatcccgtcttacggcgggtcattcatccttcaattccaatttcagtccggccaaagcggaggacaccttgggcatcactgtccgtcccgccaccagcggcacccggccgatctccgttccgttcaggcagaacaccgccgcccccacggtttttccggcggagatcggcgcccgcaacggctcgtccagacagatccgcgtggtcagccgttccgtttccgccgctgggtagcaaaagcccgctcccgcgatcagcggcactgtggggctgacgccgccgctgacgggcgcctgcgtcaaagcctgtccccggacggcacaggtccgggcggggtaggcggaaaagccgtattcatacagcgcttgatggtctgcccagtcattgccgtcctgcaaggtcacggcgatgagccgctggccatttttctccgcacagctcaccagcgtccggcccgccgccttcgtatatcccgttttcaggcccagacagccatctacataatgcagcagcttgttgtggttcgtcatggtccgtcccccgatggtgacagaccgggtggaggcgatccgcatcagggtctcgttttccagcgcggcccgggccagctttgccatgtcccgtgcagtggaatagtgctgctcgtcatccagaccgttgggattggcaaaggaggaatgttccatccccagctcccgggccttttcgttcatcagggacacaaagcccttgacgctgccgcccacatgctgggccaccgccaccgccgcatcgtttccggaacacagcagcaccccgtataacagcgtttccagcgtcagggtctccccctccgtaaggtacatggcggagccttccgtatacgccgcctcccggctgaccttcacgctgtcgtggagatctccctcctcgatggccaccagtgctgtcaggatcttggtggtgctggcgatgagcattttccggtccgcgttccgctcatagagcacccgcccgctgtccgcgtccattaaaattgcagaggcagcagaggtctccaccgccaaaatccgacaagggaatatactatacagacacagcgccgcaagggtgcagcaaagaaaccgccgggtcaaaaggcatcacgctccaaagctgagatgtctttagtatacccagatcaaaccgtttcgtccccgtcttttttatcgaaaaattttccgatcttgtctacaatatccggtgccatatccacaatgcggtccacggtggacaccggcggcaccgctacgggcatcacgcgggtggttccgtccttgataaccagaaaggccaccgggtcgatcttcacaccggcgccgccgccaccgccgaaattgttctggcccggcttgccgtaatccccgccgccgctgccgaagccgaagctgactctggaaatggggatcaaggtcacaccgtccggcgtggtgatgggcgcgcctacaatattgttggcgtccaccatctcccgaaccttctccatcgtggaattcatcacatcacgcagcgggcttttcttttccatgtccattcgattcatcctttccgactggtgcttgttttttcttcttcatataggccagaagccaccgcaatccgggaatcgccacggtcatgccgatccgcagcaacgtaccgatccgggcggaaaccccgatgcttcccaggatttttgtctcctccgcggtaaaatccacatccaggtggatatgcggccgggggatcaccagcagctgttccagcaccggcatcccggtccagacggccccgtgcagctcgccgtataactgcgcggcgtccgcaggttccgcctgtccccctaaaataacggacacatccagcggatcgatccgcacgccccggcgggtacggcgcagcgcctttttcagcggcggccacagggccttccatgcgtcccggatgtcgctgagcgtgggcttcgggaatgccttcttcggcttctccttcctttgcgtctgctttttctgcgcttcttccggctttttttcatttttcggcggttttttcttttccggaagcacctgaaatttcaaaaaaccaaatcgggcgctgaccgtcagctcctcgccgaaccggatcaacacgcccactcgcgtcagacacagcagcaggaccacaaacaacaggatccccaagatccaccatccgatcacagccgctgccccctctccaagcttttacacgtcctcaggttccccggcgtcggtctgtgccggcgcttccgtgtcccccatgggatctaccacctcaccggcttcgttcagccgcatctgcccatcctcgccgatatcgtccggcagctccggcagatccttcaggctggacagatggaacgcccgcaggaactgcttggtggtgcggtactgacgaggccgccccggtacctgtaaccggccacattcctcgatcagtccccggtccagcagcagccccacggtataggagctgtccacgccccggatctgatccacataggcccgtgtggtaggctggtagtaggcgatgatggtcaaaacctccagtgcgggctggctgagcttggccggcttgcggatctcaaatgccttacggatggtctccgcgtagtccggtgcggaacaaagctgccagctgtcatcgattttcaaaagccggatgccccggcgctcgtaagcgtagtaatccatcagcttttgaagcagctgttccaccgtgggccggtcaatatccagtgccacgcagatccgatccacctgcaccggttccccggaggcgaacaggatcgcctccagcgcggattcaagttcctttctatccatgtcagccacggttctccttaaaacgtcagattctcaggcacgtcatcgcgctcctgccggacgatacagtctgtctcagagcctgccagatgcagtacacgcgccttgcacagctccagcaccgccaaaaaggtggccaccacctcgctgcggctccggctgccccggaacaacagcaaaaagcgggtgatgccgccctccttcagcttttgcagaatgtctctcgccttgctctccacgggatacggctcatgctgcacgatctcccggaaggcggctcgcgggggcggcagtttccgttcggcccggttctggatctccgccatagccagcaccagatccgccggctgatggctgtattcaaacaccttgccccgcttcaccggctccgggttccgggtcacgatgttccgaccgaattctcccataggcgccaaccgctgggccagtgccttcacccggacgtaattttcgctgcgccgccgttcctccaaggattgaagcagcgcgtccatctcgcttttggcctcgtcatcctcaagggacagcagcatccgggtcttgagatacaccagatgggacgccatgataacgaattcgctggcaacctccagatccatccgctgccgatcctccagccatgcgatatactggccgcaaatcaacgagatggaaatatcctggatctccagcttattcttccccaaaagaaacaggatcagatccagcggaccctcaaaatcctgcatctcctcagaccgggagtggaccaccttttccagtttgaatacaggactttccaaaatcaggacacctcaagcaaaaaagatatgaaccagcgcttcgtacacgccgtagatcgcgtttccaagaaaatttccgccaaggcccagccaactcagcgccagcagaaccagaataccgtaccgctcgtagcgcatcagctgaccgtaggcgctgttgggcaaaaacatcgccagtaccttggacccgtccagcggcggaatggggatcaggttgaaaagccccataccaacggacatgggggccaccgtaaacaggcaccactcaaagaaaacattcatgccctcgctgtacggtgcgtacagatagatcaccttgccgattcccaggaaaaggactgccaaaagcagattggacaccggccccgccagcgccgtgaccgccatgccctgcttgggcttgcggaaataattgggattcaccggcacgggcttggcccaaccgaagcccaccgtaaacatcagcgccagacccagccagtcgatgtggtgcagcggattcagggacagccggtgcatggacttcgccgtggggtctcccagtgccagcgccgccagcccgtgacaggtctcatggaccgtcaggcagaggaacaccgccgctacacggagcaccgcgtcagtcagcgaggaaacatccagcgcctgaaacagattttgcagataatgcagcataaaacgctccaatgaagtcagattctcaccgtctgggcagaatgctccagattcaagttattatagcagtttttccataaaaatacaagggtcaaaccccggcagcccggcggatgcaaaagaacggcggcccttgcgggccgccgagattgtcaataaagtggtaaattctccgcgacggaaaggtagggcagccgttagcggctctgccgctttacggatgctgcataccccttgcgggtaaagagtgtgcgcgggactgcgcccgcaggcgcgtttcggagcgcaaccgccgaaggcggctcttggcgcgtagataacccaagagggggaaacgggcgacgcgccgccagtggcggagaaagcgagcccgtttcgaggaaggctcccggttttcgggcgcaacgcgcacggaaaccggtcaaaccgataccgtattcccccgcaccattgtaatcaattgttttaagagcttttataaagttctgaaaatttgctcagcggggcgaaaagactttttcgccccgctgagcggcggcccgcaagggccgccgccgtttgattcagttttcttccgcgtccgtccggtccacctgccgcagcagctcctccgcggatacgccgaacagcttcgccagcgccagcagattggaggtgctggggtccgccgttccggtctcccacttgctcaccgcctgacggctgacacccaaggactccgccacgaactcctgagtcatcttgcaccggacccggtgctccttcaagacctcccccagcgagcggcgggtctccgccttctcctttcggacctccccggagcggttgtacttccgcagggccttgacgccctgcacggcggcgtagatcacaaacgcgaagatcgccagccgcaccagtgtgaccaccagcagtaaaataagtgatattgacatattgatatcctcctttgctctccggtaccgctttcagcaccatggatctgatgccgtcatgctaccagacaaaggcggttgcggccaccaaatatggcgcaactttccgttgcgcggcctgtttttgcgcctgaacaggctcagtcctgcgtcagaacgccggtgaggtccaagggcttgccgtcggcccacaggcgctccagatcatagaagctccgggcctcggcgctgaacacatggacgcagatgcagccgtaatccaacagcacccaggtaccgtcccggtagccctcccgacgcaggggcttctcccccgcctgctcctccagcagcttctccacagagccgcacagggcgttgatctgggtgttggagctgccggtggcaatgacgaaataatccgccagggtcgtaatgtcggtgatctcaatggcggagatctccttgcccttcttctcatccagggccttggcggccagaatggccagttccttcggtgtcatcatacttttaaaatcctttctgaatgtcttagccgcccatcggcagcggttctccggtcgcagggtccaatccctgattcgcatcgggcgttgcaggttcctccggcggcaccacgatgatgccgggatcttccggctggtccggtgtctccggactgccggtgcccgtctctcccccggtggagccggaggggtctgtggtctccgtccccgtccccggtgtttccggtgtggccggggtctccggcgtgggttcagacggtgtttcagacggcgtctctgttcccggctctgtctcctccggcggcgtcacgatctccccggtgtccgggtcgatcaggttgccgttttcgtcggtaatatagtccttttccggctcatccttcttgccgctgcccatcagagtcggcggcacggcggccttgctgtcctctacatggccggtggtggaactgatgctgccgtcggcattgacggacatgatgtccagatccgacagggtgaatatctccttgaaggggctgagctggttattcacaatgtccagcagcttgccgggaataggcaccacatattccagatagaagtccttgccgagctgcttactgtatgctcgactgtatgccgccgcgcccttgtacggcatagtcatgaagttcacatcgtccatgctcaggccgccggagaaggcctgcttgccgaaccagaggatattctggaagctcaagtccgtctccacggattcctcgaacaccttggcgatcttgccgatattcagcacgtttttcggctgcatcatctccttgatgaccgccttcaggaagttctgctgcaattccatacggcccgcgtctccgacgccgcccttgttatagccgtaagggctgtccttatcgttcttccgccagcggatgacctgcatggcgtcgtcgccgctcaggtgccgcaggcccggcgcctgctcaatgaccagattctgagccgggtcgtggtagtccatgggatagggcacatcgaaatccacgccgccgatggcgtccacgatcttgcccacggcctcccattccaggatcacctgataatccggctcaaagccaaccagctgggagatttctttataaagagccttgatgcccttctccccgccgccgttcatgttgtaaacggagttgatcttcttcacgtcccagttgacgtttaccatggtgtcacggggaatggacatgacgttggccttctggttggtcacatcgtagctggccagcagcatggtgtccgtgttgccgccgcccccggtgtcccggcctaagatcagcacggtgtagtaatccttgctcttccgttcgccgctgacgcggggctgcacgccgtcgccgtagtcgatgccgtcccccgcctgggtgccgtctgcgttggagccgtttccctttccgggcagttccggcttgacgaacaagccgtccagtgccaccacggccaccagcaccactgccaatacgatggccaccgccagcagccacttctgcctctttgtcagacggctgggcttctttgttttcttctgtttggattccttctgttctaaacgctttccaacattttctgccataggtttatctctttcctttcagccagtcgcgcgcctccactgtagcgtggtggacgggatttcccatttccgtcatctcgtcgatggtcatttccagtcccatcaacatccctcgatccagattctcatacacacatgcccgtaaatcgtttacaccgggaaaatcccgggagggctcaatataatccgccagatagatgatcttttccagcagcgtcatgtccgcgtggccggtggtgtgccaccagattgcccggtagatctcatcgtccacgccgaacacctcccgggcgatggccgcgccggtcttagcgtgaagcagcttcagcgccttctgctccagctcgtccaactcgatgccatattgacggcacagggccagctgctccggcatatccagcttcttcgtgcagtcatggagcagcgccgctacacgggccttctccacatccgcgccgtagcgggtcgccaaccggatggcctcctgctccgtccccagcacatgggggatgcgcttgtacttcagatagctgagggccaccggacgcagctgagaaagtgtcaagcttttcaggtttacatccgttccgtacaaatggtttcgcaggatataaccgtacaccgccggcggcagcaggttctcccccgtcccggatgccagccgctcccgcagctccgtggaggagatgtcgatgacgccagggaccgtcagggtaaagatccgggcgtccgggtagagacggtacagcttgtcccgctgggtggaaaactgcggttccatgtccgcctttgttcggccgaaggcggcgatccccgcaagggacgcgatcttctccggctcatgccacgtttcaaagctgaggaacatatccgtccccatcagcagccacaattcatcctccgggaattgcgctttcaactccgccagcgtgtcggaggtaaagctctttcccgcccggcgcacctccatatccagcgtttccaccttgctcccaaggcccagctgctcccccgccatgcgggtcatttccagccgctgctccgccgtggcgctgcctgcgggcaggtccttgtggggcgggatgctggcggggatcagcagcagcttgtccagtttcagcgtggcgatcacggccgcagccgccgtcagatgccccagatggggcgggttgaaggttcctccgtaaataccgattttcaagaaaattccatctcctgtttcaacgcgatcccgcttacgcctgccgcttttttgacggcttcaccagctggatacgcttctctctgggcttgctgtggctctcccggtacagcacgaacttggtgccgatcacctgcaccacctcgctgcgggtggcctttgccagctcctgcgccgcgagacgggcgtcatactcgatattgttctccaaaacccggcccttgatgagttcccgggcctccagcgcatcgtcggtctgcttgacgaggttctccccgatgccatccttgccgatgtggatgatggtgtcgatggtgttggccagccctcgcagctgggctctctgtttgcttgtcagttccatataattcctttcgatcgttcgtttctgatagttcagtccatcttaccagaagccgccggcttcccggctttttctattagacggttatttcttcaaataagtttccaatttcgcggtaaatttccggagggccttgccacggtgggagatctccgccttttcctcttgggtcatctgtgcaaaggtctttgccttgtcaggcacgaagaatacggggtcatagccgaaaccgccctcccccatgggggcaaaagcgatggtgccgggggcctgcccctcggcggtgatggtgtccccattggggaaggcacaggcaatggcgcaggtaaaatgagccgcacgggtggtctgcccccgcatagtttgcagcagcagcatataccgtcccctgtcatccagcccctcgccgccgtaccgggcggagtacacaccggggccgccgttgagggcgtccacgcacaggccggaatcgtcagcgatggcgggcagcttcgccagctcgcagatagccttggccttcagcatggcattctccgcgaaggtgctcccggtctcctccacgtccacggtgatccccagttccttgggacttactacctccacaccgaactggcccagaatggcccccatttcccggatcttattgggattatgggtcgctaatacaaatttcatcacagtgctcctcccagcgcttccttctgaattttcagcagttcccggttgcccttggcgcacagccgcaccagttcctgctgctccgtcagggtgaaggcacggccctcgccggtgccctgcaattcaatgatctcgcccagctcgttcatcacgcagttcagatccacctgcgcccggctgtcctcgctgtattggaggtccagcaatgcctgctcgtccacgatgccggcagacacgccggtgacaaagtggcggatgggcgtggagcccagatagccctcctccaccagcttccggcaggccagggccagggccacaaagccgccggtaacggaggcggtgcgggtaccgccgtccccctgcagaacatcgcagtcgatgttgatggtccgctcacccagggccttcatatccaccgctgcccgcaggctgcggcccaccagccgctggatctcagcgctgcgggggctgagcttcagcttggagatgtcccgcttgctccgctcccggttggccctgggcagcatggaatactccgccgtgacccagccctcgccctctgccacatggggcggggtcttttcttcaatgctggcgcagcaaagcaccttggtatcgccgcactcgatgaggcagctcccctccgggaacttcacaaaatccgtggtgatcttaatggggcgcagctcatcatacgcccgtccatcctgtctggtcatagtcattcctcatttcaaaattcccgtgaagtagatcaaaacaccttcacgctgtcagataattgcctccacataggagcgtacatcgaaaggcttcagatcgtcgatcccctcgccgactcccgcaaacttcacaggtacgcccagctcccgggcgatggcgatgacgatgccgcccttggcggtgccgtccagcttcgtcaggacgatgcccgtcagtcccgccgtctccttgaaggtccgggcctggatcaggccgttctggccagtggtggcgtccagcaccagcagcgtctcccggtcacatccgggacactcccggtcgatgatcttggacagtttcgccagctccgccatcagatttgccttgttgtggagccgtccggcggtgtcgcacagcaccacatccacgttccgggccttagcagcctgaagtgcgtcgaacagtacggcgccggggtccgcgccctcgtactgccggacgatctcgcatccggcccgctctgcccagatctccaactggtcggcggcggcggcgcggaaggtatcggcggcgcacagcatcacccgtttgccctgctttttcaggctggcggcgatctttccgatggaggtggtcttgcccacaccgttgacgccgatgaagatgcagacgctgggcttcgtgtccagcttcattgcggtgtctcccacctccatctccgccatcaggatctcccgcaggccctcccggacggcctcctggctttgcagatgctctttacgaaccttggtgcgcagcttctccacggcgtccgtggcagcgtccacgccaagatctgccatgatgagggtttcctccaattcttcaaaaaagtcctcgtccgcctccgtaaacccagagaacagattgctggtgatttttttcagcttgtcaaaaaagcccattgtaaactccttttttcatgcggtttcccgcattttttgaaccttcatttcctgctcctacggagggatgtagcgaaccgccgcagggatgcagcaaggtgccgctttgcggctctggaaggcatggtgataccatgcaagattgaatccccattttcttttcctcttgcggaaaagaaaacggccattcatggtcaaaagaaaagacgctgagggatgatttgacacctctgtgtcaaatcacccgaaacgggggctgcccgtcacgcactgccgactaaattcggaagcctcctgccggctgcgctatactcaaatctcaaatcagtacgtccccgcaccagaaagtccgccgcataccggtgttccaaacaggacactctctgcccctctttccgctgccgctcgcatgtagcaccaggtagtgcgtagcgaagcggaacgcacgggactgttgcagaaagtctttcaggtttgcagcccggtaaatgccctgcttccaaatgtggggaagcactcggctctttgcggactttcagcgcagccggcagaaggtttccggattttggcggcagtccgtaccgactgctccttcgtatgggtgagttggccgcttcgacggtcaactcatccctgacattttttcttttccaccgtgcacggcgcattttctttttgatgtctcaaaaagaaaatggggggtgcatcctctgtggaccacagtctctgcgggagcagagaaactattgaatcttcaattccttcgccatatcgttcagattgatggtcaagatcttactgaccccctgctcctgcatggtgacgccatacagcacgtcggcggcctccatggtgccccggcggtgggtgatgacgatgaactgggtcttatccgccagcgtccgcatataacgggccgtgcgaaccacgttggcctcgtccagcgccgcctcgatctcgtccataatgcagaacggggtggggtgcaccttcaaaatggcgaaatataacgcaatggccacgaacgccttctcaccgccggagagcagcgaaatggttttcagggccttaccggggggctgggccttgatctcgatgccgcagtccagaatgtgctccgggtcctccagttccagcttggcctgaccgccgccgaacagctccacaaaggtctgttcaaagctttcgctgagcaatttgaactgctggccgaaaatgtcagtcatctgggaggtgatctccccgatgatgccggtcagctcgcccttggctttttccacgtcgttccgctgatctgtcagatacgtataccggccattgacccgctcaaactcgtcgatggcgcctacgttgatggtgccgagaccgttgatctcccgcttcagctccgctacccggcgggacgccttgggcacgctttccagctcgatccgctgggcctgggcatcggaatggttcagctcgtaggtctcccacagcttgtccaagatctgcttttcctccatggcggaggtggttagcttcgtttccagtctgctggcagcccgttccagattcaggagcgtttcgttcatctcctgaccggcgcggctcttggcggtgcgttccgcctccagtgcgatcttttcctgactgatccccgccagccgctccgagatcacggcgctctgtgccttcagctgtgcctgttccgctctccgctggccgatctcggtctgagccgcctcaatctgccgctgatactgggccaaggccgcttccttctggtttcggtcaccggacagctccgctgccagcgttcgcagatcggcggcacggcgcagcgccccctcccggttggcgtcgatggcggccagctccgccttgtgggcggcgatagcctcagacagctgcccggactgggccagcagctcgctctgcccggataggatggcctccgcctgtacgcggcagcttgccgcctcaccttcccggtccgccacggtctgctctgccgccgcgtttcggacctcgttttcctgaatacggccgtcgatggcctcgatctcaccggcgagattttccacgctttcccgcaaattggaaagcagcatatcaaactgattcttcacgccctgcagccgcaggacctcgtcctcggcggcacggcgctgggtctcggcggtggccagctcgtactgagccgcgtccagctcccggcgggaggcttcctccgcgaccttggcctcctccagcttccggtgcatctccgatgcccggccattcagccgttccagctccgccgcccggctcagcacaccggcgctgcggctggtggagccgccggtcatggagccgccccggttgatgacctgtccgtccagcgtcacgatgcgaaaggcgttgcggtacttccgggccatggcaatgccgcaatccagatcctccgcaatcaccgtttttcccagaaggctgttaaaaatttgcgtatacttagggtcgaagcgcaccaaccgggacgccacgcccacaaaaccgaactcgttctccacgccccgctcccggagttcctctccccggatagcggtgaggggcaggaaggtggcacggccgccctcccgctgcttcaggaaggcgatggcgctcttggcgtcctcctcccggtccactacgatgttctgcaaaccggcacccaaagcgatctcgatggcaagggaatacttgccgtcggtcttcatcagacccgccaccgggccgtggatgccccggaggttgttctgggcctgacagaccagcttgacagccttgttgaagccctcgtagtccttttccatttccgtcagcagacggatgcggttatccagcgcgcccacatccatggtgagcttcactctggcttcggcagcggcgtcggccttcttcttccgctcctccatccgcagggtatgtccgctgataatgttggcggcagcctccgcatcctcttgtgcgtcctccaaggcccggcggttggcttttgcctcccgcccctgttcctctaactgacgctccgcggtctccttatccgccagcgccgccatgcggcgggatctgatctgctccgtctccgcccggatggcagcggcctccgcacgggcgtctgcggcagcggcaatggcgatggcctctttacctcggaaagcctctgcctccgcggcggcgcctcccgcctgctccgacgcagcctgagcctgagccagcagcttgtccagttccgcattcagtgcggcggcctgctgctccaactctgtcgcttgggcgtcctgttccgctgcctggacctcatagctcccggtgcggctctctgattcctccagttcgctttttgctcgttcaatattctccgttagatggctgatggtgctttccagcaccgccacggcggaatcctgctccgctgtccgggcgtccagctgggcggcttcagtccgcagaccctccgcctccatgtccttttcctgcatccgctggccaaactgctcgttttccgcgaacagtgcgtccatgcgggaccgggcctcgtcccgttcctgttccgcgttccgtaggtcgatctccagcttccgggcgttggccttcagcgcttccagattttccagccacagggagatctccaacaggcgcatctcgtcccggaggaccagatattttttcgctgtctccgcctgcatccgcagcggctctacctgaagctccagctccgcgatcttatcgttgatccgcaccagattttcctctgtgcgttccagcttccgctccgcctcttccttccggtggcggtacttggaaatacctgccgcctcctcgaagatctcccggcggtccgtgctcttggtggagaggatctcatccacccggccctgacctacgatggaataaccctcccggcccataccggtatccataaacagctccgtcatgtccttcaggcggacggactggcggttgatgtaatactcgctctctccgctgcggtaataccgccgggtgacggccacctcagactcgtccatagatgggaacagatgaccggtgttgtccagcaccagcgtcacctgagcaaagcccaccggggcgcgtttttccgtgccgccgaagatcacgtcctccattttgccgccccggagggccttgctggactgctcgcccatgacccagcggatggcgtcggaaatgttggacttgccggagccgttaggccccacgatggctgtaatatcctcaccgaagttcaggaccgtcttatcagggaaggatttgaagccctgcacctccagtgcttttaagtacatctatgtctcacctcgatctacacccatatactttaaacatactttaactaagatactataccagaaaagcgcacttatttcaataggaaaacgaggggtgtcaccccctcgtttcgtccattttccgatagagccagtccaatccttcccgcaatccgcccagctggtcgatgatccccagatgcaccgcctcctcaccgtagatcacgctgcccacatccgccgccatgtcatcctttgccagcatgagggcctgaaacttctccgccgagatccggctgtgtcccgccacaaaggccacgatccgctcctgaagccgctgaaaatagttgtaggtctggggcgcagcgatgaccgttccgctcatccgcacgggatggatggtcatggcggcggagggcaccgcaaagctccgttgggctgccaccgccaatgggacgccaatggaatggctgccccctaaaacgatggccgccgtgggcttggtcagtccggcgattagctccgcgatggccagtcccgcctccacatcaccgcccacagtgttcagcagaaataaaataccgtctacctcccggctctcctccagcttcgccagcaggggcagcatgtgctcatactgggtggttttcgtaccgttgggcgccgccgtgtgcccctcgatctgtccgatgatggccagcgtataaacggttccgtgggcggtttttgtcatggcggagccgaaatctactacattctggttcacctgactcccttcccgctcctccgtcgcctttgtctccttgtccttctccattgcgatccctcactttccctgttagtctccgcaggaaagcgtcggcctatgcgccggaacgaaaaagagagccgcagagataaaatctctgcggctcttttggaaatcaatgtgtgtttttcgtctgaaaatcaggcagccttgggcatcatctcggcagtggggatcaccttcatgcagaagttggccaggaactccgccacgttgtagcgaggtgccgcagcgcgaggcgtcagggtcttttcagccgccagaacgccggagccgacagcccactgcatcgcggggatggcatactcaccaacctcacccacgtcctcgaaggagagaatattggtatcctcgcccacagacacatcatagcccatgaactgtgcgtagcgatacagaatggtcaggaactgctgacgggaaatggcctgtgccggggcaaaggtcgtctcggtgatgccgttggtcagcttgttctcagccgcccaggcgatggccttgacgaagggagaggtagcggccacatcgccgaagggattggcgttcttgggctcgggagagccgttcatccgccacagcaccgtgaccatctggccccgggtgatggtgttgttgggcatgaacatcgtatccgtgacgcccttgaagatattgttctcatagcagtacttcaccgcgctgtaataggcggcggaaggatccacatccgtaaagggcaggcccttgatgatggtgatgcggtcaccggcctcgccgtaattctcagcggacacaacgcccttcagctcggtcttaacataatccatcacgacctcgtccatggggatacccagatcgtagttgacggaagcggtcttgaaggcgtaataggtatcgccgccggcagccaggaagtcattggtagcaatggtgtagaccgttctgaggttgaaggccttgccgccaacggactggatcgtaacacggcggatggtcttgggcgcgtggtaggtggagccttcatacacatcgcccgcgtcataggtcttggtgccgtcaatggtgtagacgatgccactgacctgggggaagccgccgatggaatccggcgtgcagtaggtcgaagcctccagagcctccagcagctccgcgccggtgaccttcacgatgctcagtgtattgccgaagggcagcacggtgttgatgtccttcttggtaatatcgcccttcttgatggtggcccggatgccgccgccgttggtgacagccgcgtccaccttggtgccgttcttgcctgcgccccaaaccagcgcatcggtgatgaggtcacccagattggtctcgtgggtccggacattggccttcacgccgtccagctccaccttggtcttggcgaacacggtgccgtagtcgtcgtcgatttccttcttgatggcggcagctctggcagccacgtccttatcctcggcagtcatgccctcggtaggagcgctcatagccgtgaccttgcccttggggctgatggtcacaacgccaacgctggccagcttggtgccggtggacgtgaggagggtgccgttgaccttgccgtccttgtcggtcacttcggcaatgtccttcatggtggagtgggagtgtccgtcaatgaacacgtcgataccgtccacaacattcagcaggtccgtggaacggttgccaatggattccttgtcgatgcccagatggcccaggcagatgatgtaatcgcagccgtccgccttcagggagtccacctgcgcctgtgcgcagtcaaacatggacttgtcgcccagaatggtcacgcccttgatcttagcggggtgtgccttggttgcggtctcgggggtctccagaccgaacacgccgatcttgacgccggacggcgtagtgaagatctggttggagttgaatgccaccttcccctgatagagcacgttggctgccacaatggggaacttggcttccttggagagattcaccagattgtcatagccgtagtcgaactcgtggttgccaagggtcgtgacgtcatacccggccatgttcatcagttcaacagccgttttaccctgagaaatgctgaccgtgggatcgccctgacagaagtcgccggcgtccatcagcaggacataggcaccctcagcctcataggctttcttcaaggccgccaccttggcatagccggaaatagcgccgtgcacatcgttggtgtgcagcactactacatagccgtccatctcgcccttggtctcgtccgcagagactgtgaccgtcagggagaagatcatagccaatgccagcagcacagacaggaacttcttcattcgcaaagacctcctttttatttagggcggtacaatttgcaagcgaaccccgccctgctatgtccaaattataccatatcgacctttggttgcaactacttatttgtaaatttttgtgttttatccggtcaattctccgtcagctctcccccattgtccctctggtttttttcggaaaaccgtgctatactgacggcagaatctaatctggaggtgctttatatgcgtacgctgttcaagggcggtaccgtcatcaccggccgggggcccaagcgggctgacgtgctggtggagggtgaaaaggtcaggcaggtgggccgtctgatcctcactccggcagaccggacggtggatgtggagggctgtctcctgttccccggctttattgacgcccacacccactttgatctggacgtctgcaacaccaccacggcggacgatttcaccaccggcagccgtgcggccctgaagggcggcaccaccaccgtcatcgacttcgcctgccccaacaagggggagagtctgcaatacggtctggatctctggcataagaaagcagacggccgcaccttctgcgactacggcttccacatgaccatcgacgattggaacgaatccatccgggcggagctgccggagatgttccgtcagggcgtgtcctccttcaagatgtatatgacttaccccgccatgatggtgggtgaccgggatatgtactgggccttgaaggagctgcggcacctgggcggtatctgcggtgtccactgtgagaacgccggtgtcatcgatggtatgatcgctgagaaaaaggccgccgggctgatgggtccctccagtcatccggagacccgtcctccctatctggaggccgagtccgtcagccgccttctgcggatcgcccaggcggcggactgcccggtggtcatcgtccacctgaccaacgaggaagccctcaaggaggtggagcacgcccggaagcggggccagaaggtctatgtggagacctgtccccagtatcttctgctggacgaaagcgtttattacgctcccgactactctcaggcggcccggtacatctgcgcaccccccatccgggaaaaggccaatcaggaggttctgtggcggggcctgcgccggggcgagatccagacaatctccaccgaccactgctccttcacgctggcacagaaggacgcgggccgggaggacttcaccaagatccccggcggtctccccggtgtggagacccgaggcgagttgatctattcctacggcgtggccgccaagaagctctctctggcccagatgtgccgggtgctgagtgagaaccccgccaagctgtacggtctctatccccgcaagggcgttctggcccccggcagcgatgccgacatcgtgatctacgatcccggtgacagccatgtgatccgtgcggaggactgcgtcgccaacgtggactacaacccctacgagggctttgtcaccgcaggcggcatccgggaggtctggctccgtggccgcaagaccgtggagaacggcaaggtgctggacaccgtcccggcaggcatgtatctggcccgtggaaaatgcaatctgtaacatcattcctgtaaaggattatcgctttatatcatgttgatttcaacagttttcgtttatttttgcaaaaaatcccgcagttcgtcccgtgtttcccacgattgcatttcttttttttctttgccataatacggctgttgaagagaccgccagacggttttctttccttgaaattcagcggatcatccaaaagcaggggcggtggaccgcccctgtttcaccgcggggaggtattgtatgcactacggtgagatcaaaaactgcgatattgccaatggcgagggcgtccgggtcacgctgttcgtctccggctgcaccaaccactgtgagcactgctttcagccccagacgtgggactttgactatggtcagcccttcacatcagaaacagagcagcagcttttagacctgctggccccctcttacattcagggactgaccctgctgggcggcgagcccttcgaaccggaaaatcaacgggtactggtcccctttgtccgccgggtgcgggaaacctacccgcaaaagaccgtgtgggccttctccgggttcacactggaggagctgcggaccgagggcagccatcctcggtgcgaggtgacggatgagctgctgtccatgctggacgtgctggtggacggccgctttgtggaggcgttgaaggacatctccctgcggttccgagggtccagcaatcaacgactcatcgacatgaaaaaaacactggcatcaggcgagatcgtcctgctgccagatctggaccggaaacccggtcaagcataaggaggaatcatcccatcatggtaactatggcacagaggatcgaagcacttcggacggaaaagggcctcagccgccccgcgctggcggcggcgctgggactgccccgcctgtccatcgaaaagtttgaaaccggccgccagacgccctctcaggagcagcagcaaaagctggcaggggccttcggcgtgtccctcccctatctccggggcgagaccgacgatcccaccagtatggacaactggctcagcggtgccgtcccccaggaggacgtagtgctgcccaaggccgtccggaaggcaacagccgcagtggtggcccagtccggcgacagcagcaggagcgacggcgccgtgttcagcgccctgctgaaaagcgactccttcaaggcgttggtgcgggagaccgtactggacgtcttaaaatcccccgaaggacaggccctgttggcaaaagccgccaaaaagtaaaaaaacagccccgaatctgcctgcaaacagattcggggccgtttttattcctctttcagaaaccgctccgcggcttggaccgtattgctgagataccggatgacctccaccggccactttcccaccgccgtttctccggtgaccatcaccgcagcagcgccgtctgccacagcgttgaaaatatcgctgacctccgcccgggtgggcaccggattctgctccatggacgccagcatctgcgtcaccaccatgaagggcttccccgccttgcggcactgggcctcgatccgcttctgggccgccggcagctcccacaggggcatggcgttccccagatcccctctggcaatgacgatctcatccgccgtttccagaaattccgggagccgttccagccccatctggttttcgatcttggcgaacagccggatattcgctccgccgttttcgtccaacgcctgccggacggtttccagatcccgtcggctgcgcacaaagggctgcataacgccggtgacgccgcaggacgccgcaatgcggatattctccacatcggatgccgtcatcgtcggcggttccagatccgctcccggcagagccagactctttcgtccccacagaacgccgcctcgaaggacctctgccaccgcgccgctctcagtctgctccgtgacccgcagcagcagcttgccgtcatccaaaagcacctcctggccgggcaatagcgcaggaatcgcaatctccggcaagggaattcccttgccgcccaattcaactttttcaccttcatgcagcgtcatcggctccgccaatacgcctacccgcagctccggtccctgcatatcaatgagcagctccgcctgctttccgcagcgctgcgccgccttatgcagtgcatccacctgatccgccgcctgagccagcgtcacatgggagaggttcagccggatgccggtcatcccggcccggaacatggcttccagcgtctccacgtccgcacaggccggtccgatggtcccgtagatctgccgtgcggagggctgttctttcattgcggtcataatgcctcctcaatgtttttttccaatataccacattccgccccaaaaaggaagccttggcagctctatccccaagtggcttgtgcatctgtctaaacttgtccgctatttttgactatttcggagaattttcagattcttcttgaccttctccgtgaatcttgttaatctaatgtcgtaaacgtttgcacatgttgtgtttttcgtctgtgctacccttttattttgtggtccgcagacttgctccaagctcttccctaccgaaaattttgcagaaaaaggagttaatgaatacatgcaaggtatcccgctgaatgaacgcaagcgtctgggggcgctgttagatgaccggccgcagacggaggtcatggccatgatcccccagttttcccaggcggagactgataactttgtcgcgccgcccgcacagatcccggaggccctgggcgtcctgatgttcaacatggaacggggcgtgaacctgccggaaattcaggaatttctgcgggattgcccggatattcagccctttgacgtgatcctggccaacgagctggatgacggctgcgcccgctccggcaacaagaacaccgcccgtgaactggcacaggcgtttggtttgaactacgcctgggggcttgagttcattgagctggtgaatgatgaaaacgccaagggtttccatggcaacgctgttttctcccgctggcccatccgccgcgccggtgtgatccgcctgcctgaacagtataactggtacttcgaccgtcagaagcgcatcggcggacggctggccgtctttgcggagctggacgtaggcggacaaccggtgggcgctgtgtccatccacttggaaaaccgcacccacggcgagggccgcaaggcccagatggccgccattctggaggccgtccgcaaggagctgcctgatatgcccctgatcttaggcggcgatctgaacaccaacaccttcgacggccgggccaaggaggacatcggcgccatcgcggccgatcccgctctgcgccgccgctgcttagaggatgtgggcagctttgagcctctgctgcccctgtgcgctgccgacggctacgagatcgttccgaaggagccccgtctcacccgccgcaagcccctgcccaacggcgattccctgcccctgcgtctggactggatcctactgaagggcgtcaccgcgtcggaaagccggatgatctccaccgccaaggaggatctcacctatgccaagcccggctccgctctggaacgctttcagggggcagagctgtcggaccacaatgccgtctgggccatgtgccgccttcgctgattttttctgcaaaagtgagctttttccctcgaaaaacacgtttcaagctgcaaaaaagctccgtgtccatggacacggagctttttatgttgcggaaagtcttgcttacttcagctcgaccttgccgccggcctcttcgatctgcttcttcagagcctcggcctcgtccttgctgacagcttccttcagagtggaaggagcgccctcgacggtagccttggcctcagccaggccctggccggtgatctcgcgaacaaccttgatgaccttgatcttggcagcggcatcgaagccggtcagaaccacgtcaaagtcggtcttctcctcagcagcgggagcagcagcgccagcagcgggagcagccatagcggcggcggaaacaccaaactcttcctccagagcgtgaaccagctcggacagttccagaacagtgagacccttgatctcttcgatcatagcggtaactttctcagacattgtattagcctcctaatagttatttttgtttgtgtgggtgttgtggctgaataaattattcagcggcgggagcttcagcagcggcttcctcggcgggagcaccctgcttttcggcgatctgcttcagcacgacagccagaccggtaatgggagccagcatggtacccagaacctgagcctgcagaacgggcagagcgggaatggcagccagagagttgatggtggccagatccacgggcttgccgtccatgaagccgcccttgatctcgaacttgccgtccagcttcttggcatagtcggccatgacgcgggcaggagccacgggatcatcagccagagccagagaagtggtgccattcagcagatcatccagatcgttcaggccagtgttgttgaaagcaaagcgcagcagggtgttcttcacaaccgcataatccacgccgccctcacggcactccttacgcagagcggtgtcttcctcaacggtaatacccttgtagtcgacgatgacgcctgcggtagccttctggatcttctcggtcagctcggcaacgattgcctgcttctcggaaaggacctttgcgttaggcatacttggtttcacctccatgagaatttgcggcggacctccgtccgcctgggtcagaggcgttcaaaaaggaactgtcctcatgccgaaagacatgaggacagaaaagcatcatcaaaatgattttgccatcctcggcaggacttacggggtctcccccacctgctgtctttggaacgcgactgttattatatcaaactttggtataatgtcaagcattttcccaaaatttaatatcattttccgttttcgcggaaggaacatctccgttccctccgttcagcgggattgaaagggggatctctcccctctttcggctcttagaccagctttgcagtgttcatcttcacgccggggcccatggtagtggcggcgacgcagctcttgatatactggcccttggcgctggcgggcttagccttcacaatggcgcccatcagagcgttgtagttgtccatcagcttctcggggccgaaggaaaccttaccgatggggcagtggatgatgttggtcttgtccagacgatactcaatcttaccggccttggactcctgaacggccttggccacatcgggggtcacggtgccggccttgggagagggcatcagacccttggggcccagcaccttaccgagacggccaaccacgcccatcatgtcggggctggcgatgaccacgtcgaaatcaaaccagttttccttctggatcttctccaccatgtccatatcgcccacatagtcagcgccggcctcacgggcagcgtcagccttgtcgcccttggcgaacaccagcacgcggacagtcttgccggtgccgtggggcagcacgatggcgccgcggacctgctggtcagcgtgacgggagtcaacgcccagcttcacgtggagctcgacggtctcgtcgaacttggccttggcggtcttgcagatgaggtccatgccctcagcggcttcatactgagcgctcttatcgatcagcttggcgctctcctgatatttcttgcctctaaacaatgttattcctcctcatagtggttcttcggaacttagtcctcccactgtatcgagcggtctttgaccgctcggctgttgtgaccatcaattgacacgggcgaatacggttttggcgggcagaaatccccccatgcttccgcagagcccttggcaatacaccctgtattccctgcgggctttttgtcacctggacgcatttctgctccggcaaaactgcccgcacctgtcagcgatggatattcgagtgatttttgacttttgagatgatgacgagctgacgcccgtcaaggcgaaaagggcaaaaagcgccggaaagacgcactgacaggcgtgtttgcccttgttaattgatggtctgttagtcgccgaccacaacgcccatagaacgggcggtaccagcgatcatgctcatagcggcctccaggctgccggcgttcaggtcacgcatcttcatctcggcgatcttctgaacggaggccttggagatggtagcgaccttagtcttgttggggacgccggaaccggactcgatgttgcactccttcttgatcaggacggccgcggggggcgtcttggtgatgaaggagaaggaacggtcagcgtacacggtgatgacaacgggaatgatgagacccatgtcattcttggtgcgctcgttgaattccttcgtgaaagcagcgatgttcacgccatgctggcccagagcggggccaaccgggggagcgggagtcgccttgcctgcggggatctgcagttttacataaccagtaatcttctgtgccacggagtagcacctcctaaatcatagatgtggtggcggacgatgtccgtctttggcggggccaatggcccctcccactgtttgccgggaatcccggcgggaaaaatcagttcaggacttccacctgatccagttccagttccacgggggtctcacgaccgaacatggaaaccatgacgctgacctgattcttttcgggttcgatgtcttccacaacgccagtgaagctggccaaggggccatccacgatacgaacatggtcgccgacgttgtagcccacgacgatctcgtgcttttccatgcccatggcaagcacctcttcctccgtcagggggatgggcttgttggcagtaccgacaaaaccggtgacgccgcggacattccgcaccagatgccaggtgtcatccgtcatgaccattttgataagcacataaccggggaacaccttgcgctcgacttctttcgcctcgccggactcgctgacctcttttacggtctccacggggatctccatccgcaggatcatatcctccatgccccgtccgttgacgaatttctcaatgctggtcttaacggcgttttcataaccggaataggtatggatcacataccacttcgcgttttccgacattgcggcactccttaaccctgaaacaggctcaggatcgcctggatcaaagagtaggccacgccgtcaaagatccagatgcacgcgccgatgagcagggagcacagcagcacggtaccggtgttcttgaccacggtcttctgattgggccaggtgacttttttcaattcgcttttcatttcgcggaaccaggctccgcggctcttcttcgcttcttctgccataattctacacgccctttctcagtgtgatccgcttttacttggtctcgctgtggagcgtgtgcttcttgcagaaccggcaatacttgttgagctcgagcttgtccggggtattcttcttgttcttcatcgtattgtagtttctctgcttgcactcattgcatctcaaagtgacttttacgcgcattaacggcacctccttattattggtatcgttcccggcgtgccggggataccgactgcctccctgcggttttgaaagcggccttcctctgtgcgtaaagcgaaaaaacgcacaacaaaaaagccctttttcacaggtaatgctgattttagcacagaacccccccgccgtcaatccttttttgcgaaaaattgtagaaataccgattttttcctttgcaggcgattttactggaaagctgcggattttatccgtcagattttgccgctttttccgttgattcccggcggaatccgcattataatgagaaaaaattttcagattgcgaggaagcccccatgagatatgaccgtgtttataatttttccgccggacctgctatgatgccggagtccgttctggaggagatcgccgccgaagtgctgaactatcacggcagcggtatgagcgttatggagatgagccaccgctcccctgtgttccaggagatcctgtctcaggcagaagccgatctgcggacgctgatgcacattcctgataactataaggtgctctttgttcagggcggcggtacggtgcagtttgccatggttcccatgaacctgatgaaaaacggcgtggcctgctatgtggagaccggcgcctggagcaaaaaggccatagccgaggccaagcggtacggtgaagtcaaaatcgtcgcctcctccgccgataagaacttctcctatctccccgactgctccgatctggacatcccggacaacgccgattacgtctacatctgcgaaaatgagaccatcaacggcaccgcctaccacacgctgcccgacaccaagggcaaggttctggtggcggaccagtcctccctgttcctctcccgcccctgtgacgtcagcaagtacggtctgatctgggccggcgtccagaagaacgtcggccccgccggcatggccattgtcatcatccgggaggacctgatccgggaggatctgccggaattcgtccccacctatctccgctacaagacccacgctgacgccgactccctttataatacccccaactgctggtccatctactgctgcggcaaagtgttccaatacctgctggccaacggcggattggaggccatggcacagcgtaacgaagaaaaggccgccgttctgtacgatttcctggaccggagccaattcttcactgccgctgtccggaaggaggaccgctccctgatgaacgttcccttcttctccccctccaaggagcaggatgccgaggtggcggcctccgccaaggccgccgggttcgacaacctgaagggccacaagagcgtgggcggtctccgggcttccatctacaacgccatgcccaaggagggcgtggaggcgctggtggacttcctgaaaaagtacgaggcggagcatacctgaccgaaccgagaaaaaatcaaccgaaaggatgctgaccgtgaaaaaggccgttttaaagatcctcctcacctttgcgatcctgagtgcgatctgctgcgccttttggcagttgggatggctgacgtccgccagcgaagctgcgataatgttcgccataaccggtggggtcatcgccatcgactttgcttggaccttcctccgaaagaaaatacagaaccgaacataaaaattcccgccatcggcgggaatttttttacagttcttccgttgtcaagacgcgttccagctcttcccggtcggtcagcaggttcagcgcctccagcatcccgttggcggtcaggtgctccggcagatccagccgtcggagcagcgcctgccgccgctgactgctgcccgctcctccggccagcccccattccatcaggtctgccttggtgatgggcgttttttccgccgccggctccgccgctttgtctaaaaacgtggcgcccgcccgacggagggcctccaaaatcacctccggcttcatgccctctactcccagctttccctccttgccgggggcccgcttccgcttttccttgccgtggatgtccgggatgtatgcctgtttcacctgctccttgggcagcgcccccttcaggtagttgcggatcacaaaaccagcgccgtcgctgtccgtcaggacgatcagtccccgctccgccgccaagcgccggagaaaggcaaccttctccttgtcattgaacacggcgaagccgcccagcgtcaccaccgtggcgtccaccacctgtgccagcgtattcttatcgtagcgcccctccactacgatgacttccttgatctttctcattttcgggccgctcctaaccgggccagcagcagcttcagttcctccgccgggtctacgccccgctggctcttcatccgcagatccaccacctgacacattttcaccgcgtcgccgcaccactgggcgctgacccgcttggcggactgcaaaaggagcttggcgggataatccgaccgcatctcccacagctccatgagccagtatttgtccttgccgctgtcgatggccattctggccgtgtacagccgccgaagctggctccccagtgccgccaggatcacgatgggttcctcctgcattttcagcaggtcccccaagatggcggcggccttgttgtagtcgctctgggacaccgcatccgtcattttgaagatctccgccgacagcaccgggtctgccaccgcgtcaatgtcccgctgggtgatgacttcccccttggcgtaggccccgatcttggcgatctcctgagaaagccccgtcatcagtccgccgcagaggaagatgagatactccgccgtctggcggtcgatctgcttccccagcgcccggaaccgccgtgcgatccacgccgtcaggtccgaggtgtcctgcgccttgaactcaatgggcgtcacatgaccgtccatggccttgcacagcttcttcatggtcttgttctgcttgtacgccaccgtatcgtacacaaacacgatgcagcagtactccggcagatcctccagcagggcgatgaaccgctcccgctgatcctcgttcagcttgtagatatcccagtccgtcaccacgatcagcgtccgctccgccatcataggcatagcctccgccatttccgtcaggctctgggccgtcaggtccttgccttccagagcgtgatagttgaattcctcaaatccggcggggatcagcgttttccggagctcccccaggtagtattcccgaagatagctctcctctccgtaaaagaggtaggcgttccccagagggttcccctctttcagatctgttttcagtttttgataggcttcgttcttcgcggttttttttgcgtatgccatgatgtgctcctaatcaaatgatagatagaccgtcccgtggcggtccgtccggtaaatatcgcagcctgcccgggccagccgccgcagggtatcctccgccgggtgcccgtaggaattgcttcccacgctgatgatgaccgtccccggtgtcaccgcgtccagcagttccttcgatgtagagttcttggatccatgatgccccgccatgagaacatccagctccggcagctcatatgtctcgatcagcttcttttccgtggcccgctccatgtcgccggtgatgaggaagtcatgctcccccgccgaagccagcacagtgagccccagttcgttgctcccgctgacgcccacgggcgggaaaatggtcaattctccatccccaaagggcagatgggtctcctcggtcacagtctccacgtccatgccgtaccgctccgccagttccagcagccggtccagcgccgcgccgccctccgctttcgggatcgtcagggtctccgcgcccatccgggccaataaatgctccacgccgttgatgtggtcatcgtcgaaatgggtcaaaatcacccggtccacccggcggcagcccatagtcagcagctcgtccgccgtgtcgcatccggcgtcccgccagttgtttccgctgccgcagtccactaaggcggtctccgtcccggatctcaaaatgacgctttgtccctgtcccacgtccaccgccgcggcgttcagccggtgacagaaccggctctcccccgcccgcaccgtcaccgccagcgtcaggacgctcagcgcggcggccacggcaaattttcgccgacccttgggctttagcagccacgcggcagcaaacaggagatacacgaaccccatccagtatttcagatagggattgcagaaatacacgccgtgatacggcagagctgccagtacgtgacacacggccagaatatacttgatcagcagccgtggcacaaggccgatcaccgtccccagcggcaggcagaaaaagctgagaagcactgccgccagcccgccgatgaacacgatccccactgcccacaggcacagcaggttgctcaaaagggacaccggggcgaaactgccgaaatagtaggcgctgataggcgccgtcagttccagacacccgaaggttgtcgaaatactaacagttgtaaaggtaaagagcctgccatgctttttctctcctgccagcccccggtagagcttaggagacagccacagcagccccgccaccgccccgaaggacagctgcaggctgacagatttgaccgcaaatggattgttcaccaaaatcagaaacagcgccgccagcattgctgtaggcgggtcgctctcccggcgaaacaggggcgccgccgtcagaaagctcagcatcacgcaggcccgcaccaccgagggagacccgccggtgagcaccgcgtagaagatcagcgtggggatggctgccgccgccgtcagacgccgccggtgctttcccgctagaaaacccaccatcgccagcagatacgcgcagtgcatcccgctgactgccagaatgtgatagacccccgcctcggacagatccacgtccgcctgaacggacagttcacctttccggcccgtcagcagcgccagcagaaaaccggcgtcgtccccagaaaataagtcccggatgcgcgcctgcatgacccggcccaaccgggcgggccaccaccggggcgcgtccaccgtcccggcatggaaggccaccgtccccctgctgtacgccaggagaaacacgcccttggagttgaataccgtcacatcgtcatcccggatgcgggacgcgctttgcagatacacatcgtcggtaaggcactgaccgggagaaagctgcaaaaggggcggatcgccgtagtaggtcagtttccccggcagtccctccgcccgcaccgtcacctttgcgccgaagcgggtctcggtgggatactccgtcagggtcatggtcaaggcctgctgggtgtccgccaaggcctccatgggttcgctgacctgccggacatacagccagttccaccccagcgccagcgccgcgcccaccagacagaggatcgcccgtttccgccaacattccggcagaagcagcgccccaaagcccaatgcaaggcacaccaagccaccggacagcagccagccgcccggcagcagatactgcgccagaaagatccctgcggcaaacccgccgcagaacagcgccagccgtctcatttgacaggatacggctccggccggtccgtccgtcccagcaggtagtccgtgctgacgtggtaatagtccgccagcttatccagcacccacgccggagtttcccgttcgccgctttcgtagcgccggtaaacgctgcggtgcatattcaaatattccgctattgctttttgagatttgtcatgatcttctctcaaatcccgcaagcgtctgatctccataagaatcaccctattgaatgttaccaattggaaacattcaaatcgggtaattgttcccatacggagccaactcagagtatactactttctcacacactccgccagtcttttgtccaaattagaaaattaaacgcaagcggaaggcgctcccgcccttctcacgcgccgctccatcggaaataaacagtgcggggcgcataaagcgtcccgcaccgtttttcgctcaatcagcccggaggccaggtcatatcccgtccggccagcacatggaagtgcaggtggggcacggactgctggcccgcctcgccgatgttggacaccacccggtatccggcctcgtcaaagcccaactccttggacagcttagcgatgacctcaaaaatatgggccaccacagcgctgttctccgccgttacagcggaaacggactggatgtgggccttgggcaccaccagaaaatgggtgggtgcctgaggggcaatgtcattgaaggcatagcaaagctcgtcttcatagaccttgctgctggggatctccccggcgatgatcttacagaacaggcaatcgctcatagataggctcctttccgatcggatgttatctcttttcgtgctccggcaccacggcgaaggtcaccagatcctccgtgccatcgttgacaaggctgtggctgtgacctttggggcaatagtggcaggtgccgggagccaccggctcccagaccccgtcatacagcaccttaccggtgccggacagaaaatacatgacttcgctgctggtttcgtgggtatggaggccgatagaagcaccgggggccagcacgctgcgcatgatcttgttgtccacatcctgaacaagctgcaaacgcgcctccccctcgcctcccttcatgtgggaaacaacggagggctccagttcatcaaaacgaatcagcatacacgtctctcctttttacagcttgccagccacgaaatcgtccacggctgccagtgcgtcgtctaccttgctgacctccgtgccgccgcccatggcgctgtcgggcttgccgccgcccttgccgccgcagatgggggcgatggccttgatgatatcgccggccttcacgcccttggccacggcgtccttgccgcaaacggccagcagtgtcaccttaccgtcattgacagaggccagaacgcccaccacgccgggctccttatcccggaggaagtcgccctgcttgcgcatggcggcagcgtccataccatcccgctgagcggtgatgaccttcagctcacccaccgtcttagcggaggccagaaagctccgtgcctcgcccagagaagcctgctccttgaacttctccagctcatggcgcagatccttcatctcgttcatctgctgctccagacggttctccagctcgccggggttggtcttgaacatctgggcgatgtggaacagcacctgctgattgcggttgatggtatccagcgtcagctggcccacggtagcctcgatccggcggacaccggaggctacggatgcctcgctcttgatgcggaagggacccaccttagcggtgttatccacatgggtgccgccgcagaattccatggacacgccgcccatttccaccacgcggaccacgtcgctatacttctcgccgaacatggccacagcgcccttcttcttggcctcctcgatgggcagcacctccgttaccacagggatgccttccaggatggcgtcattgaccagcttatccacctgcgccagctgctccggcgtgatggcctcaaagtgggtgaagtcgaaccgcagacggtcaggctccaccagagagccggcctgatgcacatggtcgcccagcaccttcttcagggccgcgtccagcagatgggtagcgctgtgggcacggcggacgcccttgcggcgctcggcgtcaatggaggccgtcacggtctcccccaccttgaacgtgccggaaaccaccttgccgtagtgcatgaacttgccgcccttgttcttctggacgttgttcacctcgaacttggcaccgccacaggtgatgacgccgtggtcggccacctgaccgcccatttccgcgtagaagggcgtcttgtccagaaccacgatgccgtccacgccggtcatcagctcctcagccagctcgtcctccacaacaagggcgaccaccttggcgtcctccacggtatcgcggtcatagcccacaaactcggtagaggggatgtccttgccgaactccacgccggcccagcccagatcgcccagcgccttccgggcctcacgggcgcgggtcttctgctcctgcatctcctgatcgaaggcggagcggtccagcgtcatgccggcgtcctccaccatttcgatggtcaggtcgatggggaagccgtaagtatcgtacagcttgaaggcgtcggcgccggagaaggtggtctcccccttttccttgtgctcagccagcagctgatcgaagatcttcatgccgccgtcgatggtcttggcgaagttctcttcctccacccggatcaccttggtgatataggcctgccgctcccgcagttcgggatagtggccctcgttttcgtgaacaacagtgtccaccacctcatagaggaagggacggttcacgcccagcagcttgccgtggcgggcggcccggcgcagcaggcggcgcagcacatagccccggccctcgttggaaggcagcacgccgtcgcagatcataaagctggcggagcggatatggtcggtgatgacacggagggacacgtccttctcctggctctggccgtagctggcgccggtgatctccgtgaccttgttggtgatgttcataacggtatccacatcgaacagggagtccacgtcctggcacaccacggccagacgctccagacccatgccggtgtcgatgttcttctgcttcagctcggtgtaatggtcgtggccatcgttgtcgaactgggagaacaccacgttccagacctccatgtaccggtcgcagtcgcagccaacggtgcagccgggcttgccgcagccgtacttctcgccccggtcatagtagatctcggagcaggggccgcaggggccggagccgtgctcccagaagttgtccgccttgccgaatttgaagatccggtcctcgggaataccgatctcctcatgccagatgcggaaggcctcatcgtcggcgggggtggtctcgttgccggcgaacacggagggatacagacggttgggatccaggcccacccactcggggctggtcaggaattcccaggcccagtgaatggcctctttcttgaagtagtcaccgaaagagaagttgcccagcatctcaaaataggtgccgtggcgggcagtgtggccgatgttctcaatatcgccggtacggatgcacttctggcaggtggtgacccggtgacggggcggctcctgctcgccggtaaagtagggcttcatgggtgccatgccggagttgatcagcagcagagaggcatcgttctgggggatcagggaaaagctgggcagacgcagatggtctttggtctcaaagaagtgcaggaacatttcccgcagctcgttgagaccgtagttcttgggttgagacataatcatttcctccatttttatgtaaatttcttgatttttgactgtaaaccgggtttccgcccggaacggagccgtcggcggtgttccgcagcggctctctcccgaaaaataaaatgctccgccccggacataggggcgaagcattgcttcacggtaccaccctaattatcccccatccttgggggcatcttagccaccggtaacggcgtgacccgtcccgctcaccgcgggccgctccgaagcggctgcttcccggcgtaggtaagggacttgcaccaaatctccctctcgctgatccggtttcggaaagctgacttcatccaagcgtttttaaagattgaatacagaagtcattataccgtttttccgactgttgtcaaggtttttccccatgtcctgtcccggattttgaaggtgcggcggcccatctccggattttcaatcatcttgaagcatccggagaaatctggtatcctttattatataggatagaatcgacgaaaatcggtactgacagaggtgtgataaccatgaccctatccactgtgaccgctctggcaaggctgttcgggcaatacctactccagccgatccccttcgcgctgaccttcctgctcccgctcctgttccgcttgatcgcccgcaaatacatctggctcactctccccttgaccgcactggcggaggtgctcctgaattgggacagcttttgttattacgaggcccgcggcctcgccctcctgttcacactgacgcagcttgcagccatggcggttttcgtgtggatcttacaggccgccgccaaaaactcccggtaaacgccccgtttctcacagaggatagggcgagccggtccacagcagccgggtccccacaccgggcagcagccgctccgccccctctacccccggcaggggaaattcctgtggctccaatacgccgccgcacagcagcggcagcgtccgctggacgcacagcaccggctcccgcaggctggacagggtgatgctgtcccgtggggacaggccgtaggtcaccactgttcccgcccggagatcgcttctggggcagtcccccggcagcagcaggatccccgctgtcaccgccgcaggctccggcagcagcgcacagcccatcggcgtcagcgtcagcagatcccaccgctttcggcagactgccatggcgttccgcagatggcgaacccccgcgggcagcagaaattcccacgcatcgggacacagaaaaaatcctccgtccatcaaaccacctcgcccatagtttgaacagcgggaaaaatttcatacaggtcctcgttttttccgttggaatatgatatagtatttctattctgttcatgaggtgaagcgtgtggatttctggcggcatctgaaaacggtccagcgccatcggcatctggtgcggcagtactgcttccgcctggggctttactggcaggggctgacccacgacctgtccaagttctctccggtggagttctgggccggcgtcaaatattttcagggagaccgcagccccaatgacgcccagcgccgggacaaggggtacagcgcctcgtggatgcaccacaagggccgcaaccgccaccattttgaatactggaccgattacggtgtcagcggtgagggcatcatcggcgtggagatgccgaaaaaatatgtagcggagatgttctgcgaccggttggctgccagtaaggtctaccgggggcaggatttccagccgggagacccctaccagtttttccagtatggcaaaaagaagcggctgctcatgcatccggccacctcggaactgctggagaccatcctgatcgtcctccgggatcagggagaggacgccgccttcgactatgtgcggcgggaggtcttggggaagaagtaggatttttcatactggaattatgtgaactcccgaaaagcgttgcattagtaacaacgctatcccttgttacataaagatttgccgaaatagaaaagcggtggtgttccgaatggaacaccaccgctttatgtcaaccgttttttaatttatgcaacatctttccggagatcgtcggagggacattccccctcccctgttcctctatcgggcagaaaggaaacgcccgtccggtcacagaaagattccgttattcgttctcccagttatgccagacgttctggacatcgtcgttgtcctccagcatatcaatgagcttctgcatattcttcaggtcgccctcatcggtgagggagatgtagttctggggcaccatggcgatgtcggcggagaggaaagtgtagcccttgtcctccagtgccttgaccacagtgttgaagtcatcgggctcgcagcggacttccatcaccatgccgtcagcttcgaagtcggcagcaccggcctccagcgcgtccatcatcacggtatcctcgtccagctcctgatcctcattgtcaatgacgatcacacccttccggtcaaagctccaggacacgcagccctgcgcgcccagattgccgttgcacttatcaaaggcgtgacgaacctcgggagcggtacgctgacggttgtcggtcagagcgtccacgatgacggccacaccgccgggaccgtagccctcataggtgacagcctcaaagttctcggtgcttccggcacccagcgccttatcaatggtgcgcttgatgttgtcattgggcatgttgacggccttggccttggcgatcacggtagccaggcgggagttgttggcagggtcgccggagccgccgccttccttgacggcaacaatgatctccttggcgatcttggtgaatgcggcggaacgcttggcgtcagcagcgcccttggtcttttgaatgttatgccatttagaatgtccggacatagtagttattctccttcaacaaaatattggatgacttccttgtgagaagtcgattttatgattgtaagctggggaaattccttctccagataggcgacgattttcgcgcagaccgggtcctccgtggggaaatgccccgcgtcgatgaggttgatgcccttgggagcggcgtctaaaaactggtgatacgtcagatctgatgtcacaaaggtgtcgcagcctgccgcgatcaccgcgtcgatctcgtcgccgcaggcgccgccgcccaccgctatatattctaccggccggtccccggcatagcgtacgccgttggcgtgtaacgctttgcatacatcagctgcaaagtcagatagctttacagggtttcgcagccgtcccacacggcagaggccggtctcatcccccggcataggcccagggtcctcgattcgcagtgcctcggccagtgcgtcgttgacgccgccgggggcaatatccagatttgtgtgcatggagatcacagaaatatccgctttcaccaatctccgcagcagacggcccagatagcggtcgggccgcagggtctgcatctccgcctgatgccagcggacgttcatcagcggatggtgggacacgatgagctggcagcccagcttttccgcttcggagaccacattctccgtcacgtccagcgccaccagcacccgctggacctcctgatcggggctgccttccagatgccccacgttgtcccaatcgaacgcaagctccttgggggccagctggaataacgcctgttcaatttgtgcgacggttggcatggcgccactcctctcttgcccgtaataacgcggtcaaaatctcccgcagttcctccgtccgcgcttgcagccgggtggagcgcttcgctcccgccagtgccatctgcgtgcggacgattttttcaacgatgtatcgatccgccagcggatcgtgggccagccctatgccgccccagacctgactgagggacagttccattttccccgccttggcctccatcacagtgtacagggttccccggtcgcggaccagtgcttcccgcgtgatggcaaaaccattttccgccagatattgccgcaccatttcctcatgggactggggctgcagcagcagagtgtgctgcccatccgccgtccacggtgcggccttcaggatcgagaggatcgtctcccctcccatccccgcaatggtaacggtgtccacctcagaggggcggatcccggcaaggccattgcagagtcggtattcaatgttgtccgtaccgtagagcgatccggtcaccttggcccgctccaacgggccgggccgcagatcgctggccactgctccccggatttttccctgaagccgcagccatgtagggagatagccgtgatcggtgccaacgtcggccagatacgcgccctcaggcacccacccggcaatcagccgcagtcggggcggcaattccagcgcccgcatggtctctccccctttccggtggttttgtccgttcgttccgggcatggttcaggacgcatacggtatcccgtatgcgtccccgcaagaacttcgttcctgcggggttggtttttcatgtgaaaaaccgtttgattgaaatcatgcagaaaacccctcctgggttttccgcacacacctttccttcccgtcgatgaacgttttccgttcgttccaggcatggttcaggacgcatacggtatcccgtatgcgtcctgtcatgtggcgcaattactgagccttgttggcttcctcgttcaccagagccagcagcttgtccacgtcgatgccgtggaccatgcaggcctcctccacggtctcaccgcgggaagaggggcagcccaggcaatgcataccgatggacaggaaaatgggcgcagtctgaggtgcaacgtccagaatatcaccgatgatggtgtccttcgtaatattgatcattggaatgatcctcctgttttgaaaaatgagcaccaatattatactcaattttttctgtgatttcaatagataatcgaagaaaagccgtataaaccgggaaaatcatttggaaattttgcaaaaatcagcgatcagcgcaggaacatggcatcgccgaagctgaaaaagcggtatttttcccggacggcttcctcataagcggccagaacatgctcccgtccggcaaaggcggacaccagcatgatgagggtgctctccggcaggtggaagttggtcacaaggccgtccatcaccttgaagcggtagccggggtagatatagatgttggtccagccggccttggcctccatgtggccgtcctccgccgcccaggattccagcgtccggcaggaggtggtgcccacacagatgcagcgcccgccgttggctttggtacggttgatgaggtccgccgtctcctgtgagatcacgcagtattcactgtgcatctcgtggtcggtgatttcgtcctccttcacggggcggaaggtgccaagacccacatggagcgtcacatagccgatgttcacgcccttggccttgatctgctccagcagttccggagtgaagtgcagtcccgccgtgggggccgccgcgctgcccagcaccttggagtacaccgtctgataccgctcctgatcctgaagctcctccttgatgtagggcggcaggggcattttacccagatgctccaaaacctccaggaaaattcccccgtaatcaaagcgcaccagacggttgccgtccggcaggacctttgtgacctctgccgtcagctcgccgttgccgaaggagagtttggctccctcccgcatatgccgtcccgggcgcaccagacattcccacgtcttttctccccggtcgatgagcagcagcacctcacaggcgccgcctcccggcagacgctgacccagcagacgggcgggcagcacccgggaatcgttcaggatcaggcagtcaccggggttcaggaagtccggcagctcgtagaaatggtgatgctcccaggcaccggtgttccggtccagagtcatgagccgggaaccgtcccgccgctccagcggcgtctgggcgatcagttcctccgggagctggtagttaaaatcgcttgttttcatgttcaacctcacttgatggtaatatctgtatagtagaattccagaatttcgtcataggtataccccagctccgccatggccttggcaccgtactggctcatgccgagattgtggccgctgccgctgccggtgatggtaaaggtgccgtccttggaaaacgcaggcgtttggccttcgcctaccgtagatgttccgaaagcggacagcacagatgcgctgccgtccagtctgacggtctttccgccgccgctgaggacgctgatcccttccaaggagcggatcaccgtattgctgtcgttgatataaatgccgccagaggctgcgccggctccgttgatggtgaaccgctggctcttgacggatttattataggtgctggaatagaagatcgtgcggcaggtctccccttttaccgtcacgctgtcccggctgccctcaaaggtcaccttgctgacgttgcccatcggcgtgaactccgccacatagacgttcttcacagtgccgatgctgtaccccttctgctccaggatccacgtcagctcatcggcggtgtaggtcacggaccagttgtaattgggaatgtttgtcttggcctcataggggtccttcttccccaccagatagggaatgctgctccagacattggcggcgtcctccgtggccccgccgtttgacgcgcagtagaccaccgtatccgcgggcttgccgccgtaatagatcatctcgcccgccgtgttgtccaccgccgcgtctgtcatatcggttgcccggttgcggccgtagtacacctgacagtcggtgccggcgcaaacgtcaaagcccaaagagggatgccgggtctttacggcgtaggtgcgggcgcagaccgcctgggcttccagagccgccagcggccagtctttgtccatctcgtagggcacaacgccctttacatagtcttcaatatccaccacattgataaccgtcaaagtgccgtcggcgttgcagcggtactcaaagccgccggggtacttatagcccttgcaccaggtctccgtgtgccgtcccatagggcggatgccgagacagtagccgttgtcccggaattggaacaagacctccccactgcgggtctccgtcaccgtcacgccgtttccggagccggaagcctgcatggtgatggtggtctcgtcggtctcgtccagatagacgaactcccggtcctcgtcatagtagccgaactcgtatccggaccccacggcgttttccagattggcggcttccagagccgtgtcgccccagcggatgcccaccttcagggtgtcatttaccacggcggacgccgaaacggcagtcaggctgaacaaagtgatgataaacagaaaggacaacacacgttttttcataaaacctcccaatgacgaataccttgacgatagaggatctgtctgctattatatagacaaatgtccacggtgtaaaaacacattccatggacgtatatatctaagatattataatacacattggccccggattcaaccggaatcgacgatttccccgggacccgaaggaggaatctgctatgaaacggtatcaggtcggcatcatcggcggtacgggtatggtgggccagcggtttgtgaccctgttggaaaaccatccctggttccagctcaccgccatcgctgccagcgccagaagcgcgggaaagtcctattgggaggccgtctgtgaccgctgggctctggatattccctgccccgaagccgcaaaatccctgatggtgctggacgctgaggcggacgcggtgaagctggccggtatggtggatttctgtttctgcgccgtggatatgccaaaggacgccatccgggcgctggaggaaacctacgccaagctggaatgtcccatcgtttccaacaactccgcccaccgctggacagaggatgtgcccatggtggtgccggagatcaacgccgagcatctggcggtcatcgaggcccagcgaaagcggctgggcaccaagcgggggttcatcgccgtcaagagcaactgctccctccagagctatgtccccgcccttcatcccctgatgaaatacggtctggaacgtgcgctggtgtgtacctatcaggccatctccggcgcagggaaaaccttccagcgctggcctgagatggtggataactgcatcccttacatcggcggcgaggaggaaaagagcgagcaggagccgctgaagctgtggggccgggtggaaaacggcaggatcgtcaaggcggaggggcccgccatcaccgcccagtgcttccgggtagcctgtcaggacggccacatggccgcagtgttcatgaaattcaaggacggctgcaagccctccatggagcagatcaagacggattgggccgcattccggggcccagcgcaggaattacagctgccctccgcccccaagcaattcctccactattttgaggaaccggaccgcccccagacccgtctggaccggatgctggagcggggcatggcggtgtctctgggccgtctgcgggaggatacccagtatgactacaaatttgtcggactgagccacaatacccttcgtggggccgccgggggtgctgttctgttggcagaattgctgtgcgcaaatggctatattcagcaggtgtaaaggtaaacaacttaattgcacaaaagcggatgccaaagcaggcatccgcttttttatgttgaaagaggaggtattttgttgtgaaggacattctctttacaggttctggcgtggccatcgtgacgccgtttcacgccggggcggtgaacttccccgcctttgggcggctcatcgaccgtcagatcgacggcggcaccgacgccatcatcgtctgcggtaccaccggagaggcggccaccatgacccaaaaggagcgcatggagaccatcgcctattgcgtggaccgggtggcggggcgcgtgccggtgatcgccggtaccggcgccaacgatactcaggtagcccgggaaaacgccctggctgcggagcgcctcggcgtggacggtctgctgatcgtcaccccctactacaacaaggcaacccagcaaggtctgctgcggcactacaaggtcattgcggattccgtgggcactcccatcatcctctacaacgtcccctcccgcaccggggtcaacatccagccggagacctatgcggagctggcccaacaccccaacatcgcaggtgtcaaggaggccagcgggaatttcagccaaatccaaaaaacccggaacctctgccctgccgatttctccatctggtccggcaatgacgatgagaccgccgccatctgtatgctgggcggttccggggtcatttccgtggtggccaacgtcctccccgcagaaatgcaccggctgatggccctctgccttgccaatgacttctccgcggcgggcagactgcaattaaagctgaagcccctgtgtgacgcgctgttctgcgaggtgaatcccattccggtaaaaaccgccctgaatctcatgggtctggaggccggggaactgcggcttcccctctgtccgctcaccgatgccagcgtggagcggttgaagctggccctttcatcgtgggatctgctgccggagcagacctcctgagcttcaaactaaggatttcaatggcgcaggacacccttcttgggtttcccgcgcacacccttcctttccgttgcggagaatctacctctttatcaacagcctcagtgccgctgtccttgcgaacagcggcactttgggaagaatttacagctttttcgtcagcatcaggcggtataggctctgtggaagaccttcttgcccttcttgatgaccacgccgtctccggcgaactgcgcctgatcgaaggtcacatcgatggacgccaccttctgatcattgacagccacgccgccctgctggatcaggcggcgggcttcgccgttggaggcgcacaggccgcagaccaccagcagttcaatggcgccgatcttaccgtcggtaaagcgggcctccggcagctgggtagcgggcatattttcgctgctgccgctgccgccgaagagggcacgggcagcctcctgggccttgtcggcctcggcctcgccgtgaaccagcttggtcagttcataggccaggatctccttagcctggttcagctggctgccttcccacttgtccatagcgtcgatctcctccaggggcaggaaggtcagcatgcggatgcacttgagcacgtcggcatcgcccacgttccgccaatactggtagaagtcgaagggagtggtcttgttggggtccagccacaccgcgccgctggcggtcttgcccatcttcttgccctcgctgttgagcagcagggtaatggtcatggcgtgggcgtccttgcccagcttgcggcggatcagctccgtgccgcccagcatgttgctccactggtcatcaccgccgaactgcatattgcagccgtagtgctggaagaggtagtagaagtcatagctctgcatgatcatgtagttgaactccaggaagctgaggcccttttccatgcgctgcttgtagcactcggcccggagcatattgttgacgctgaagcaggcgcccacatcccgcagcagatcgatatagttcagcttcagcagccagtcggcgttgttgaccatgatggccttgtcctcgccgaagtcgatgaagcgctccatctggcgcttgaagcagtcgcagttgtgctggatggtctccggggtcatcatgttccgcatatcggtgcggccggagggatcgccgatgtagccggtgccgccgcccaccagcacgacggggcggttgcccgccatctgcaggcgcttcatcaggcacagggccatgaagtgacccacgtgcaggctgtccgccgtggggtcaaagccgatgtagaaggttgccttgccggtgttgaccatttcccggatctccggctcgttggtcacctgcgcgatcaggccccgggcctgcagttcttcgtaaatacccatattgttgttctccttttccatgtttgattcggacagagataaaataaagccccctgtcctttcggacagagggcgtaaatacgcggtaccacctctggttcgccgccccctcacggaacgcggcctcacgccgtgccatcacacggcagcgcagtaacgggcgcacccggagcacgcctactgagccaaagggccgtttgggtgccagctccacggtgtagttcggcggctgttctctcccctttccaccatacaggggctctcttggcagaaccgatccgcttacttctccgcatcatcgctgtaacgggcttcattgtatcggatttcccgggaaatgtcaacccatttatgggtgccagacgccgaaaatcttcaaaaagcgaatatcctgatacgaataggtgctgaggggacggttatccgcatcgtagctgtgggcggccaccagcacgttttccggcgtcaccggccaacccaccgacaccaccaccggcgtatggcggaagttctctccgtcaaaggaaagctggatcagatcgccggggcgcagatcccccagttcgcagggacgggccgccgggccttcggttttttcctcccgaacgaggaagttatagaggtagggcacgccagtccacgccggggccttctggtccgggtcgatatagtaccagccgaaggtgggcgtgaagttcatcacgccgctgccggcataaatgcactgggaggcgaagttggtgcagtcgccccctaaatgctcgtagtcataaaaggcgggattccggccgtaggcccagcggtgggcgtacagcacggcagcccgccggtcatagagcgcgaaacgcatagacggactcccctttcccgccagtctatgcggagaacggaaaagcgtgcgtggaaaaccacgcacgcttggcttgtttgatttccgtttatttgatgaccacctgagcggtgctgtcggtgatccgggtccagcagggctccagccacacgcagtctgccgtgcagtccttcaggccgaaggtctcaaagtaccgcccttcctccttcgcggctttttcggcggcctcgtaagattccagctccgcgccggagatctcgcccaagatcatgggtgaattggatgacccccgctggttgatgtcataggccgtgccttcctcgtcatagaagcagcttttccagatctggtaatgcatcgttttctcccagcgatacccagcgctgaaggacaccacccagccggcattccgcttctccgcccattccagtcggacgccttggggcggatcctcgatggtgccctttgccaggtccaccttcacccgctcctgccccttgtcgatccaggaagccccggtgacatggagggttaggtgttcccctgtggagaaatagggactgtccagccagacggaatccgtggagggatcgtccgggtttccggtggcggaaatgccgttgacaatgccgttgaaccgctctccccgctcgttttccagatagaagttcaactccgtcagccatgcggtgttggcggggtcatagtcaaagttcagccgcaggtgggtgggatagatctccgcctccgtcagcgttacggattggccgtccagcaggaaggtctctcccacatcaatgaccgtcccctgctccgtgtaggtggggtcgaaacgcagttcaaaggtaaaggtagccaaaatctcccgctgctcctccgagttgtcggacagcagctcgtcgccgtagtcggccacgctggactgcgccgggggcttctggttctcatagagatgtttgttgtcataaacgccgaaggtcatggtcaggctgtccggcacgtcccggttcataaagtcgatccggagttccatgagatcaccgttttcaatgccataactgctgaaggaagaagcgtatccctcctgttcccccgacaccgtcagcgttgggtggtctaaatccagatgggcgtaatcgtcagaccggatggagaagaacacgtccacctgcttccggtctacgatcaggtactccacccgggccgtgatgccgttttgcgattgggacagccggaggggctgcacataatcgttctccacggcggcggacaggctgggagaccagcttaccgccttagccagatccgccagaagggggatccgtccgcaggcccgggcgaagggcgtcgacaggttcaccagcagcacgaatgttgcgaagcaggccgccaggccgcccagagaagtgccgaaaaatcgccgttttttctgtaaagtatttttcctatccagtgctttgcttaccgtatcattcagcgcttccggggtctgttccagctccgccaacagagcggcgtactcgtccatgcggttcatacctgtccctcctctcccagttccaatttcagcagggccagcgcccgtttctggcgggtggccgcagtcccctgcggaatgttcagcgcggcggcggtctccgcctgggtgtacccggagaaaaaccgcaggatcaccacgctgcgcagctcctccggcagacggcggattgcctctttcaaaggcagatgctcataggcatccggcccggcggtgtccggcagagcgtccacgccgccgggatgaaaccgcctccggcggcgcagttcgtcctgacaggcgttgatcaggatccgggtgatccaggtctcaaaaagcgccggtgtttgcagctgtttcagtttccgcagcgcccggtacactgtttcgtccactgcctcaagggcgtcggcctcgctgcccagatacagatacgccgtgcggtacagccgggtcttgatggcttctgtccggtcggcaaattcctgctgatccatagagaccgcctcctctctgctctcttttgtctattagacggagatgcgccccgttttgttctcacgaagcgaaatctttttagaaaaaaccggcggggcttctgccctgccggttgttacgcttgcgcttatgctctcgggtgcgccttctggtagacgtccttgagctgattcttgatgacgtgggtgtagatctgggtagaggaaatatccgcgtggcccagcatctcctgaatggcccggaggtccgcgccgttttccagcagatgcaccgcaaaggaatggcgcagagtgtggggggtgatgtccttctggatgcccgccttctcctgatagtgcttgatgattttccagaaaccctgacggctcatacgctcgccgttcatgttcacgaacagggccgtttcctccgtgtccgcgatcagctggggccggacgcccttgatataatcctgaagcgccttcaccgcgccgtgatacagggggatgatccgctcctttttgccgttggagcagcggataaagcccgccggcaggttcaggtccccaatgtccagtgcgatcagttcgctgacccggatgccggtggcgtacagcagctccagcatggcatgatcccggaagcccttggcgtccacgcactccggctgttccagaaatagctccacctctttggctgtgaggatctccgggtatttccgctccaccttggcggaggccacgccctgcgccgggttctttttcagttccccggcagctaccatgtaactgtaaaaagacttaacggacgccagaaaccgggtgacggaagcggcggatttcccatggctcagcatccagtccatgtagtcctggactgccgcgctgtccgcctcccgcaggtctatgtcgcagtaattatgtaaatactcagcgaattgggtcgtatcccggaggtaggaactgacggtgttccgggaggaatgcttttcatcggacaaatacgcaccaaaacgggcaatatcatccatttccgtcaactcccttcctaaaaaaatcgttccagcagcgcacggagcagaaacggcgacagccgcagttctatccacgcgcccagacacaaaatcaaacacacaataccgaagcccagccaacaaccacggccgcaggcggaaaacgcggcgcaccgtctcccccgggacagtccacgcagtgcggcggcccggcccatcgcaggcgccgccagcagaaaaaagcaaggcaccgtgaccagacagcgaaagccaaaaaaggccagcgccagcagcaggccccgcccgccgaaggaagccgtcaggcaccccgccgcataggccggaaaaaagcccgcagcagccgccagcagcggcagcaacaggattcccgcagagcagacgccgcatagaaacgccaaaaccggtccttgcagatagagcagcgtcagagaacaaaccacggaaattccaaggtcctgactctgcgccaaggccagataatccgtcaggtacgtggtcagttcccgttccacatccccggagatccgtccggcgcagacaacacccgcgccgatcccgagaaaaaagaaaaccgccagcagcaggctgtgcagccggctggggtctgtccatcgttccgcacgattccatttcaaaccgcatcacctcaccccagcctatgaaagtgggacaagatttatgttgcggttgacgtaaaacttttctcattcaaatataattcaaatggcgccgtttcgcaaggtgtttccagaaaatacctgtttttcggcgtttatgctaaaatattatgtaaactgtattatgtaaacctcgtaaatcacagcataaaacagcaccttttctctcattttacgcaagatgtagtgtctatcccccgcagaatcttcccatatctgaccacaccgaaaaaaaggagcgccgccccaccggacggcgctttttcagacggaacgcagctttttgtgagatttcaccaatcgcttgttggaccgcttccccacctttccgcagagcagcgccgccagcagcccgcccagcaggatcagagccagcaggatcagcccccggaccgcgatcccctcgccccagccgccgaagcaaagcaagatcagaagcagggcgaaggcccccgcgttcagcagactcccgcccggacccagcctccccttccctgccggaagtcccccggcgaaggccgcgcagaaggccagcgcccccagcgcctgcgggaccctgtcctcccccacgatccccttcaccgccagcagcgtcaccagcaggacacccaagccgtccacagccgccgtcagcagcaagcacaaagcgatctgctttcccgccggtttcttttttccggacatccgatcccctcccccaagcatttcttctggaacagcttatgccatcagcggccatttttatgacaggacgcacacaccatatttaaaaccgcatcggtccgggtttcaaccacagccgcaaaaccgcctgcggccgatcgcaaagctccccatcgaggccacactcatttggtccccggagcggtgaaaaagcacatgcatccgcatccgatttcggaagaaaaccggaaccggggacaggggtgcggtcatatattaggctgtaaggaaaggaggcggagccgggtgtttcggggaggacggaactgcatcattggaatattcgccatcgccatgggggcaggcatcctcatcgcggccatttttccaacgggactgttgatgttcctggtggcaacattgctgatcgccagcggctgtgcctgctggaagcggtagaaaggagaggggttatgaatatcgtagtgtggaaggcgcccaaggccatgcggggactgctgcggaagctgttcagaatccaggcataaggggtccccgccgctcataaactgcactgaagtacactgagcggaaaggaaggatacccacatggaactggaattaaaaaaggagtgtctggatacatacgaactgggagagccgcagacgctgacgcaggaggagaccgcggagaccatcgttccggattactgcccggatatcgcccggatcatttcggcggagggcgtggtctgccttcacggcggcacagagcaggacggcgtcaccggcaccgtccgggtgacggtcctctacacgccggagaatgagtccggcgtccgggcactggaattcgccatgcccttttcggcgcaaggggaagggttggccgggtgcgcccatgtagtggtggagacggagatcgagttgctggaaagccggatgctgaatccccggaagatcttcacccgctgcaagctggtgacccatctggccggctgccggaaggtatgcctgaccatctcctccgacgcggagacggacccggcgctgctggtggaaaagcggtgctgcgggcagacggtgtctttgctgcggcaggtggcggaaaaggatctgaccttttcggagaccatgtccctgtcgctgggtcgggagggtgcggcggagctgctccactgccgggccaacggcatcgtgacggagactaaggccattggcaacaagctgatcttcaagggggtctttttggtttccgcactgtaccgcaccatcggcgggcagctggcctccgccagcgcggagctgcccttttcacagatcatggagacggatagcacagaggaaaatacccaggtgtccatgcgcctgcggatcaccgggacggacattcagatcgacggctccgatgacgagggccgccaactgtccgtgacggtctactatcacaccatggcctttctgcgggagacacgggaggtcacgctgctgacggacctctactccaccgcttacgagacccgctatgagccaagtcagctggatctgtgcagcctgtatgagtccgtgacccggcggcagaccgtccgggaggtgctggagatcggcgtggcggcggaggcggtgctgtccctgtgcgccgactgcggggcggtgtccgtcagccgggagggagaaattactcagctgcggacggcggtgacggtccgggcgctgtatctggacgaggggggcgcctgtttgtcggcggagcgctgtatcgacgtctgctgccccatggagctgtcaaaggactgtaccgtgtccgcccgtgccttctgcggggaggaaattcagggaactttgggagaccgtggcatcgaggtccgattcccggttgattttcaggtggaggtctgcggccggtgccgcaagctgtgcgtggcctccgccgtgctggacgagagtacgcccaaggacctgtccaacgcgccatccctgattttgcgctgcgtggggaagcaggaatccgcgtgggaggtggcgaagcgctacaacaccaccatcgcggacattttagcagcaaatcagttggagcaggaatccgagatcccctgcgaacggctcctgctgattccgaaaaagagggcgtaagaaatcgaagccaatcccaaacagaagtccgcaaaaagtccggtacgtgtctctttcaaaaaagaatcatgcagccccctcgttttggctgccaacgcaaaaaggcttgctgtcgattgacagcaagcttttttagtctctgtatcggatcgcaacagggcgacagttgggccagtggttcccacatgggatcatgagcactccaccgcgaccttgatcacgttgtctcgccggttttcaaagagctcgtaggcctcttcgatcctgctgaggggataggtgtgggtgatgagcggctcggtgtccagtttcccctccgcgatgagacgcagcgtttcctcgcagttgcagccgtccacgccaccggtcttgaaggtgaggttcttgccgtacatatccggcagcggcaggatctgggccttgtcatacagtgccaccaccgtcacgatggcgttgggtctcgcgcactcccaggccagacggaaggtagattccgcgccggccacctccaacaccacgtccgcgccgccgtggtcgctgttggtgcgtacaaaattcaggcactcgtccggcgagaccgtcagcacctccggataatgcttgttgatgaagtggacgcggctctcatccttttcgcagacaatgatgcgcttcggctgtttcagcatcacgcagagcagcgtgcaaattccggtggggcctgctccgaggatcaacacggtgtcctccgctgtgatctcagaaatacgagccgcccagaagccggtggcgaggacgtcccccaccagcaaagcctgccggtcggtgacgccgtctggaatcttgttcaggccctgatcggcgaagggtacccgcacgtattccgtctggccgccgtcaatgcggcagcccaaggcccagccgccgttttcatcggtacagttgtttacaaagcccttcttgcagaaaaagcactcgccgcagaaggtctccacattcaccgtcacccggtcccccggcttgacatgggtcacggcgctgcccaccgattccacaacgcccaccatctcgtgtcccaccgtgataccgggaacggcccggggaacgctgccatgcttgatgtgcagatcgctggagcagatgctggccagcgtcaccttcacaatggcgtcccgctcgtgcagcagcaccggcttcggcttttccagcaatgcaaattttcccttttcaacgtatgtgtaagcctgcatttcctgatccttccattcatttcagttgattgatatatgttaccacagcataccgttttccgcaaggagaagcaggcccgatgagaacgcagcgctctgattgcgagccggagtgtttccacccctccattttgacgcagaaaagcgccccgcttgtgagactggcacatctcacaaacggggcgcaaatatggggcgtacttatttccgcttttcctgccattcccgcagaggtttcagttcctcgaacagacgcagataactctgataccggctgggctggagtttccccgcttccagagcttcccgcacggcgcagcccttttccttggtatggctgcaatccaaaaactggcactcccccaaatagggagcgaactcccggaaggtctccggcaggcgatgtttcagttccagattcagttcctccgtttcaaaggaggaaaatcccggtgaatccatgatctccgccccgcagctcagacggaacagctccacatggcgggtggtatggcgtccccgccccagcgccgtgctgatctccccggtctttagctggaacgccgggtccagcgcgttcaggatactggatttccctacgccggagttgcctgtaaaggcggatagcttaccggcgatcagaggcttcaattcctccagaccctctccggtctccgcgctgatccgcagtgtcgggaacccggcggcggtatagatgcggtacagctcctctgccgggtccagatcgcacttattcagcagcaccaccacctcgcagcccttcagggcagcgatggccgcaatgcggtcgatgagaaaggggtctgttttggggatggcggcggagccgatcacgaccaactggtcgatattcgccactgccggccgttcaaaggcgtttttccgggggaggatagactccacgaacccctcgccgtttcccagctcccggaccgtcacccggtcccccaccagaggggacaggccctccttccggaattttccccgggcacggcaggtcagcacctccgcgccggtatccacatagtaaaagccgctgagggctttttgaatccgtccctctgccatcgtatcaaccaaagctccgctcataggattgcttctgatccagcacgccgtcaaagtagaccttcaccattttccggcccgtgccgtaaagggtggtgctcacggctccgtccgcctcgtagacggtctcgctgtactggggattcggctcgtcgcccacatagatctccaccttgacaatgtcctttccgttctggggaatgtccaccgtgatgggcagggcgctgctggccagtcccgcactgacccggaacttgatggtcgtccactccgacacggtctcgccgctggccggactctgccagacgatggtgccgccgggcttgtcgctgtctaccacttccacatccgcggcgtcgcaggtcagcttgtagctttccagctgggacagcacactgtcaatgctcattcccacaaagggcaggaccgttaccggtttgatgtccgggcccttgctgaggatcagctttacggtatcgccctttttcaggatctcgccctgagcaggctccgtcctgatgacgtacccctccgtgatctcctcggagaactgcttcaattcctccggggcctccacggtcagctccagattgtattccttgttcagcttttccagcaggatacgggcgtcctgctcggatttgttttccagatccggcacctcgccggtctcctcaccggcgctgacccacacctggatcaccagctggctgcccttccgggtctcctccttcttggggtcctgccgcaggatatgcccctccggcacgtcggcactgaactcagagccggccttctggatctcaaaaacaccttcgatccggggatcgttctccgcttcctcgatggtcatgttatacagatccggcacctgatactggtccaccaccgccggagcaaaggagccgaggatggtcttgaacagcacgatcaccacggcaaccgccgccaccgtcaccgcgcccaccagcacgccccgtttgccgtttccggcgcggcgtggctcctcgtcctcgtcccgttcccggcggggataattccgctccggctgatggacggggatggtcaccgtatggctgggcatggtgcggatggtccgggtaggctcgtcattctcctccgggcgcaggtccgaaaggtcgaatttcatctccacctccggatttttccggaaggcttccagatccgcgatcatggcgtccgccgactgatagcggtgctccagatccggggccatagccttcatgcagatcagctccagctgctcgggaatatcggggttgatctcccgcggagccagcggaatggagctgaggtgctggatggccacagaaacggcggactccccttcaaagggcagccgtccggtgagcatctcgtaaagcaccacgccggaggaataaatgtcgctgcgggcgtccggccggtcgccccgggcctgctccggggaaatatagtggacggagccaagggcttcctgtgtcagggtctgggcggaatccgccagacaggcgatgccgaaatcggccaccttcacgctgccgtcccgcaggaccatgatattctggggcttgatatcccggtggatgatgccacggctgtgggcgtggctgaggccccgcatgatctgggtgatgaagtgcagagactcccgccagttcagctggccccgcttttccatatactgcttgagggtgatgccgtcgatcaactccatgacgatatattccatatcgccgccccgggacacatcgtacaccgatacgatgttggggtgagacagctgggcaacagcctgcgactccgcgttgaaccggcggcggaactcctcgttctgcgccagatcgcttttcagaattttgatcgccaccagacggttgaggcgatggcattttgccttgtagacgatcgccatgccgcctgtgccgatgcgctccaggatctcatagcggttgtccagcatttttccaatgtattgatccatacgtctccccccccctcttacagcttctgcatcaggactgccgtcacgttgtccggcgcgccctgacttttggaaatatgcagcagccgatccagacaggtgtccagatcgccgccgtggacgatctcaaagagcatttcctgatcggtgacggtgttcaccagtccgtcggtgcacagcaggataaagtccccctgctccatagggcggatatacccgtcgcaggcggcgttggtatcccggcccagagcgcgggtgatgaggttccgccccggatggcggcgggcctcatcggcggtgatgtcgccgtggtccaccatggtctccaccagagagtgatccttggtgatgcgggtgatccccgcctccgtgatgtaataggcccggctgtcgcccacgttggtgatcaccgcgccgttctcataggccacagcggcaaccagagtggtacccatattggcaagcaccgcctcagcctccgcccgctccgccacggcccggttggccatggccaccgcgtaggcagaagcctcccggagctgctccggggtcatatccggtttcagggccttctccatctccgccgcgtaagtctccgacgccagcgtactggcaagccggccgccggcggcgccgcccataccatcgcacaccacacagatgtcaccattccgggcgatccggtaagtatcctgattttcctttcgcacaaggccagtatccgtaacggcccaggtttttatcatgattcagccgctccttttttccgttcttccatttccttccgccgcagctggccgcaggaggcgtcaatatctcctccgaggctccgccgcaccgtggcggtcagaccgtgagactccaagcgcttctgaaacgccgctacccggcgggagggtttcagaggactctccgccacatcgttcagcgggatcaggttcacatgccccggcatccccttcagctttttggcgatgagatccgcctgccagtcgtggtcattgacaccatcgatcatggcgtattcaaaggagatccgccgcccggtctttttgaagtaccggtggcaggcgtcaaacagcttttccacgtcataggcccggttcaccggcatgattttggatcgtgtctcactgtccggcgcgtggagggaaaccgacagcgtcagctgtaattccaggtccgacagccggtcaatgccggggatcacgccgcaggtggacagagagatgtgccgcataccgatgttcagcccgtccgggtggttcaccagctccagaaaccgcagcacgttgtccagattgtccagcggctcgccgatgcccatcaaaacgatattggaaatgggcagtccggagtccttctgggcgaaaatcacctggtccaggatttcagacggtgttaagtctctcaccttgccggcgattgtagatgcacagaaagcgcaccccatccggcagcccacctgtgaggaaacgcagacggtgttgccgtggtggtactgcatgaccaccgtctcgatacagttgccgtccagcagttcccacaggtacttcacggtgccgtccagcttggagacctgtttacgggccacggagggcgctgtgatatagcactgctccttcagcttctcccggagaggcttggaaaggttgctcatctcgtcaaaagaggtgacgcccttatggagccaggtaaagacctgcttgccccggaaggccggttcccccatctccttcagggtcgccgtcatttcctccagggtctgggatttcaaatcgatcataaattcctcgttatgtccgcttcatgcggcaaatgtaaaagccgtcggtaccgtggcgctggggccagagggtcagctgcccctccgtctcccctaccggtgccggcagggtgaagccgtcccggcagaaatcgctgtgctccgtcaggaaggcatccgtcacctgctcgttttcctccggcagaatggtacaggtggaatacaccagcacgccgccgggggccacataccgggcggcgttgtccagcagcgccgtctggatcaccggcagggtgaacagatcgtctgcctttttgtagcggacgtccggtttcttccggatgatgcccagaccggaacagggagcgtccaccagcaccgtgtcaaaccgctccgcccattccggacggaacacccggccgtctccggcggaggtggtaatagaggtcaggtccagccgggccgccccctcctgaattcgtttcagcttgttttcgtggaggtcgcaggagacgatctcccccttgtcctccatggcaaaggcggcgctgaaggacttgccgccgggggcggcgcagagatccagcaccttctgccccggctgtacgccggcgatcagggtcaccagccgggcggcggggtcttgcaccagcagtttaccctcccggaagggagccagcgtggtgagatccccggctccggtcagctccagacagccgggaacccaggggtggggcttcgcggtcacgccccagccttccagttcctttatcaggctttccgcgttggttttcagggggttgacctgtaccgtcaaaggcggggtatcattattcgccgccaggaatgcttccgcttcctcccggcctaaaatcgacagcagccgcttcaccagccatttgggatgactgtaccggatggagaggtattttgcctcgtcccgctccgggatgggcggcagcgccgtcttattttgagcgatcttgcggagcaccgcgttcacaaggccggatgcctgccctctgccggagatcttcgccaactccacggaggtgttcaccgccgcgctgtccggcacccggtccaaatataagatttgatatgcacccagacgcaggatctccaacagcggcggctgaagatgatccggcttctgggagcagtacgcgctgaggtagaaatccaacaactgctggttctggaccacgccgtaaaccaatcggctgcacagggccgcctccgggcccaccaaaccgtcccggcctaactgagctttcagagcggcgtccgcccaggcatggttattccgacaggacatcaggacccgcagggccgtttcccgggcgcccatcagttgtccctccgtccgcggttattgcggcccacaaagatgagcacatagcgcagcagctgcaagacggacatcagcagcgcagccacataggtcagtgccgccgccttcagcaccttccgtgcgccgggaagctcatcgtcatacaaaagctgttcgttttccagcgtctgcaaggcccggtgggaggcgttgaactccaccggcagggtaataagctgaaaaatcgtggtcagggagaacagcaaaatgcccaccaaaaacaaggactggctgtaaaggaccatgcccaccagcagcaggatgaaagaaaacttggagccgatctgggtggcggggataatggccgtccgcagccgcaccgggccgtagttttccgcgtactgcacggcatgaccggcctcgtgggccgccacgcccaccgccgcgatggaggtggagttgtagacgttttccgacagggaaatgctgttgtcacggggatcgtagtgatctgtcaggctgccggagcagggccggatggccacatcatagacgccgtgggcccgcagcaccgcctccgccgcctgcgcgccggtgagacgccgccggttggcgacgccgctgtaccgcttgaagtttccgctgacctgcgcctgcgcccacagggacagcaggagcaccgggatcagcaaaatgcagtagatattattcgctaaaaaatcgccgtaaccgccgtaataaccgtaataaggcatgggattcctccaatcagatatgcatgggatggcccagcagataggccgccgcgctcatgcgcttgccgccctccgcctgaagctccgtgatccaaaggctctgcccgtcgccgcaggccacctcgatgcccttctttccggcggaaagcagcgtaccgggcgtcttgtccgtagccgtgccaacggctgttttgtaaattttgaaccgctggcccgtcagctctgccgtggcgcagggccaggggatcagtccccgcacctgattgcggatggccgccacaggcttcgcccagtcaataggagacagctcacgggacagcatgggcgcaaaggtggcctgtgtgctgtcctgcggggtccggggggcggtccccgccgccagcagaggaagggcctccgccagtgcctccgcgccgacctttgccaaccggtcccacagagaaggcagatcctcctccgggtcgatgggcgttttcgccgtgaggatcacatcaccggcgtccagttcctccgccatatacatgatggaaacgccggtctccgcgtcaccgttgagcatggcccagttgataggggcagaaccccggtatttgggcagcagggacgcatggacattcacacagccaaggggcggcacgtccagaatgtccttgggcagaatacggccgtaggccaccaccacgatcagctccggggccagagactttaccagctccagggccgtgccgtcccgcagcttagtcggctgatacacagtcaggccctgtgacaaggcatattccttcacaggggaaaaggtcactttgttccggttccggggcttatccggctgggtgaacacgccgcagatctcgtggccgtcctccaccagtcgcttcagggacaccgccgcgaaatccggcgtgcccataaacaggatgcgcattattcctcgtcctccagatagtccttcaattcctcctcggtgaggaagtggtcgatgtgctccacgaacaggtggccgtccagatgctcgatctcatggcagaaggcccgggccgtcagcccctcggcctccgcctcgaaccagttgccgtcccggtcctgcgcccggacccgtacccggttgggccgggtgacgatgccccacttgccggggacgctgaggcagccctccagcccggtctgttcgccgctctgggcgatgatttccgggttgatgagctccagatattcttccgcttcctcgtccagcaccaggcagacccggcgcaggatccccacctggggcgccgccagtcccgcgccgttggcgtctgccagcgtctccgccatatcgtccagcaggtcatgcagccgccggtcaaattttgtcaccgggcggcagacctttgtcagacactcgtcgccctgttctacgatctttcgtaatgccatgaatggcacctccttgatttgatcacggcggtcagtccgccgcgttatggtccacaaacagattcatgccccggttggcgctgtctttggcgaagtctttttgcagccatgccagcatttcccgggtggccttatcattctttcccaccagtgtgcagcggtagcgaaaccggttattcaccttcaccaccggcgcgggggcggggcctaagacctccggctccccggcggccagttccggccgcctgcaaagctgccgcagcgtctcccggacggacacggcggcccggagcacccggccctcctccgttccggaaacggtgacagtgaaaagatccgcaaagggaggataccgccgcagccggcgcatccggatctcgctttcgtaaaaagcgtcataatcctgccgggcggcgcaccggatcacatcgttccccggcgtgtaggtctggatcacggcccggccggttttcccgccccggcccgcacggcctaccacctgggtcagcaggctgaaggtgcgttccgccgcccggtaattgtccacatacagggaaatatccgcggagagaacgcccaccagcgttacgttttcaaaatccagtcccttcgccaccatctgcgtccccagcagaatggggacacgctcccgctcaaaggtctgcaggatctcctcatggcccccggcggtggtatcggcgtccatccgcaggatgcccgcctccgggaacagttcccgcagttcttcctccaccttctgggtgccgacgccaacatgcttcatccagccgccgcattccgggcaggtgtccgccgccggttcggagtgtccgcagtagtggcacatcagccgcccgttggcggaatgataggtcatggcagtgctgcaccggggacactggggcacatagccgcactcgccgcacagcagcatccggctgctgccccggcggttcagaaacaggatactctgctcccccgccgccagattttttttcagttcctgccgcagcggggtgctgatcaggcccgggttgccgttcaatatctcctgccgcagatccgcaatgaggacctccggcaaggcgttttcgttgtagcgccgccgcagcagcgccttttgatagcttccctgttccaccgcccaagcggtctccaccgtaggcgtagcggaaccgaacaccagcgccgccttctcccggacgcagaggtatttggcaacctcccgggcatcgtaccggggtacgttttccgactgatagcttccctcctgctcctcgtccatgatgatgaggcccagatttttcaggggcgcgaacagagcggagcgggtccccagcaccacgtccacctctccccggcggatgcgcttccactggtcatagcgctccgtcattttcagggagctgtggagcatggccacccggctgccgaagtaggagctgaatttccgcatcatctgcggcgtcagcacgatctccggcaccagcaccatagcggtttttcccaacgccagcgtttcctgcaccaagcgcagataaacctgcgtcttgccgctgccggtaacaccgtgcagcagcgtaaccgacggcttttccgcctgtacccggcctaaaatctcctcaaaggcccgctgctgttcttcgttcaaaacgatctccggccccggctccacatcgtccaaggacggcacccgcagctcctcctcctcggaaaaggcgatcagtcccgccttctccatggtcttcagcgtccgggaggaggccccggtataatagctgacctccgctgccggggtccgtcccgccgtggctaagaagttcaccacctcgtaccgcgccggggcggagcggcgctttggctccgtcagagcgtaggcgtcctccgtgttgacggccagctccaccatccggtgagacttgtcggcgatcttgcgcttggcgcctgtttcgcaggcaaggatctccgcctttttcatggccttgaggggcttttccgccccgtcgcccaaggcgtcccgcaggacgcggatatccgccttgccgccctgcttttccagcaggtccaacacctgccacgcgccggggatgcccacagcagcggagcgggcggcctccggctccatagccagcgaccagatctcccgcagaccgtaccacagtccggcggggagaatggttttcaccgcctcgaacactgtgcagaaataccggccccgcatccacagcgccaggtcgataccggccttgtccagcaccggctccgaatccaatatctgccggagcgctttgctccccggcagcttcggctcctgaacacgggccaggatcaggccctcgctctccttattgccccgaccaaagggcaccatgacccgaacgccggggactgccgccgctgccagcgattccggcaccagatagctatacggcttatcaatggaatagggcgcggcgctgaccgcaacctttaccatgtccgcggtctccatgcctcgccctcctccgatgatgtgttcgatcagttatcgacagaaatggtcagatccataccgctggcgtcgatcttaccgtccgcaacctcatggatggccagagtcacgggcttctcgtccagctggacgccggcttcctcggcatcgtcggcgatctggcgggcgcgaagggccaccacgttcaccagcatataacggttagggatatgacttttcagcttgttcatagcgggatacagcatcataatattctacttccaatctgccgctgtgcggctttaattttttattgtatcagggaataaatggcggtcactccgccagaacagacatacgctccttgggcttgcagtgctcggcggtgatgatggcgtccagttcccggacggcatcctccaccgtatcgttgatgacaaaataatcgtaggtatgggcagtctggaactccaccttggcccggagcagacgcttctgcactttctccggatcgtcggtgccccggtccttcagacggcgttccagttccttccagctgggcggggcgatgaagatcttcaccgtgtcgggccgcttgctggtgacctgtaaggcgccctgcacctcaatgtccaggatcacgtcctgccccttatccatggcctcatccacgaaccgcttgggggtgccgtagaagttgcccacatattcggcgtattccagaaactggtccatggcgatccacttgcggaaggactccgcatccataaaatgataatggatgccgtccagttcaccgggccgggggtctctggtggtggcggacaccgaaaaatacaggttcttccgcttctccaacagagcgctgagcaccgtgctcttgcctacgccggatgggccggaaataataaacgtttttcctctcatgatccctctccctcttgctccttcgggctgaaccgctccggcggcagcgccgataaaatcacgtgatcgctgtccatgatgaaaatggacgcggtcttgcggccgtaggtggcgtcaatgagcataccgcgctcccgggtctcctgcaccattcgcttgataggcgcggaatccgggctgacgatggccaccagccgctcctgggataccagatttccaaaaccgatgttgatcagcttcatggctcactccacattctggacctgttcccgcatcttctccacctctgccttgagaccaaccaccacctgggcgatggccacgtcgcagcacttggagccgatggtgttggactcccggttgacctcctggatcaggaagtccatcttccggcccataggctcatcggattccagcatggtccgcagctgggccacatggctccgcaggcggacggtctcctcgtccacggccaccttatcggcgtagatggcagcctcctgcaggatccgctgaggatcgatggtggtgctctgaagcacttcctccatccgggccgtcagcttggcgcggtactccgtcacagtctccggggaacgctgctccacctgagacgtatagttctcaatataggtcaggcggttgccgatgtcctccgccagcttccggccttccacggcccgcatggcgttgtaagcttccagcgcctgctctgccacggcgcacaggtccgcagacaccgtttccagatcctcgtcctccttcgtcaccgtcaggacgtccggaaaccgggaaagctgctccggcgtcaccttggactccgtgccgcagacctcagacagctctgccagtgcagcggcatactgggccgccagttcccggttcaccgtgaccttggccacgtctgcggcggaggcgtccaccgtgatgaacacatccaccttgccccgggagatggccttctggacgcactgcttcacggcatcctccgcaaagctgtacatccggggcatcttcacggtgcagtccagataccggttgttgacggagcggacctccacggtgatatcccgcttgttccgcacctctctcgcccgaccgtagccggtcatgcttttgatcatgctgattcctcctattttacggggaaacgccttccgcaaatggtcattcttccctgtcagagcacgtttccgccggttttacacgttatttatcagcagtagcagcagattggcacactgccgctgcaaagtgaccacaggcagcacataggcaggcacagattactgccgcacaggtccgtcccaaaggtggttccacccggcgtgtaagcctgtcgggggccgttttccatatagtccagcgcccgctgatattccagattgccggggtccatctggcaggcggtctcatagtaacgcttggcctcgtccatccagccccggcgggcacatacaacgcccttcaggaaattccactcggcattgtggttgctgtaattggtaagcagcgcctccgcccggccaagatctcccagctggatggcatagcgcacctgctgaaacacgctgtccccgccggagtagctctggccgccgtacccgccataggcgttctggcgatagccgccggcgggactgtctccccgtccgctgcgctccttggtgatctgctcgtaagcggcgttgatatccttcatcttctcctgcgccagatcggccagagggctgtcatgataattgtccggatgatatttccgggccagattccggtaagcctttttgatttcctcatcggtggcggtccggggaactcccaggacttcgtatggatcgttcattcggtttcctcaaactctctgatattctttctgctgggacgatggaacctgccgtccagcacggctttccccacctgaaacagccctccgtaaaaggtggactgcaggaccggcgtccacacgccgaaatcccacagctcaaaggctgcggccatctggtggatggaatggtccagggtcgtggcaaagtccctgcggctctccggcgtccatacgccgtctgtcaatccgtaccgcagagctaccggattataattgccgctctccgcatcttttttcaaatcgtccgccccgtcgatcaggtagatccagcggcccagatgatacaaaagctgctccatgatccgcttccggacggggtccgtcagctcctccgcagcgctggaaagcagtacggcaaagctgtcggcggctctgtccatagacgggtcctttgcctgctccaatgtgctcaggagctgaagctggcggcgcaccgcctgatcgaattccggtcgaagggccgccgcccgtttgtaagcggattccagcagacgggcgcctgcccggtatttcaggccggagacccaagcgtgatcctccacgccgtcccgcagctgccagtaggctaagatcacgctctcgtccgccgccagctccatagcagcggtaggctctaaaaatggccgctttttgatcgggctggtatagcaccgcccggctccctgcgcccctgccgtcccatcggacagcaggatggcaagataggtaaaatcgtagttcaggatgaagcgggcagcttgtccgtaccgccgggacagggtgtggcacagtccgcagtacatggcgcggaaccggtccagttcctcctccggcaaatcccggacggagggccgcacatatccgaacatcagaacacccgcacgatggtgaaggacaacccgccccgggccttcacccggcggtcataccagatggccagtaaaatgcccagcacggctccggccactgccgcggtatactgcacagccacgctggtgttgcaggccagcatgatcaggtatcccgccagaaacaggatcaccgggatcaggtaaacaaagctgacgatcttgagcattttcttcgtgtcgctctccaccaccaccttctggcccggccgggcaccgacggtgttcagcgccttgacgtaaacggaaacgccgctgacgccgcagcccgcgcactcctcgcagtcatggccgcaggcggacttccggggaacggagatctccgcgtgggtatcgtccaaaattctttcaactgttgcaatctgtgtcatggtatcgctcctaattttctgtcaaatgctgtgggccgcgccggttcaggattcgggaatacggacctgaatctgataggttccggaaacgccgatggtctttccgtctcccacccggacctgagccgggatcatataggtgccggaggccaccgcgtaatcgctgagatccgccaccactgccacatcttcaccggtgatgccctccatctccaccgctgtgccgaagatccgcacggagagttcctgtgtcagaagctccacgttccggctggccgaggcgttttccacccggatgttgtgagtggtcacatccgccaccgtcttatccggatagccgatctccagtgtggcccgggtcacgccactgagattctcgcagccgtccggcaccagaatggcgtagctgtggctggtgctttccgtggtcacgctgagcagatcaaagctgtccagcacaatggaatccatatcgttcagaacagaggcgtcaccggaaaccacaacgctctccggcttgatggcccagatcatgtcctccagctgtgcgccgggagcttccttgaagtccaccgtcagcttcagctccttggtgacgtacaccggcagagtcgcctggatctgacccgcctcggcatggatgccggagaggttcagcacctggccgtcctcatcatagaactgataatccagatccgccgtgacggtctccttggtattcttgccgatgtcaaaaatcaccttggcatagctgaccttggcaatttcctcttcctggccccggacggcgatgctggtctgagaaagctggaccttaccggcggaatagccctccgccacattgccggtgagctcgcagcgcagctccacttccttatggctcagttcgcagatgttgaccgtggccatatagaggctctgctcctctaccgaggtattgccggagttgaatttccggtccgtataggtcagatccggcttcacgctctggacgccggcctccgtgatactggccagattggccgttacccggatcttggaacgatccagttgaacaatgtgccgccggtttcccttaaaggtgatgtcgatggtggtgctggtaccgctgtcctcgccttccgccagcatcagcccattgtctgccagtgcgtcctgattgatatactcaatggggatccccgtaacggtctgggtcaccacccggccgttgaattcgtccacatagtaccagataccggcggcgatcacgatggataggaccagatacaggatattccgcggattctgtgtcttacgcatcttcctcgcctccattctttttgctccgcaggaggttcagcaggttgaacttcagacggtcctcgctgtcttcctcccggggaagcaattcgttccgcaggagattttccagcgtctccggcttgagatgccgcttgagcattccgccgatggccacggaaatagacccggtctcctcggagacgatgaccaccacggcgtcggagttttcactcataccgataccggcccgatggcgcatacccaagtcgcgggagaggttcacgttcttgctcaggggcagcatacagccagcgcccagcacccgcccatggcgcacgatcaccgcgccgtcatgcatgggggccttgacgaagaaaatgtttttcagcagctcggcggacactgccgcgtccagcaccgtgccgctgcggaccatatcgtccagcagaatctcccgctcaaagacgatgagggcgccggtgcggctctgggacatttctgtgcatgccagcaccgtctgtccgatggcctgttccatcgtgctggcggattcctcatggatgaagaaggccaccagacggcggctgcccacctgctccagtacccggcggatctccggctggaacagaatgatgagggccagcaggcccagattgaccatgcgggtcatgatgtaattgatcccgttcagatgcagggcagaggacagcaccagcgccgccaaaaagatcagcagtccctttaccagactggccgccttggtgctctgcaccagtgtgaaaattttatagaggacaaatgccatgatggcaatatccaatatatctgaaatccgaatggtcagcagataccggacgacccagccgctgacctgcgcgaacgttacattcatcgctccaactcacctctctgcgggttataggcattcatttttatattatagagaagcggactgtaaaattcaaggaaaaccgttaaaaattcatggtccgttcagaattattttccggtttccatggatatccaccttgttaccgtttcggaacaggaaaaacccggagcactgctccgggcttgagactgtcgataaagtggtaaattctccgcgacggtaaggtagggcagccgttagcggctccgccgctttacggatgctgcataccccttgcgggtgaaaggtgtgcgcgggaaacccaagaaggggaaacgggcgatgcgccgccagcggcggagaaagcgagcccgtttcgaggaaggcccccgatttccgggcgcaaagcgcacggaaaccggctgggccgacagtgtattcctgccccatgcggagcgaaaagactttttcgacacgctgaagcccggagctgtgctccaggctttcagtttgtcttgggtcttatctccggagaatatctcccacggcctccgccagccggtccgcctcctgaggcgtgttgaaggcggaaaagctgacccggaccgtgccagtgtccagcgtcccggcggtgcggtgggccagcggcgcgcaatgcagccccgcccgcaccgcgatcccccgccgcgccagcgcttcgcccacggtctccacgtcccgccccggcacccggaaggacaccactcccgcttgggccagacagccgggatgggcgaacacctctaccccgggcagccggcgcagactctccgccgtccggcaggtcagggcgtgttcatggcgcaaaatggtctgtgtcccctgtcggcggacaaagcgaacgcccgccagcaggcctgcgatccctggcatattgtgggtcccggcttctaagcggtccggcaggaagtccggcatctcctgactgagagaaatactccccgtgccgccctccagcagcggtcttgggatctgaccgtccccgcacaagagcacgccggtgccctgtgggccgtacagccccttgtgtcccggcatggcaatatacgccgctccaaggcttttcatattgatcggcaggataccggcagactgggaggcgtccacgatcagcggcaccccccggctgcggcaaagcgccgccaccttttcaacgggctggacaaagccgaacacattggacacatgattgcagatcacaacgtccacgccgggcgcgatcaactcgtcaaaggcccggatcgctgcctcctgatcgaacagcggtccgcctgctacggacaccttggcttttagggccgtcaggggccgggtgacggcgttgtgctcatatccggagatcaccacccgtccgccagggggcaccagacttttgatggcaatgttcagggcatgagtggcgttcagtgtaaaggccacgccctccgggccgtcaaggccaaacagctccgccagctccgtgcggcaccggaaggcggtgtccgcagcccgcatagccagcggatgcccgccccggcccggcgaactcatagaggccagcgcctccgtcatggcccgccccaccgcaggcggtttttggaaggtggtggccgcgctgtccagatagatcataggcccacctcctgaatatccccgccccgctgcacatagatccgcagggggccaagtccctcccgccgcaggagcggcagggccgctcccagatcgtagggcgagatccgcaccacataggcgcagcccagatccgtcaggtcacggggcgcccgaaagagctggctgcggatccctgcacggttcaacgctctttgcatccgctgcgcatacgtcacggagcgggcaaggatcagatcatattccacgcttgttcctccttctcttcgctctttctgcgacgcgagcataccggccttacgtccggtatggcagcgtagaaaaaaggagacgtaccgaatgtacgtctccttgtaatatatgcaattgcccggtcatttgaccgtctcgatcaaagccacggcatgggccgccatcccggagccgtccccggtgaagccgaggccctcctccgtggtggccttcacgttcacccgctccgggtcgatgtgcagcaccattgctatgttttccgccatctgctgccggtaggggcctaccttcggagcctgcgccagcagcgtggcgtcgatgttcaccacggcgcggcccgtttccgccagcagccgtcctacctccgccagcagcttcagactggaaataccggcgtaggccgggtccgtatccgggaacagcttgccgatgtcccccagccgggcagcccccgtcagagcgtccatcacggcgtggaccagtacatccgcgtcagaatggcctaaaagtcccttttcgtaggggatctccacgccgcctaagatgagtttgcggccctctgtcagccggtggacatcatatccgtgtccaattcgcaggtctgtcatcagcgtccctcccgttccgctaaaatagcctccgcgatcaccagatccactggggtggtgatcttcagattttcctcgtcgccgtcgatgagatagaccaccttcccaagccgctccacagcagagcagtcatcggtgacgggcacctcgttttccagcgccgactgcaaggccgccttcagcagatccgcctcaaacacctgaggcgtctgcactgcccggagggtactgcggtctggggtgccggtcacggcgccgtcctcggccacggtcttgatggtgtccttcaccggcaccgccggggccgccgcaccgcacttggccgccgcctccaccgtgcggtcgatgagcgccggcgttaccagcgggcgggcgccgtcctgcaccgccagcagcttcgcctccggggaggcttccaatgccgccagcagcacggaatgacaccggctctcaccgccccgcaccaccttgctgcatttcgtaatgccgtaggtcttgcacagggtcgagatgtccaccagtgcgtcctcccgggcggcaatgacgatctcatcgatagcggctgcccgctgtaacgctgttagtgtccgcatcaggacaggaacattgtccagaaattccatcagcttgtctgtgccgcccatacggctggagctgcctgccgccgccaccagcgccgtgcagaatggccggttggcctcccttattttccgaaacagggaacgcatgatcccctcacccctttttgtctatgtttttcctgaccagccacataaccgccagcagtacggcagccagaaccgccgtaatgatcccctgaatttctaaatccacataccagggtgccgactgcatagcgtacagatccggacgggccttaaaatcaaagtacaggtagatacatcttcctaaaaatataccgatgctgcatccaagaaagagcttcagcgtcgcgtacagccgcttcatttcagcagctccgcgaattcgtcctccgtcagtacggggacacccaactgctgggcctttgtcagtttgctgcccgcagcctcgcccgccaccacataggtggtctttttcgacacggagccgctggccttgcccccccggaggacgatctcgttctccgccgttttccggtcaaatcgggtcagggtgccggtgagcacaaaggtcatgccggcaaagcggtcatccaccttctgaacggtgctgtccatattgaccccagcggccttcagccgggcaatcaggtccttggcctgaggctggttcaaatagtccacaatgcacttggccgtgatctcacccacatccgggatctccgtcagttcctctgtcggagcggcggtcagggcattcagggtcccaaagtgccgggccagcacagcggcggccttctcccccacctgacggatgcccaagccgtagatcagcttgctgaggtcattggctttggatttttcaatggcccggatcagattctccgccgacttcgcccccatgcggtccagctgggccacatccttcgcatgaaggtcatagagatccgccacgttggcgatgagtccgttttccaccagctgggccaccaccgccgggccaaggccctcaatgtccatggcgtcccggctggcaaagtgggtgatgttccgctgaagctgggcgggacactccgcgccggtgcagcggagggccgcgccgtcctcgtcccggaccaccggcgcgccgcagaccgggcacacctccggcagggtgtagggcttcgtcccctccgggcgcttcgtcagatccacggacaaaatctccgggatgatctctcccgccttctgaaccagcaccgtgtctccgatgcggatgtccttttccgtgatgaaatcctgattgtggagggtggcgttggtgacggtggtgcccgccagacgcaccggggtcagcaccgccttgggcgtcaggacgccggtgcgccccacctgcaccacgatgtccgtcaccgtggcgtatttcttctccgggggatacttataggccacggcccacttggggaatttggccgtggagccgaggatcgtgcggtccgacaggctgttcaccttcaccaccgcgccgtcaatatcaaagggatagtccatccgctcgtcgttgatgcggaagatctccgtctggatctccgatgtgccgcggagggtcttgtggggaatgaccttgaaccgctgggaggccagatagtcaagggtctccgcgtgggaggtgaattcccggccctccgccaactgcaaattgaacacggcgatgtccagctgccgctgggcgcagatcttggaatccagctgccgcaaagacccggcggcggcgttccgggggttggccatcagaggcttgccctccagctcccgcttggcgttgatgctctcaaacacggaccgggccatgtagacctcgccgcggacgatgagccgaggcagcttttccggcaatgtcatgggaatggaacggacggtgcggaggttttccgtcacgtcctcgcccacccggccgtctccccgtgtagcgccccggacaaacacgccgtcccggtattccagcgccacggacaagccgtccaccttgggctccacggaatattccgccatggggccgagggcctcctccatcttctcgcagaaggcggctacctccccctcgttgaacacatcctgaaggctttccaagggcacctcatgggtgtagggctggaaggaatccagaattttgccgcctacccgctgggtgggggaatccggtgtgatctcctccgggtgctcagcctccagttcctccaggcggcggttcagacggtcatattcatagtccgggatcaccggggcgtctaaaacataataaagatacccctgttccgtaagataggcccgcagaaaggccagttcgtccttgtaatcggcaaactccgtgcgaaattccatggagcgtcctccttagtctttgttgagtatgtagtccttggcgtcactggcatacgcctccgggtccgtcgcaaaataggtataggtccccggcacctcccccacgatcaccgtttccgccacggtgatctcgttggtcacctgcgtcacggtggaatatcccggcaggaggatgctgacgtacacgtcgatccgcagaacgatccggtgcttggtctggttgatcccggcggactcgaactggttttcaaaccgggccgacgaggatcccaccgactccatccgcacggagatccgaggtccccggcccgccagcagaggcgaaccggtcagactgcccaccgggatggacaattctcttgcggaaacctgatcaatgcggcccaaaatcagatccaagatctgggattgcagccggttaaaggccgccatgttgctgcgcaccatggtgatgcggccctcgttgtccttttcgtagctgaccagctgctcataggcaatctgcccgctgtcgatggcctcgttcaccgcctgatagacgatgcggttcacggcgttggatacccgcgtggtggcaaggctccccagcagaggccgcatctgtgcccccgcgtacagggcaaatgccaacagcccggatatggccaacagcagcagcgcccgccggatctgggggccatccggcccccggtgatagtagaaaaatccgggacccacagccccacctcctccgctttcggctcttatcagcttatgcggaagggcttattcattatttcagttcgttgacgatagccttgaacacctggccccgctccatgaagttggcaaagcggtcaaaggaggtgctggccggagacaggatcaccacatcccccggctgggagcgggcgtcggcaatggccaccgcctcgtggtaatccgctacgtcgaggatctccaagccgtgataattttccgcctgctccacggcctcccggatcacacccgccgttttgccgcacagcagcagcagcttgacgtgatcgttcaccacagggccgaggggggcgtagctgatgcccttatccttgccgccggcgatgaggatcacctgctccgggaaggaattcaggcctgcgatggtgcggctggggctggacgcgatggaatcgttgtaccaccggacgcctttccgggtgcggatcagctcgatccggtgctccacgccgccgaaggtcttagcgatctcccgcatggtctcatagctgaccataccccgcacggcggcaaaagccgccatgtagttttcaatgttgtggacgccgggcagaaggacgtcctttgtctccattatgggcgtcaccgtgccgttggcggcctcgtagatcacaccgttttcgcagaatacgccgttgtccacccgctgcttccgggagaaccaacggacctcgcccaccgctttcgcggcctgctccaccgtatcggcgttgtcggcgttgaacacagcaatatcgccggcagtctggtgtgtaaagatgtttgcctttgcattcacatactcctgatagtccttgtggacatccagatggttaggcgccagattggtggtcactgcgatatgggggcttgtttgcatggtcatcagctggaaggaactgagctccagcaccgccatatcctccggtgcgatctccggggtgtcgcacagcagcggatggccgatattgccgcccacatggacgatcttcccctccgccgccagcagcttggagataatggtggtggttgtcgtcttgccgtcggaaccggtcaccgccagaatgggacaggggcagactgcaaagaatgcctccatctccgaggtggtgacgctgccgccggccacagccgccgccagttccggcacatccggccgcagaccgggggtgcggaagatcacattctcatggaggtccgccaggtatttgctccctagccgcagcttgcagccctgagccgtcaaagcctgccccagttctcccagatcctcttttttatcccgggcggtgacgtcgatcccccgctccaggagtttttcgatcaggggacggttggatacgcccacgccgatcacacctaccgtctttcccttcagggaggacagatattcttcaaaggtcataaaaacgctcctttataaaagccgtctatcatcgcggctttcgcccggttatcataccacacgccgcaaaaaaattcaatgtaagggttctgtttttctgtttctcaccgggccgctccctccctttgacctttttcgatgttctttcacttgacaagcgtccgttttgcagataaaatgaaatgtagtattgaaaactattttcgccgatccactgtcaacatcctgtgggtcgaggtaggagtgtgtcatcatgttgaatcttgtcagcgacagcagctgtgatctgatctccggggaactcaattccccttacgcccgtctgacagtagcgcccatgtgcctgcacgtcggcggtcaggactatctggatacgccggagctggatattccggtattgctgagcaagctggcccatcaccgttcctcttccgcctgtccctcccccgccgcctatgccgaagccttcgagcagggcgaggaaaccgtctgcgtgaccatctcctctcagctttccggctcctataacgccgccatggccgcgagagatctggttctggcggagcacccggaaaaaaagatttttgtgctggattcccgtgccacctccggcgctatgatcctgctgctgcgcaaggccgccgagctggcggaacagggtctgccttttgaggatctgtgcgcggagcttcaggtttgtcagaagaatacccgtctctgcttcacgctggagcattttgacaatctggtgaataacggacggatgccgcctctggccggcaccctgctccagacgctgggcatccgcattgtcgcggaagccacggccgagggtacgatccgcgtggcaaaaaaggcccgtggcgaggcccacaccgccagagccatcgcccagctcatgagcgatgccaaggactgcaccggcagccatgtgatcatcacccactgtcagaatcccgaaggtgctgagcggctgcggaacgcgattctggaccgtctgtcggtaaaggctgtggagatcctgccctgccggggtctcaccagcttctacgccatggacaagggactgatcctctcttattgatcgacttcccattgacttttcccgctgttttgcgtacaatagacccgcgaggaaaacagacagtcgcgcggaaggggcgaaagacccttccgtgaggaaagtccgggctccacagggcaaggataacgggtaacgcccgccgaaggcgacttcaggaaaagtgcaacagagatataccgcctcgtcgtcgcaagcttcatatcctttgccgcgccgcacgcggcacggcgcactcattccgctgcgcctcctcttccgaaaagaaccgctttgctgggttgggttcttttcggagttacgggggtaagacggaggatgcgaaaggatattgagcttgtgatgacgaggtaagggtggaaaagtgcggtaagagcgcactcgatggctgggaacagtccatcgctgtaaactctatccggagcaacaccggtatgggagcaggggcttcgggtcccaaggctggcccggccgctcccggggtggcttgagcgtaccggcaacggtacgtcgagatagatgactgtcaaatacagaacccggcttatagttttgctcgcgtatatacaaaagggacagcggaaatccgctgttcctttttctctttgcaattccgaacagatgtgctatactcagcatgatgtaaggacattcttattttcatcacaactgcccggaaaggaggcgcacatggaccgggtcatttttcactgcgatctgaactgcttctatgcctccgtggagctgctctctcatccggagctgcgggaggtgccggtggctgtggccggtgatcccgcctcccggcacggaattattttagcaaaaaacgagcctgccaagcagtgcggggtcaaaaccgccgagaccatctggcaggccaagaagaaatgccccaatctggtgctgcttcccgcccatcacaagctgtatcgggaatattccaaaaaggtcaacgccatttatgacgaatataccgatttagcggagtccttcggcatcgacgaaagctggctggacgtgaccaacaccctccacctgttcggcggggacgccaaggcgctggcgaacgccatccggcagcgggtgaaacgggagctgggattgaccctgtctgtcggcgtcagcttcaacaaggtctttgccaagctgggcagcgattataaaaaaccggacgccaccaccgttatttcccgggaaaactggcgctccatcgtctggccactgccggtgggggacctgctgtatgtaggcggcgcggctcaaaagctgctgggacaatacggcgtcaaaaccatcggccagctggccgcctgcaagaaggaaacactggagaccctcatgggcaagatgggcacccagctttatgaatacgccaacgggttggacagcgctcctgtccgggccagactggacgcggagccggtgaagtccgtgggcaacggcaccaccttcccccaaaacctcaccacccgtattcaggtgcgctcaggcatcgccgttctggcggactccgtggccacccggctgcggcgggagggactgtacgccgggggcatccaggtcaccgtccgggacccgaccttccatgaccgctcccggcaaaagcagcttcccgcccccacccatctcatcctggatctgaccaacgctgccatggctttgacggaggagctgtggacacccccggcccccatccgggcgctgaccgtcaccgccatccacctgtcctctgacggggaagcctatgagcaggccaatctgttcgaccctactgccgggcagcggaacgcccggcaggaaaaattagagtccgctatggacgccatccggaaaaaatacggcggaggcgccatcgtctacggagccgcccgcccagagaaagaggaggaccccctgccatgacccgtcaggaagaaaaacagcagctccgcgccattgttcgccgcttagaggcggctttggccccggaatataaggcaaaaagcgcccgctccatcgcgcatcgcctgttggccatgccggaatatcaggaagcccagacggttttctgcttcgtgggcacagatcgggagatcgacacgcggccgattttagaggatgccctcgccgccggaaagaccctctgcgtccccctgtgcaccgagccgggccgcatggagtcccgccagatcacggacctgaatcagcttgtccccggccgctacaggcttttggaaccaacggcagacgcaccggtcgttccggtggatgccatcgacttcgccgtgctgccctgcgtcacctgcaactatctgggccagcggctgggccgcggcggcggatattatgaccgctttctctcccagtaccggggcggcacggtgctgctgtgccgggaactgctgatccggcaggagatccccgtggaaccccatgactatcccgttccctgggtcctgacggagcggggactgtatgaggatggaattcccgcccccctcggataataggtcttgcgttttcagctttcatcaggtacaatatgtagtatctttttacaaggaggggctttacatgatcgttcaggataccatgcagtatctttctcagttagacccggaggtgggcgcgtccgttcaggaggaatttgcccgccagcagcgcaatattgaactgatcgcttccgaaaacatcgtcagtcctgcggtgatggtggctatggggacctgccttaccaacaaatatgccgagggctatcccggccaccgctattacggcggctgctttgcggtggacgttacggaggagctggcccgccagcgggcctgccagctattcggctgcaagtatgccaatgttcagccccactccggtgctaacgccaatctggcggccttcttcgcactggcgcagccgggggacaccattctgggcatgaatctggcccacggcggccacctgagccacggcagccccgtcaatatctccggcaagtatttccatatcgtgccctacggtctgggcgaggatgagaccatcgactatgacgcgctgctggagaccgccaaggcctgcaagcccaagatcatcattgccggtgcctccgcctatccccgggtcatcgacttcgccaagttccgggaggtggccgatgccgtgggcgcttatctcatggtggacatggcccacatcgccggtctggtggcggctgggcttcacccctcccctattccctatgcggacgtggtgaccaccactacccacaagacccttcgcggtccccggggcggcctgatcctctgcaacgatgaggccatctacaagaagatcaattccgccgtgttccccggcactcagggcggcccgctggagcacatcatcgccgccaaggccgtctgctttggggaggcgctgaagccggaattcaaggcttacgcggagcagatcgtgaaaaacgccaaggtcttggcggaggaactggtaaaagaagggttccgtctcgtctccggcggcacggacaaccacctctgccttgtagacgtgcggaatttccacatcaccggcaaggagtttgagcggcgactggacgaggttcagatcaccgtcaacaaaaacgccattcccaacgacccggagaagccctttgtcaccagcggcgtccgggtgggtactcccgccgtcacctcccgtggcttcaaggagcctgagatggtgcagatcgcccactggatgggccagacggcccgggacttcgacacctgccgggagcaggtccgcagcgaggtggatgccctctgccgcaagttccccatctaccagtaagccaggcggatcagcggttttttccggcgtaaatcccgccaatttccgtaaagtgtttttacttttcatagattacaaaaccagccatgccgaatgcagcatggctggttttttgccgtcgttcctaagaaaacacccacgaacatttttcgttcgtgggtgccgttgtttacctgtgaagcaggtccgtgccgtccggcagggtgaaggtctccgccggaggagccgtctggtccgcctccagcgccgccatccggtaaacggtctcacccttttgcagacgttccgccaccaccagcaggcccgtgtccacactgacccagtaccgctgggcatagccccatgcgtcctccgccgtttccgcgtagatgcagcgcacatcggacaccacccggtagtccgcctgaacgatgtgatcctgcggtaatgccagcacatcctcatacgttggaatcgtctcctctgcgtcggcggagatggccccggcggggccggtatatacctccgactccccgttataccagatgtaggtagtctcgccgtcggtaatgctgtggcggacctggccgtccggcagggtccgatccacgcgggtccacggggcactgaccgccgtagacagctcgatggtgccgctgccgccggtccagagatactccactgtgaccgtgcggctgtatgcctccggccggtgcagcgtctcaatggcggcctgcaccgtttccggcgtcacctccaccactgtcagggcgccgccctccgcaggcaggtctccgccgccctcggcactggtattggtgtccggcaggaccacccgggaggaacggcgcaggttgctcaccagcatcaacagcaccaccagcaccaccaagatcacaatgccccatgtcaccagcttctgtgtccgcttcatgccgtccctcctcccctctcatttacgcaaggtcctccgccggctgctcccggcggccaaagtaccacaaaatgtcatccacgatccggcggcaggcctgtccgtctccgtaggggttcacggcatgggccattttctcgtaggcggacttgtcccggatcagccgctccgccatggtcacgatgtcgtcctgcaccacgccgcagagcttcaccgtcccggcggccactgcctcgggacgctctgtctcccggcgcatcaccagcaccggcttgcccagcgcgggggcctcctcctgaagtccgccggagtccgtcagcaccaggtaagaccgggccatgaggttgtgcatctcgtcggcaggcagcgggtcgatgaggtgcacccggggcgcgccccggagataggtgtccaccgcttcccgcaccaccgggctgaggtggacgggatacaccagctccacctccggattctcctccgcgatctgccgcagcgccagcataatgttcttcataggctcgccgtaattctcccggcggtggcaggtgacgaggacgatctttttctccccgtagggcaggtggttcaattcgtccgtggaaaatttgtaattctcccggacggtggttttcagcgcgtcgatcaccgtattgccggtgacgaacagcccctcggtgatattctcccgcaggaggttattcttgttgttcaccgtagggcagaaatagagatccgcaatggaggaaaccagctttcggttcatttcctccgggaagggcgaatacttgtcataggttctgagaccggcctccacatggcccaccttcacctgatggtagaaggcggacagcgccccggcaaaggtggtagaggtgtctccgtggacaaggatcatatccggcttcagggtatcaatggcctcgtccataccggtgaggcacttgctggtgatggtggacaaggtctgccggggggtcatgatgtccagatcccagtcgggctttacctcaaaaacctccagcacactgtccagcatctgccggtgctgggcggtcacgcagcaaaggctctcgatctccggccgggaggccagttccttcaccagcgggcacattttaatggcttccggccgggtgccgaaaacgctcatgatccgcagcttattcatggctgccgtcctccttctgcttgtctttttcctcgtgatggcccaactctgtcagttcttccagttcctcatggagctcctccttcacttccttggggaacaccacccgggcggccacaaccgccacaacgcacagagcgatcagcagcagcatggccttcgcctcgccgccagtggtcagcaccacggcggacaggcccagaataccggaaatgacgtacagcgttgccaccgcctgcttctggttcagacccatgtcgatgagccggtgatggatgtggccccggtccgcgtgcatggggctctggccgtgggccatccggcggatcatggcgaaggctgtgtcgaaaatgggcagacccaggatcaaaaacggcacggcaaaggagatcaccgcgtagaatttgaaaaggccctgaatggacatggtggacagaatgaaacccagaaatgtagcgccggtgtcgcccataaacatcttcgcggggttcaggttatagggcaggaaacccacgcaggcccccaccagcgccgccattaccaccgccacctgggcgtcggaggtaatcaatgcaatcaccagcactgtggcggcggagatggccgacacgccgttggcaaggccgtccaagccgtcgatgaggttcaccgcgttggtgatacccacgatccacagcaccgtgatggggacggacagccagttcagcacccaataggcattgggagaaaagatgttggggttggataacgcctgaatggacacgccgttcagagccgggatcagcgccgccacgatctggatcacaaatttaagtttagcgggcagggccatgatgtcatccaccacacccagcaccacgatgatgaccgcgcccagcaggatgctctgcatctggggattcagtcgaatatccacgaacagcaggatgctggccataaagccggcgaagatcgccagaccgcccagccgggggatgggcttgtggtgcatccgccgctcgtccttgggcacgtcgatcgcacccaccttgtaagcaaagctcttcaccaccggtgtcatcagaaagctgatcaccagagccgtcagcaatgccagcgccaccggcgccatcagctgattgtcaaatctcatgtttcctccgccgttaccgggccaggaagcccacttttttgtagaccttggacagggtgcggttggctacataggcagccttctccgcaccggcgcggtacacgctctccagataggccttgtcagccagcaggcgctccgtctcctcccggatggggcgcagcagctccaccacggactcgcccacggcggtcttgaagctgccgtagccctgaccggcaaattccgcctcaatagccgcgtaatccctgccggtggccacagagtagatctgcatcaggttggagacgccgggcttgttctccgagtcaaagcggacgcaggcgtcggaatcggtcatggccttcttgaacttccgcaggatatcctccggcttttccagcatatacacgcagccgttctgatccttgtcggacttgctcattttgctggtgggggtggtcaggctcatgatccgggcgcccaccttggggatgtaggggtccggcagcttgaaggtatcgccgtaaaggccgttgaaccgggtggcaatgtcccggcagatctcaacgtgctgcttctggtcgccgcccacgggcaccagatccgcctgatacagcagaatatccgccgccatcagagccggataggtaaacaggcccgcgttgatgttgtcggcgttcttggcggacttatccttgaactgggtcatgcggctcagctcgccgaacatggtgtagcagtccagcacccagccaagctgggcgtgggccggaacatgggactggacgaacagcacgtttttctccgggtccagaccgctggcgatataggccgccaactggaccagggtgtgccgccgcagctccgccgggacctgccgcacggtgatggtgtgcatgtcggccatcatatagtagcagtcatactcatccgccagcgccgcccagttgcggatggcgcccagataggaacccagcgtcaaatcgccggagggctggatgccacttaaaattctttttttctgaacttcgttctccataatagtacctcgcttttctgtatttcagccggaaaccggcatgcgtatctgtacagggcatattttaactgatacagtataccactcccccttaaaaattgcaatccgaactcttgactttcctgtctgaaatagggataatgtattttgtgtaattacgtatattttgacatggaggtatcattcatggctttggataagacattttttgaagatttggaagcccgcatccccaaggggaaggtccgtacccggttcgccccctcccccaccggctatatgcacgtgggcaacctgcgcaccgcgctgtacacctggctcatcgcccgccacgccgacggcaccttcattctccggatcgaggatacggatcagggccgtctggtggagggtgctacggacgtgatctaccgcaccatgaaggagtgccatctggatcacgatgaaggcccggacgtgggcggccccaccggcccctatatccagtccgagcgccgggacctgtatctgccctacgcccagctcctggtggaaaagggcgcagcctactactgcttctgcgagaaggcggaatccgaggaggactccggcgagtttgaccgggcggacgatccctgccggaatctgagcgaggaagaagtggccgctaatctggctgccggtaagccctacgtgatccgtcagcggatcccccacgagggcaccaccaccttccatgacgtgtccttcggtgacatcactgtggagaacaagactctggacgatcaggtgctgctgaagcgggacggcctgcccacctacaacttcgccaacgtggtggacgatcacctcatgggcatcacccacgtggtccggggcagcgagtacctgtcctccgcgcccaagtacaatctgctgtacgaggccttcggctgggaggtccccacctacgtccactgctctcccgtcatgcgggaccagcacaacaagatgtccaagcgccacggcgatccctcctacgaggatctgaaggctcagggtttcctgacggacgccattctgaactatgtggcgctgctgggctgggcacccaagggcgaatacgccgagcaggagatcttctctctggacgagctggtgaaggtattcgacatcgccggtatctccaagtcccccgctattttcgacatcgagaagctgacctatttcaacgccacctatctccgggccatggagcctgccgcctttgcggaggttgcggagccttacatccgtcaggcggtgaagaaccccgccatcgacgccgccggcatcgccgcgctgctgcaggcccggtgcgaaaagctaacggacattcccgaaaaggtcgatttcttcgacgcattgcccgattatgacgttgagttcttcactaacaagaagtccaagaccaacgccgaggtctccaaggctatgctggaggccgccatccccgctctggaagccgtttccgactggactgtggacgcgatccacgataccctcattgatctggctgccaagctggaggtcaagaacgccacgctgatgtggcctgtccgcattgccgcagccggcaagctggtgacgcccggcggtgccgtggagatctgccacctgctgggcaaggatgaaactctgcgccgtctgcgtctgggtctggacaagctgaactgacaacgaaaaaggagatcccatgaacaatcttgtgattccgcagggctataccgctcccctgcctaactacgaacagcagcgggccatcgcattcatcaaagaatcctttcagaccaacctctccaacgcgctgaacctgcgccgggtgtccgcccccctgtttgtcgcttccgattccggtctgaacgacaacctgaacggcacggagcgtcccgtccggttcgacatccccggtgtcggcaaggacgccgaggtggtccactctctggccaagtggaagcgtctggccctgaagcgctacggcttccacgagggcaagggcctgtacaccgatatgaatgccatccgccgggatgaggatgatctggacaacatccactccgtctatgtggaccagtgggactgggagaagatcatctcccgggaggaccggaacgaggcgtatctgaaggccaccgtccgggccatcgtcgccgccgtgtgtgagaccagcgacgcgctgaatgtggccttccccagcctgcgggtaaagctggaccgggaggtgtacttcgtcaccacccaggagctggaggaccgctggccggacaagacacccaaggagcgggaacacgccatctgcgccgagcaccacaccgtgttcctcatgcagatcggcggcaagctgagatccggcgaaaagcatgacggccgtgcccccgactatgacgactgggccctcaacggcgacattctcatgtggaaccccattctggagcggtcctttgagatctcctccatgggcatccgggtggatgaggaatccatggcccgccagctgaagctggccgggtgcgatgaacgggcggagctgcccttccacaagatgctgctgaacggcgagctgccacagaccatcggcggcggcatcggccagagccgtctctgcatgctgatgatcggcaactgccacattggcgaggtccaggccagcatctgggacgccgagaccatgaaaaaatgcgaggaagccgggatcatcctgctgtaaatacgcaaaagcagtcccgcggcatttttgccgcgggactgcttgatgccctgattccaaaatgaaccccccgtctccgcgagaagcggagacggggggtttcgcttattcttcggctgcgatgtcggcagcgatcaggtcggccagatcctccagcttccggtactgctccttcttcacggcggaacggatggtgatgggcggtgcgatctgctccatgcccttcatctcctccaggtgcttggccatgagccgggcggcggcagggccccagctgccgttttcaatgagggccacggtgcggttctggagtgcgtgggccttcagttccagcagcagcgtctccatgggggtgtagatgccgccgttgtaggtggcgctggcaaacaccagatggctgcactggaacgcggcgctgacctgctcggatacgtcggtgtgggacacgtcgaagatccgcacgtgccgcacgcccttttccgccagacgggaggccaggatctcgcaggcgttttccgtgtggccgtagatggagccgcagaaaatagcggctgtccacgcctccggcgtgtaggtgctccagcgcttgtacttctcaaggaaccagccgatgttctcccgccagacggggccgtggagggggcagaggtactgaatatccagtcccgctgcctttttcagcacgttctgcaccggcgtgccgtatttgcccacgatgttggtgtaataccgacgggcatcgtccagccactcctgctcgaaattcacctcgtcggcgaagatgttgccgtccatagcgccgaaggtgccgaaggcgtcggcgctgaacagggccttctccgtggtatcataggtcatcatgacctccggccagtggaccagcggggccatgacaaaggtcagctcgtggcggcccagggacagggtatccccctccttcaccgcctggaagcggccctccacctccatggggaagaactgcttgatcatgggcagggtcttggcgttgccgatgacggtggcctccgggtagcggctcaggaccgttcccagcgtggcggcgtgatccggctccatgtggttgacgatcacataattcagaggcttgccctgcagggcgtgttccagattctcaaagaaccgctccgcgatggcctgatccaccgtatccagcagggccgtcttttcatcctggatcagataggcgttgtaggagacgccccgggggatgggatatacattttcaaacagggccagccggcggtccgagccgcccagccagatcagatcagatgtgattttcttcgtgcaatacatagctgaaattctccttttgatttatatttccgttgggtaaatgacttgtcgaacaaaaagacacacggactggaaaccgtgtgcccttcggaaagggccgtcagtcgccccagatgacattggtaatggtaccgtcagaaaattcgatatactcgctcttgaggatataatcggtcttgccgatgcggacctcctgatcgcccaccttggtggtcatgacctcggcggtaggggtggtggtggtcacggtgaagatcaacgtcacatggtccgggtccgtgacccagtttccattggcatccagcacctgataggtctccttctccacggcctcgatctggccgcccaccagcgcaccggaggccatcagcggagacggcagatgggcctgacagttttcatacagttccggggccacgccctccaccttcacctgataggtgacttttgtctggggccggtcatagctgatgctgtccccgttttttccgatgaatttccaggccgccagtgccagcaccgccacgatcagcacaatggcgatgaggtcgatgatattcagctttccgatgcgttttgctttctgttccatgatttcctccgtaacgggcttggcccgatttttccttggtagacatttcgcgttctctattgtataatattttccgctatttcacaaggatttttttggaggcgcttttatgaaggtcatccatctcatcagcggcggcgattccggcggggccaagacccatgtgctgagtctgctgcaaaatctgaacaaaaccatcaccgcccagctggtctgcttccgggacggcccctttgccgaggaggcccgggccatggggatccccaccatgatctgcggcggaaacaacatcccccacctgcggcgggagctggcggactatatccgggagggagggtatcagctgatccactgccacggcagccgggccaatatgatcggggcgctgctgcgaaagcccacgggcctgccggtggtgtccaccgtccacagcgactacaagctggactacatgggccgccccttcgcccgtctcaccttcggggccatcaatgcctgggcgctccggcatctggactaccgcatcggtgtgtccgacgccatggtggacctgctcatcgatcggggcttcccccccgaccggttctacgccatctacaacggcatcgacttcacccctgcgccgtctcagggggaccggctggcctatctccggggtctgggggccgacgtggaggaaaacagcgtggtggtgggcatcgccgcccggctgaaccccgtcaaggatatgtccaccctgatccggggctttgcggaaggacacaagtcctgcccccggctgcggctggtcatcgccggggacggcgaggagcggcagaagctgggggatctggcaaaggaactgggggtggaaaaggaagtcaccttcgccgggtggatcagcggcggcatggaccgcttctactctgccctggacatcaacgccctgacctccctctccgaaaccttcccatacgccctgacggagggcgcccggttccatctggccacggtggccaccgccgtgggcggcatcccctatctcatcgatcaggatgtaaacggatacctctttacccccggcgactggcagacgttaggtcgatatctggctgcgctgggcaacggggacgctctgcgtcgggagatgggcgagaagctctatgaaaaagcctccgccaagttctccatccaaagcaccgtggatacccagctccatatttatgaggagatcatccgccgccacaaccgccccaaacgggaccgggacggtgtggtgatctgcggtgcttacggccggggcaacgccggcgacgacgccattttggaggccattttgcaggagatgcgctccattgatccggacatgcctattaccgttctcaccaaggaccccaaggccacccgcctgacctaccgggtgcggacggcgggtcggatggacgtgggcacctggaaaaaggccatgcgccatgcggggctgtatatcaacggcggcggcagcctcattcaggacgtcacctcccgtcggtccctgtggttctatctccataacattcaggctgcccacaaagccggctgcaaggtacagatgtacggctgcggcatcggtcctgttctccgggaacagcaccggaagctggcggccagcgtgctgaacgccagcgtggacgtcatcaccctccgggagccggactccctgaaggaattgcagtccatgggcgtgacgaaaccggagatcctcctgacggcggacccggccctgaccctccccgccgccagcgaggacgagatcgacagcgttctgctgcgggcgggcatcccgacccacgggaagtacctgtgcttcgctctgcggaattggaagggctttgaggacaaggcccccctgttcgcgcaggcggcgaaatacgcctatgagacctacggtctgacgccggtgttcgccgccgtggaaaagcatctggacccggttgctggtcggctggccgcggcagggctggacatcccccactattttctggatgatgctggcagcgccgggaccatcatcggtgcgctttcccggatgcaggccgtggtgtccatgcggctccacgcgctgatcttcgccgccggacagggcatccctctggcgggcgtggtgtatgaccccaaggtctccgctttcctgcggtatatcggtcaggagaacttcctggatctggatgctctgacggcggatgccctcaaggccatgatcgactgcatggtcagctcccctatctccccggaggaacaggctgctgccgtgcagaagctgcggcagatcgaacaggtcaatgtggacacggcccgccgcctacttgggaaataaactttgcctgtaaagcagttttatatcacacactatgcaacacaaggatggccagaccttacgaggtctggccatccttctgctttccatacaaggtctgctggacggtgatggtggtcaatgtgccggtaagctgcaccagcaccgctgtcagcagcgccagctcatcctcgctcagattctgggcgatggcaacggcaagggtgttcaccgctgtggtaaaggccagcggatcaaagtcctcctttgtcattccaccacccccttcctctatcctatgaggaacggggccgtttcagtccgcatttgcgggcgggccgttgttcttccatcatgcaaaaaacctcccacggtgtcccttcatttatagggaaaccgtgggaggtacttgttttattcggttttctcgccggcgtggtaggcgttggtatggacgttgatgaactgggccttcagcttggaatagaggatggtctggctggaatacagcccctgatacccggagagcatatagctcaggcagcaggccaaggcaaaatacagcattccctccgcgccgaacagttccaccgccagcagcgtggatgccaccgggcagttggtcacgccgcagaaaacagcggccagacctaccgcggcgccgaagcccaccggcaggcccagcagcggggacaccgcacagccgaaggtcgcgcccacgaagaaggagggtaccacctcgccgcccttgaagcccgccgccagcgtcaccgccgtgaaaaccagcttcagcagaaaggcccagggcaccgccacggtctcctgctcgatggcccgggtcacgatgtccatgcccgcgccgttatagtccgtgccgaatacccacgtcagggcgatgacggcgaagccaccgcagatcacccgcagccacgggtttttgatccgcttcatcaggtgtcccgcgccgtgcatcagtttgcagaacaggatagacaccagcgcgcacagcacacccagcgccgccacccggacgaacatccctaccgactgatccggcaccgccacggtgaagcgggtaggctccacccccagacggacggacacgccgtaggccaccagcgccgccagcaggctgggatacagcgccacatggtagagcacgccgatgctgatgaccatgatggcaaacaccgtggccgccagcggcgttccgaacagggcggagaaaaatgccgccatacccgccagcgtagccacccggagatcccggtcatccagccggaaggtgcggcccatacactgaccgatggtgccgcccatctgaagggctgcaccctcccgtcccgcgctgccgccgcacaggtgggtcaggaccgtaccgaaaaagatggccggcagcagcaagataggcagccgctttccttcatggaccgcgtcgatgatatcgtcggtacccaagccgtccgtctccgtcagcttgtaaaagctcacgatcacaaagcccgccaacggcaggagatacagcacccaggggtgcgtcccccggaaggccgttacctcatggacgccgaagtggaacatggtcccgatcaatccgcagaccacgccgatggcggacgcagccatggtccattttgcaagcgtccacccgtaaaggcaccaccgccgcagagtggttttcgttcttttgttcactgtatgtgctccctcactttaccgccgctttttccgccaacacactgttgaagggctcttccagactttccgggtgcttgagatttcggaacaactccgcgaaaaagcgggaatactcaatgccggtggcgatccgctcatccatgacaacgctcataggcatgatcttcttccggacgccctccggcgccagcgggtcggggacgggccgccccatgcagacgaacacgctggtagtgccaaactcgtagcagtggtggaaaatgcagggcgtattgatggaggccagattcgtcacgaacaggctggtgtggaaggggctcagttcaatgatagacctgggcagcagatcatgccggtccagaaagcccgccagtgcaaagaccgcccgggccagccccggcacgccgaatacgaattttgcaaaccggtcggtgtcgttattgtgctgaatgttctggttcttctcgatggtggagcggatcttctccgtcacggtaaacaccgtgtcctccggttccagatacaccttcagagaggtctcgtccggcgtgccgtccgcccgggtcttcaggatcacaaagctgaagcagaagtggttccgcttgtagatccgccggttcatcacgaaatagttgatctttggatttttcagcactgcgcggtaataggcggacaccagcaggctcatgtgggtcacggaccgcccctcccgccgctttgcccggatatagtcccggatcgcgtcctcatccagattttcttccgcccagttctgggcgtcataccgctttggcatgacatagggaagcgcctgcatgatggcagtcagatcccgtactctcgttccgtctggtcgcatagccattcctcgtgctttctcaccgtcagctccggggtaaacgtgtccgctgacggcatggtgtctttattatagttaagaatctgcaaattttcaagttaaaccgcaaaatgtgacagatagctcctccttaccggtcatcccgccagcctgccccggccaacagcaatcccactacggcagggagcagccagaggcttccccccgtgcgccacaccagccacgccgtcccggacgccgctgccagcgccgtggaaatgcccacccaccggcagccccattccgccgttccgggaccggccagccacgccagcaggagatacagcgcccgtccgccgtccagcgggcggacaggcagcagattgaaggcgcacagcaccccgttggcccccgccgccgtggtgcaccccatcctgccgaggatcgcagccgccagcagattcgccaacggccccgccagagccgatgccaactcctgcccgtagcccatggccccccggacctcgatcaccgctcccaacatgccgacccgcagccgccgggcctccccgccgcagagccttaaagccagcagatgtccgaactcgtgccacgctgccgcccccagcaccgtcagggccgtctgccaaccgcagcagagggcgaaccatcccaccagcagaaaaaagccgccggagacggtacactcaggcggtttccacataatagatcgggttcaggtagaccccgtccttttgcagttcgaaatgcagatgcggcccggtggccatgccggtctcccccacctcccccagcttctctccctttttcaccgccgcgccggaggacacggagatccgtccgcagtgagcatacagggtggcgcagccgttagcgtgggtgacggtgcagtattttccgtagctgctgctctcccctaccgccgtaacggtgccgtcggcaaagcaggcgatggccgtaccggtatccgccgccagatccacgccgtagtgaaaccgttccgtcccctccaaggggtgatcccggtagccgaaattggaggacagcacacccttcaccggcgtctcgtggtcgaaacccaaaattgcctgccgcatactgacgttttccggcaaatcctcgtcggaatagagcacaaggtccatcgtctccagctcctccggagccgggtcctctcccgcaggcgggatcgtgttcaacggctctgcatcccgccagttccgcagctccgtcagtgccgcgccgtccgctgtccgggcggtggtctgccgggtctccgcgccctccggacggaacacggcccggtacacctcgtccgccgcctccgccggggtgccgtccttggtaaacaggccgcccacagcggaaaataccgcctgcacatcgacgctccgggtcatggcttccgacagcttttggctgacgcccgccatccttcccggcagcagcagcttcgccgccaccagcagcacgaaaatgccgccgcaggtcaccagacggatgagccgcaaacgctccgccgccgacagggcatccgtttttccggactgacggcgtcccacctgacgcgccaccgttctttttctgccaaccgatgcggctgtccgccgccctgaccgccttgccgtcatccttcctgccccccatcgttgaattctttcaactctatgcggggattttccgcaatatgccttgacatcccgaaccggataccgtataatggtaaagctgtatccgggtgtagcgcagttggtagcgcgcatggttcgggtccatgaggccgtgggttcgactcccgccactcggaccaagtaatgataatccgaactacatgatccaagtgggtaatgtgttcggatttatcatttctattgaaagtgttttatagtaaacaagggcaggagcttattcctgcccttgctctataatgtctgctgtgttataatttaatatatagacagcatgggtatgagtattatccatcaagccgatttgtaatagttttttggggagaacttgaatgaaaaaaagggcaatttttcttattgtactgattattattttcggtgtagggattagtttctttatgtattttcctaaaagtattgaaaatgcacttaatagaataaaatatccctttgaggtaggagagattttagcgtctcaacagattgacgaaaatctcaccgctgttatatatacgaacaaagaagaaaaaagcaatcttcaaaacgccattgtacgaaagcgaggcatcttttacgatgtcattgaaacaaacggttccgtgcatatcgaaaaaccaaagcaacttgaatcgggtcaacttagaacccaagtattgatttcttggtatgataaaagtgataaatatgttattatggcagttgcctacgatgaagatgtatctaccattacctatttaaaccaagagttgatacagctaaatgtgaatggttatcgcttattttggggatacggaattggcgaatatgatgaaatgcacatgtttgacaaaaacggaaattgcctagaacagattaaggaataaactatataatagagaatcctacataacagcaggcgggagcatcgttacagatgttcccgcctttgttataccttgttctcttgttcggcctgctgctttgctttccactcggcgtattcccggttccgtcaagatttatgcgcaaaattgtttgcaggctccggctgagtgaagtcagccggcaatagaggcgtcgtccaaagccgcctccaagtgcttcatgttcatgtatttcttgttgccccaatgggtgcccgccacatggcgcagccttgcacagaccagcatcagggcagagttgccatcggggaacgtccccaccacgcgggttctgcggcgaatctcacggttcagccgctcgatcacgttatttgtgcggatgcgcgtccagtgctcgctgggaaaatcgcagtaggtcagtgtctcctcaatgccgtcctcgaccttcttggcagcctccttcagtttcatcgctctcaattctgcaacgacggcttttgccttctcgcgggacgccttcttgctctcctgggcgtggatcgccttgagcatttttgccacaattttgaccttggatttgggcacaacagagaaaacattgcggtagaaatgcaccgtgcagcgctggtatttggcatccgggaacacctcacccacggcctccagcatccccatgcacttgtcaccgacgatgagctttacgccgtccaagccgcgtccacgaagccattggaagaaactgacccagctggccttgtcctccttcatgccctcggcagcgcccaaaacctcacgaaaaccgtcctcattcacggcaatcgccaccaaaacagaaacattttcgtactctccgccccagttgcggcgcaggtagatgccgtccacgtagacgtatggataccgtccgccctgcaagggacggtttcgccagtcctcgatgtggacgtaggctttcttgttcagctcgctgatggtagcgggcgaaaccttgctgccccacagtgcctccgtgatgtcctccacacggcgcacggagacgcctgccagatacatctcgatgagcgcctcctccacgctgctttcccggcggcggtaccgctcgatgatggcagtctcgaaggatacgcccttgagccgcggcatgtggagcgtgacgtcgccggaggtcgtggtgaggcagcggtcatagtgaccgctgcggtagccctgacgggcctcgctgcgctcgtagcgcgccgcctgcgtcagcgactccgcctccttttccagcagctcgttcagggtttcctccacgctgccgcg

SEQ ID NO: 12147 - DNA, 266 bp, Unknown
  gut microbiota DNA sequence
aacctggacgccaagctccgcaaccagatgcgggcagagctgatcaagctgcgccagcgcatcaacaccacctttatctacgtgacccacgaccagacggaggccatgactctgggtgaccgcatcgtcatcatgaaggacggcgtcatccagcagatcggcacgccgcaggaggtctttaaccaccccgcaaacctgtttgtggccggcttcatcggcatgcctcagatgaacttctacgatgctgagctggtgctggaggacgg

SEQ ID NO: 12148 - DNA, 16894 bp, Unknown
  gut microbiota DNA sequence
gcggtggctcagtcccggacgtgaaaatatcatgcgggtggacacggaaggcgacattttacgctaccacacggcctggtactgcccggactgcaaaaaggactgttgacgcagctgatctgcaaacggaggcggagagaaaccagacggcattccccgtgggagcggaggagacagcatcgcagagcgatgaagcaaaagagggagaataggaagaatggcacagctttatttcaaatacggggccatgggctccagtaaaacggccaacgcgttgatggcccggttcaactatgaggagcggggccaaaagaccctgctggtgaagccccggatggaccagcgggacggagaccacatggtccattcccgcatcggtctggaatacccctgcgtctacttcgacgaaatgcggacgctgtccgaggatgcgttgaaagaaaacgcctgtatcattgtggacgaggcccaattcctctccaaggaggaagtggactatctggtgcatgtggtggacgatctgggggtccccgtgatctgctacggactgcgggcggacttcaagggagagctgttccccggcagctacgagctgctggtgatggccgacaagctggaggaggtcaagaccatctgttggtgcggcaaaaaggctatgtttaacgcccggttcgacgaaaacggcaaggttttgaaggagggcgctcaggtggtcttgggggccaatgacaaatacatcggcctgtgccgccgccactggcgggccggggatctgggcccggacttcaacggaaagggtacgggagactgatgatctgtaatctctgcccccgccgctgcggtgtggagcgaacgccggacaaggcggcgggtgtgtgcgccatgcccgcgtggccggtggcggcacgggccatgctgcatcagtgggaggaaccctgtctggtgggggagcacggcgcgggcgccgtgtttttctccgggtgcaatctccggtgcaaattttgtcagaacggcgtgatctctcaggaaggctacggcaagcccatcaccccccagcggctccgggagatttttgaggaactggtggagcagggggcggcctgcttggatttagtgacgcccactcacttcacggacgcggtgctggaggccttgggcgaggagcgctggccggtgccggtggtttggaactgcggcgggtatgagtccgtggagaccctgaaacgcttggagaaccgggtacaggtgtacctgccggacctgaaatatgccctgacggagccggccaaagcgtattccggtgcggcggattacccagagacggcgaaagcggccattttagagatgttccgccagaccgggccatatagaatggaaaacggccaactgaaaagcggcgttctcatccggcatatggtgctgccgggagaattggaaaacacgaaggccgtcatcgactgggcggcggagaccttccgccccggcgaagtgctgttctcccttatgagccagtacacgccccagccgggggccgagggcaagctggcccggagggtgacaaaggcggaataccgggcggcggaacggtacatggcggactgcggcattgccgacggtttcactcaggagcgaacctccgccaaggaggagtataccccggatttccatttgcaggggatttgagaagataggacggacgggccaaaatttagggggccataatatgaaggtaaaaaagctgatcattgtccttgcgccactagggattctgttcgttgtaatatgtgcggtagtatctttgacaagaccatattttccaccaagaccaaagaatacaactctggaattttggatatgtgacgatgtgtcatccgttgactggaacggacatgatgaaataaccggctggatgggtgcgcgggagtttttgggaaaagattaccacatgagcacgcaggggggaaaacccaatgtgcgggtgtcctatcttctgaccgcttggccggactatgccgatgatggacaatatgttacaacaatagaaataaccgacccggctgtatttgtatatggactaacagtagaatcggagcctacagaatttgagcgggtgatgatgtctatgggatataaagtcgaattggcagataatagcattcaaagagccgttagggatgggtttaccttttccatttgtcgtggcgatactccgaagcttgttatttccgcagaggtaagtaaccgcgaagagatttgcttttgactgaaaacgtccagcttgctggattccacataaagagcgcccctgtatgacgcagccatacaggggcgctttcctatacgttttagatgcccagcaggaaagaggcgaagcggaagtagatcagcagggagagggcatccacgatggtggtgatgaagggagaggccatcaccgccgggtcaaagccgatctttttagccagcagcggcagcatacagcctacgatcttggcggcgaacacggtgcacaccagcgtcaggcagatgacggcggctacggtgacggtgatgggattgtggaataccatccggtccagcagcatcagcttggcaaagttggcgccggccagaacggtgccgcacagcagcgccacccggcactccttccagaccacctggatcaggtcggaaaattcgatctcgcccagagacaggccgcggatcactgtgacgctggcctgagagccgcagttgccgccggtgtccatcagcatgggaatataggcggtgaggatggtgaaggcgctgagggcgtcctcaaagctggagatgatctggccggtaaaggtggcggagaccatcagcagcagcagccacggaatacgggatttgaaggtgtcaaaggcactggtgcggaggtagggcttgtccgtcggcagcatagccgccatcttttccatatcctccgtggtctcttcctgcaaaacgtcgatggcgtcatcgacggtgacgatacccaccaggcgattttctgtgtccaccacggggagggccagaaagtcatacttgcctaaagcacgggcggtctcctcctgatcatccagggtctggacgcagatgtagttccgctccatgatgtccccgatgatgtcatcctcctccgccagcagcagagtacggatggagaggacgccgatgaggtgccgccagtcatcaatgacatagcagacgttgatggtctccttgtccggtccggtccggcggatgcgcttcaaggcgtcctccaccgtcatggtctccttcagatccacaaactccgtggtcataatggagccggtggagtcctccggatatttcagaatttcgttgatgcttttgcgcatatccgggtcggagtgcttcagaatccgcttgaccacgttggcgggcatttcctccacgatgtcaacggtatcgtccagatacagctcgtccagcacttccttcagctccgtgttggaaaagccgcggatcagcagctcctgctggtcgctttccagctccacgaacacctctgccgcctgctccttaggcagcagacggaacagcaggggcagcgtcttttcatcgtccagatcgtccgccagaatggcaatgtccgcaggctctaacggcaatagaaggtcccgcagttctgtatatcgttttcggttcaccagatcctcaattttttcgaccagttccccacggctttccatttcaaacatagcgtgacctcctttccgggccttccgcccggtatttctgcatggcgcggagcaaaataaaagacctcgccgcgtcccattccggtgcggtgaagtcctgcttccaggagcgtctcagaggacagcatccctaccgttcaagctttagcttcacagggcggtgaaatcgcgttagatgataccttgttgttcgatatcgcctgttcaaaccctctcatgatgtctccatcactctgcggcagcgatccatatccctgtggtagccttacctaccggaactctatgcggttgtcatttgataacacatttatagtatgccaaaaaacaggcgctgtcaacccggacggacgaaaaaatttcacagaatcaggagagcggccatctggccggtctcccggattcagttcagactgttttcactctgctgaaacagctttcgtacccgttccgccgtggcggggtggtgtgtcagcgccgggtcctctgccagcagcccgtcggcggcggactgcgcctccgccagcagccgggtgtcgcagccgagatccgccacccgcaatcccggcaggccgtgctgccggagaccgaagaagtcaccggggccccggagccggaggtcctcctcggcgatcttgaagccgtcggcggttttcgccatggccttcagccgctggcgggtctcgtcatttttattgtcggacaccaggacgcagtaggattggtgcgctccccggcccacccgtccccgaagctgatggagctggctgaggccgaagcgctccgcgttctccaccaccatcagattggcgttgggtacatccacgcccacctcgatcacggtggtggacaccagaatgtttgtttccccggcggcaaaggcggacatgacggcgtccttctccttggccttcatcttgccgtggacaaaagccaccttcaagtcggggaagatctccgtttgcagcttttgggcgtattccgtcacggccttccgctcgtcgggcagctcgtcattctcgctgaccatggggcagacgatgtacacctgccgcccggcctccacctgcttgcggataaaggcgtacagccgggggtgataggcggaggtgacggcataggtctcaatgggctttcgccccggtgggagctggtcgatgacggacacatccagatcgccgtacaaaatcagggccagcgtccgggggatgggcgtggcggacatgactaaggtgtgggggtgctctcccttttctgccagcgccgtccgctgggccacgccaaagcggtgctgttcatccgtcaccaccaaccccaggtcagcgtaggccacgctgccggagatcagggcgtgggtgccgatggcgaagtcgatctcgccggtggccaactgggcggtgacggagcgttttgttttggcggtggtggagccggtgagcagggcgcagcggatattcagccgttccagcagcggggcaaggccccggtagtgctgctccgccagcagctccgtgggggccatcagcgccgcctgtcggccatttttgacgcagaaatacacgcaggcggcggccaccatggtcttgccggagccaacgtcgccctgacagagacggttcatgggcctgccgctttccatatcggcgatggcttcgtctacacagcggcgctgggcgtcggtgagggtaaaggggagggcgttgtaaaacggggccatatccaccggctgaaacggttccacggagacggtctcccgccgggagcgcagcagcttcaatccaatggcgaagaaaaatagctcctcgaaagccagccgcctccgggcaatatccagcgcctccggggcctccgggaagtggatgttctcgtaggcataattcacccggcacagctgatgcgcctgacggacgccgtccggcaggcagtccggcagaatatcggcgcagctgtccaaaccctgccggatggcccgggacaacagcagctggctgatcccggcggtgaggggatagatgggcacgatgcggccggtgtgctcccgccgtccctctggctctacaatgggacttgccatacttttccgcaggaggcttccctccgccctgccgtaaaaggtgtaggtctcgcctacccgcagttgatttttcagccaggactggttgaaaaaggtaacatccagcgcaccggtgtcgtccacggcccggaccttcaccagatccatgcccttgcggatgtgggacagctttggctccgaggcaatcatggcggagacgcaggccggttcgccggggatgagctggctgatgggctttatttcccggcggtcctcatagcgccgggggaaccagttgatgaggtcgcccagcgtggcgatgcccagcttgcccagagattttgccttggcctcgccaatgcccttgatgtaccgcacatcggtgttcagatccgccatgcgcccgcctcctttccgcagctttcataaggctattataaacggcggcggcggttttgaaaagagggcagagaaaagaacagggctccgccggaattccggcggagcctttgcttacaacagcgcggtattcacatagtccacaaagcggtaggtcaggccattttccgtgacggcctcgccggtccgctcaattttccaattagggagggcgtccagatcggggaaaaaggtgtcggcatccgatacggtgctgtccactcgggtgacggaggcccgccggcagcggcccagcagcgcggcgtaaatgctgccgccgccgatgagccatacatcatcgccgtcccccgccagtgccagagcttcctccggacgatgcacgatttcacagccctcccggcaaaagtccggggaccgggtgatgacgatattccgccgcttgggcaacggtctgccgccggggaaggaatccagggtcttgcggcccatgatgacagtgccgtcggtggtcagcgtgcggaagtgcttcatgtcccccggcagggagaacagcagatcaccgctccggccaatggcccactgtttatctgtgacaacgatggcgttcatggcacggctccttaaatggcaatggggattttgtcctcgaagggggcgggggtgtatccctccatcgtaaagctgttccgggtgaaggcatagaaatccgtcacggaggggtctatggcgaacttcggcgcgggggcgggggtctgggtcagcatcttctccacgatgggcacatggcggtcatagatatgggcgtcggcgatgacgtggaccagttcgccgggcacaaggccgctgacctgagccatcatgtacaccagcacggcgtactgcaccacgttccagttgttggcggccagcatatcctggctccgctggttcaaaatggcgttgagcacgttgccggagacgttgaaggtcatggaataagcgcaggggtacaggtgcatctcagagaggtcggcaaagttgtagatgttggtcaagatccggcggctggcggggttatgcttcaaatcgtagagcacccggttcacctggtccatgtccccttcgggatagtggtgcttcacgcccagctggtagccgtaggccttgccgatggagccggtctcgtccgcccactgatcccagatccgggcgttgaggtcatggacgttgttggactttttctgccagatccacagcagctcgtccacagctgttttccagtaggtccggcggagggtcaggatggggaattccttttgcagatcgtaccggttgacgatgccgaattttttgatggtgtgggcgggcgtgccgtcctcccagtggggacggacgttctgatcggtgtcccagacgccgtggtccaggatctcctgaatgttttgcataaagacctgatcggcgtagctcatgacacattcctcccaaattttcattaactctacacagtatagcaaagaatgaagaggaaaacaagatgctcccacagagaatgttgtatagaaaaaatcggaaaatcaatcacagcttttctgctgaaataacgttcattccttgaaaaacggcaaaaagtgctgtaaaatgaaatcgtaaacgagaggagtgacagtatgctggatcgcagcgaggtgggcaagcgggggtatctggaccgggacttccgcctggtgcatctgaaggattctctggcccagaagatcgactaccattaccatgaatttgataagctggtgatcttcctcggtggaaaggtgacctacgtggtggagggcgtcacctatttcctcaaaccgtgggacatcgtgctgatccagcataacctgatccaccggcccatcatccacgccgaggaaccttacgagcgggcggtgttgtggctggggcgggactggatcgcccagcgcagcgatcccggcgagccgctggacgcctgtctggacaagagccgggagcaggggttccaccttctgcggactggggaggaggggcgtcttggctacgcacggttcatccagcagttagaggaggctctgcggtccgaggagttcggcgcccgccgtatggcggataccctgtgccagcagcttttgattcaggtgaaccgggacttcctccgggccaacactgccccgaatgaaacggacagctaccatctggaccccaaaatggaggagatcctccgctatatcgccgccaatctggagggagacctctccgtggacgccttggcggcccgtttttacatgagccggtactacctgatgcaccggttcaaggagatcaccggctacaccgtccaccagtataccgtgcagaaacggctgctgcgggcaggagagctgatccgggagggcgttccggtgatgaaggcggcggagcaggcgggctttccggaatattccaccttcctccgggcctttcagaacaccttccataccagcccgaagaattttcgataagcgcgccgtctgtctgcgtataccgaaagaggataattgccaacaaaatcaacgccccgccatccggcggggcgttgatcgtatattgaatcggaagtttaggccaggaagcccttcagaatgcactcttcggcttcctcaggggacagtcccaaggtctccagcttcaaaagctggtcaccggcgatcttgccgatagcggcctcgtggatcagctgggcctctgtgctgttggccacgatagcgggaatggactcaatgtgggcatcatccatgatgatggagtcacactgcacatggccgaagcaagcggcgttgcccaccatcttgggatagaacacctgacgggaggtgcccttggccacggaccgagaaatcacccggccacgggcaccgtccccatccagagagatctccatgtcgctttctgccacctgatcaccgtgggtcatgagccgctcggtgaccacggcctcagcatccttgccgcagacgatcttggtttcccgcttggtggagtcgatgccccggatctggacggtctccatctggatggtggcgccctcttccagatagacaacggtctgggggttcatgatgcggccaccggtgccgtcgccgtcaccgtagtgcttttccgtgtattttacatgggagtgcttacctacatagaaggtgtggataccgtcatgacggctgtcctctccgccgcagttgtggatgccgcagccggccacaatgtccacatcacagttttcaccgatgtagaagtcattgtaaaccaactcctgaataccgggcttggtgatgatgacgggaatgtggcactgttcgcccttggtcccatccttgatgcggatgtcaatgccggatttgccgtcggtcttgccggtgatctggatgttctccgtggactgccggccgtcgcagccggtgtccttgcgaatgttgaaggcgcctaccggcttgccgatcaggtccgcgattttttccagcagctcccgatctacctgagattccatcataaggcgtgtacctccttgttcagtaccgggcagccgcccagcgtgtcggtcaggatccggggcaggatctccttcggagtgccccggtggcggagggtgccgtcacccaccacgatgacttcatccgccaaggaaataatacgctcctgatgggaaatgatgatcatggtggcgctgccctgactgtggatctgctcgaaggtctccgtcagccgggcgaaggaccacaggtcgatgcctgcctccggctcgtcgaagatcatcaggtcggcgttccgggccagaatggaggcgatctcaatgcgcttgacctcgccgccggaaagggacacatccacttcacggtccagatagtcattggcgcagagccccaccttggtgaggtactggcagcacttgtccttggaaagcttgtcgtcgccggaggcgattgtcagcaagtcgcggacagtgatgcccttgaagcgggggggctgctggaagccgtagctgatgcccagcttggcccgctctgtaatggtcatgtgggtaacgtcctgcccgttccagaggatctggccctcggtaggcgtcaccagacccatgatgatcttggccagcgtggtcttgccgccgccgttgggaccggtaaagaccaccagcttgtgatcgtccacggtcagggaaatgtccttcaggatgcccagagtctcatcggcttcccgaacggaatagctgatatgttttaattccagcatggaaggtcctcctttatggggaaaggaaaaatttcctgtctttctcatgtagtataccaaaaatacggggaaatattggttgcaaaagcaacagaaatcggtcggaagcggccgaaatccgcatactgttataccctaacatattttaccctacctgtcaaagggtaagggggggatttttcggtaaaaccggcactttttttccgggtccgcatagactggagggaaaaggagggggagcctatggaacgaaatctccacgagccggagatctacgatttccggcagcatgaccggctctggcagcgggtgggccccgggctggagccctatccggaaaccacggcggaagcaatgccgcgaagggaggaactgccgccggcgcaagagagccagcttcccggcgcggagccgaacccctgctgcatgggcagcgaggcaatggagattctggcggtgctggagggatacatcgaggaggaactggaggaccggcggcgctatctggcgctgtcccggcaggcaccctcgtgggcgaggcagaccctgcgagatatggcggaggaggagaacggccacgcccggcggctcatggcggcccggtatctcatcaccggccagccctaccggcccaatctggtgtgcggcgtgttctgcccggggcgttgggcggaggaactgcggcgaagctaccatgaggaggcgtgcggcggcctgaactatgcccggacggcagacggcaccacggatgtctgccttgtcaagctgctcaatgaactgagcgaggacgaataccgccatgcggagcggctcatggcactgctggagcggagccttgggcggcagggcaactgttgaacaggaatgggaaagcgccccggagccgggaaaacggcttcggggcattgcttttgcccggcggcttgtgctatactatcccattagaattgatcaggatcggaggaccttgtatgtatgatgaattgacggcagtggacattcagaaaatgcaggaggagatcaactaccgggtccgggaactgcgtccccagctcattgaggaggtccagaccgcccgcgccttcggggatctcagcgagaattatgaatataaatgcgccaagcaggcgaaaaaccgcaatgacagccgcatccgctatctggaacggatgatccgcaccgccaaggtcatcgaggtaaaggagacggcggacgccgtgggattgttcgacaccgtgacggtctataacgagatgatgaagaaggaaatgatagtccgcatcgtcaccaccctgcggcaggacgccttaaagggactcatcagcaaggaatcccctgtgggacaggccctcatgggccgccggaccggggagcgggtggaggtcgccgtcagtccggagatgaaatatactctggagatccgaaagatcgaaaagggttcggatgacgagagcctggacatcagcagctactgagccgagtctgggccgacaggatgccggatcgaaggatttccggcggttttgcggaaagactattgaaataccggctttcttgccgtaaaatagggagaaagatagaatcagagactgtcaataaagtggtaaattctccgcgacggtaaggtagggcagccgttagcggctccgccgctttacggatgccgcataccccttgcgggtgaagggtgtgcgcgggactacgcccgcaggcgtgtttcggagcgcaaccgccgcaaggcggctcttagcgcggagataacccaagaagggatacaccgtcggctcaagccaaacagcggatactgcatatccgctgattgggagccttcctcgaaacaggctcgcttgatccgccaccggcggcgcttcgcctgtttccctgtgccattaaaatcctaagttttcagaacttttataaagttctgaaaacttgctcagcggggagaaaagacttttttgacacgctgagttagaatctgatgaggaggatctcaccatgcgcgtcatcaccggctccgccaggggccgccgtctgaaggaattagaggggatggagacacggcccaccaccgaccgggtgaaggaagggctgttcaacgtcctgcaatttgatattgagggccgtaaggtcctggacctgtttgccggcaccggccagctgggcatcgagtgcctcagccggggcgcggcttccgctgtgtttgtggaccgacggccggatgcggcagctttgacccgcgaaaacctgaagctctgcgatctgacggaccggagccgggtagtggccggggactccatggaatttctcaaggccgcccgggaaaaatatgacctgatctttctggacccgccctatgagacggaactgctggagacggccatcgcccatattgcccgccatgacctgctgaacgttcacggcatgatgatcgcggagcatccggtggacaaggccctgccggccctgtccgcaccctaccgcatgggccggacctaccggtacggcaaaatcgccgtcaccatctaccaccgggacggagacgagggggcgcaggtatgaggatcgcagtctgttccggcagctttgaccccatcacgctgggacacatggatattattcgccgcacggcggcctgcttcgatcaggtgtatgtctgcgtcagccccaatgcagaaaagcggggccagatgttcaccccggagcaaaagctgaagcttgtggaggcggcggttttagagctgcccaacgtaacggcggagctgtacggcggcctgctggccgatttcgccacggagcggaaggctaccgccattgtccggggcatccggacccagagcgatttcgacacggaatatcagcaggccatggtgaaccggggcctgcatccgggcctggaaacgctgctgctgcctgcggacccggcgtacatctatttgagctccaccgtggcaagggagatgatccattatcatcagccccttgataagtacctgcccaaggcgatcctgcccctgatccgggactggacggaacaacgataaggagaatgcgttatggctgaaaacgatgtaaaccgtttaattgatatgctgtatgaacgggtcgaggacgccaagtcccccgccctgaagcccaacctcagcatggtggaccgggacgaggtgctggatctgctggacgagctgcggaaccagcttcctgtggagctgaaacgggctcaggagctgctggccgcccgggaaaaatttgtggacgaggccaagcgggacgtggagcggatgatgcgtcaggcggatctggaggccaagagcaaggtctctgacagcgaggtgctctatgccgccaaggagaaggcccggaagatcatcgccgacgcggaggatcgctcccgccagctctgtcaggtggcaaatgagtacgcagaggacgctttggcccggacggaggaggctgtacaggccgcgctgaccgaggtgaagcagtcccggtccgcattccgggccgcttccgccgccaagcttcaggaacagcgggaaaagctggaggcagaaagaaagactgcggaagaggcagagaattgacgtgctgtccgccgcaatgtaagcggacgaaacacataggaacaagtatagtcggtgtggaaaaggcggttgaccataacggcgactgtctgccgtaaaaaaggggatttgcgggaaaattcgttaaaaatgacgaaaaagaacctgcaactttttcgaaaaactctatatttagcgcaacctgcgttctgaaaaagaatgacaacacaagatattgtgttgtcattctttttgattttacgtaaaccaatcggcaacgatggaacaattgtttgaaaacggtgaattattcctgacttttggcaaaaagtggcctgttttcaagggtttgcgtcggaaaaaaatacttgcaatcccccttgaaatcgcttatactcagggtgtgtggtggggaaaagtggggaagatgtggataacagtgccacattggaccacgaaaacccaaaaagtagggaaggagggcaccgctatggccagactcatgggcaagtccaataacaccattgactccaagggccggctggtgatcccctccaatatgcgggaagcactgggagaccggttttatatcaccatcggcgcccagcactgcctgaccatttaccccgaggccaagtggaaccagatgtccgaggatatggacgagctgccctacaccgaggcccgggcactgacgctgctgtatgccaacgctgtggagtgcgagcctgacggtcagggccgcgttctgatccccgctgccctgcgcagctacgcgaacctgaaaaagaccgccaccatcgttggcatgaacgcctttgccgagatttgggattccgccacctggacggagcgggaacgccagatgctggaagaggacgatatggccgccgccatggacgccttggcgcgggcccgtcggaatcggagctgagctatggaatttacccacaagcccgttttgctggccgagtgcatcgaagcgctgcatatccggccggaagggatttatgtagacggcacactgggccgtgcagggcactcaagagagatcgcccaaaggctcaccaccggccggctggtgtgcattgaccgggaccaggccgctatcgacgcggctcaggagcgattggccccctggatggaccgggtgacgctggcccacagcaatttcgaccgggtcagcgagattttagcggagttggacattcccggcgtggacggtatgttatttgatcttggagtatcctctcctcagctggatgacgcgtcccgtggattttcctatatgcatgacgcaccgctggacatgcggatggacgccaccgctcctctcaccgcttatgatgtggtaaacacctggagctacgaggagctgcgccgcattttgtttgagtacggcgaggagcgctacgcccccgccattgcgaaaagaatcgtacaggcccgggagaccgcgccggtccagactacattggaactggcggagctgatccgctccgccatgcctgccgccgcgctccgggagaaacagcacccggccaagcggagctttcaggccatccgcattgccgtcaacggtgagctggacgccctgccgcccatgctcagcggagccatcgaccacctgaaccccggcggccggctggccgtcatcaccttccattctctggaggaccgcattgtgaagcgggcctttcaggatgccgccaaaggctgcacctgcccgccggaatttccggtgtgcgtgtgcgggaaaaagcccagagtgcggttggtgacccgaaagcccatcgtttcgggagcggcggagctggaagaaaacagccgggcccgcagcgccaagctacgggtggtagaaaaatgcgacccatttgatatttgatttttaaaaagggacaagccctttattgtgtgttgattttgtggaagggagggactctgcaatggcgtcagcggccagagaataccgttatgcgcatcgggaattcagcacaaacgggagtctggcccgggatctggactgggcggtccgggaacgggaattggaacatgccggcgaggtccctcgccacgagcggacacaggcggctccgaaggtttatcataaggaacaggttttggtgcgggagcgtcaggcgatccccgtgctatctgtgttgggggtaacggctgtggccgtggccgcggtgatgctgctgctgagctatgtgcagctgaccaccttggccgccgacaccgtggctctgaaaagtgaactgacggtcttacaggcggaaaatgtcagcctgacggcccagcacgagcagatgtttgatatggccaccgtcaaggaggtggcggctgctgccggaatggccaagcccaccagcagccagatcacctatctggatctggacagcgaggacagcgccgtggtctaccggacggagacccccagcgttttcagccggatcttaagctccttgcatcatggagtctacgccgtggtggaatatttcgactgaacctgaaataagtatgttgtgacacagcggggagtgagaagccggcgtcttcttactccccttctttgctgaattgcccctgaaaggagaactctatggcatccaatccccggagaaaaagcgatgcggcccggcgggccaatcaggtcatccgcagccggacggtgctggtcatgctgctgctgggcatcgtgacctttgcagtgctgctctggaagctctatgacatccagatccgtcagcacagcgtattgcaggaaaaagccatcgagcagcagacccgcagcgccgtggtcaacgcctcccgaggcaccgtttatgaccgaaacctcaacacgctggccatttccgccacggcggaaacggtgctgctgtctcctctggata

SEQ ID NO: 12149 - DNA, 4416 bp, Unknown
  gut microbiota DNA sequence
taaagtggtaaattctccgcgacggtaaggtagggcagccgttagcggctccgccgctttacggatgccgcataccccttgcgggtgaagggtgtgcgcgggactacgcccgcaggcgtgtttcggagcgcaaccgccgcaaggcggctcttagcgcggagataacccaagaaaggatacaccgtcggctcaagccaatcagcggatactgcacaaccgctgattgggagccttcctcgaaacaggctcacttgatccgccaccggcggtgcttcgcctgtttccctacgccattgaaatcctaagttttcagaactattataaagttctgaaaacttgctcagcggggcaaaaagacttttttgacacgctgaatcgccggttcattgaaccggcgattttactataacccaacgcttttcggtatgcgtggcgctttttcgggacttgaagctcgtccggcgtttctgaggctgccttatcgtgaaaccgccagccttacaggctgttgacggcagcttccagctgacgcatggcctgttccagaacgctgcggggacaggcaacattgagccgcatatacccgttcaggctccggccgaaggcacagccgtcgttgaggcccagctttgccttccggatcatgaagtcatgaagcgcttcgttgctcaggcccagatcccggcagtccagccacatgaggtaggtggcatcgggggcgtaggtcctgatcttggggatgtgctgtttgcagtagtccaccacgaagtcgaagttggcggaaatgtagggcaagagctgctccagccattcctcgccttcattgaaggccacctccatggcggtgacggagaaggcgttgttgcggtggatatccatgtcggtccagaacttgtcgaacatggccttcatgtgagcattggggaacaccgcggtgctggcctgaagacctgccagattgaaggtcttggtggcggaaatgccggtgaccacattggcggcgatctcgggggagagggaggcggtggggatgtggcacttgccgtggaagatgaggtcggaatggatctcgtcgctgaccaccagaacatggtgcttcagacacagctccatcatccggcgcagttcctcctccgtccagacgatgcccagaggattgtgggggttgcacagcaggaagatgtccgcgctccggagcttttcctcgaagtcggcccagtccaccgtccatgcgccgccctgctctaccagctgattttcaatgacgtgccggccagccagctcggtcatgtcatagaactcaccgtacacgggggtctggatcagaacattgccgttctggggggtatagagccggatcatgacgctgagggtctggaccacgccgggactgaagctcatgagggccgtgtcggtgtcccagccgttgcggcgcttctgccagttcttcacggcctcgaaatagctggcgggccgggcggtgtagccccagatgccctcctcggcccgggccttcagcgcgtcaatgacgggctgggcggtccggaagtccatatccgcgatccacagggggatcacatcgtcggtgccgaacttcttgacccgttcatcatacttggcggagaggtttttggagcggtctaccacttggtcgaaatcatattgcatgactcccacatcctttctttgcgtgttcagtggcacgtctgtatgctttgactgattactaagcaagaactgtgccaaaccgccggggcggcgtagctatgcacggaaacccgttggaaagcgggaaagcacatgaaatacccgggagggattttggcaaatcgcccaaatccctcccggacgctgcgactgccccggaaaacagggccgcgcacgatcggcttttattggctgaattggtataaatggttatagcttttcatctttgaccgatttcccatagctcccggcccttgggcgtcagctggctaccgccccggccccggctgacgcgggccagcccctgctccgacatttcggagaggatggtccgtacctcctgctgagagagggggacatgggactcccgggccttttgcagcagcttatcccggcccatgggcgtcccggcctcggaggccgcatacagctgggcgagcacgaatcggaaggaatccgacatggaaggggctgccgcgttctgccgcgccgccggggcgggcaccggacgggagagggcgtccccggagagaagcagggtggggggcaggtcctccatggtgatgtcccggtggtcggtatagatgaagtattccaccacgtttcgcagctcccggatattgccgggccatgtgtgacggcggaaaaagtcctgcaccggctccgtcaggcggaagtcgccgttcagctcccggcggaactgatccatcagcaggaacatatcgtccccccgctccgtcaggggcgggatgaccgccggcagggtgttcaaccggtaatagaggtcccggcggaaggtgccctcccgcacctttcgttccagcgcctcgttggtggcggccacgatgcggacgtccacatggatgatgcggttgccgccgacccgcatgacctcccgctcctgcaaggtccgcagcagcttgatctgaagagcggggctcatgccctccacctcgtccagaaacagcgtgcccctgtgggccagctcaaagaggccggggcggccgccctttttggctccggtgaaggccccctcctcgtagccgaacagctcgctttccagcagattttccggaaacgccgccacgttgatggccagaaacggcccggccgcccggcgggaggcccggtgaacggcgtgggcgaacagctccttgccggtgccggtctcgccgatcagaagaatgggactttcactgttggccatccgggtcagagtctccttggtcctgcggatggccgccgactgtccgatcacatcgtcaaagctgtatttggcgtagtagcccttgtggagcagttggccccgcagttcgttctgccggacctccacgtcgttgaaccgctggagcagggcgaaggcgccgatacaggcgttctgccggatgaccggtaccacctccacgctgaggttgacgctgttgaccttgatgaccttggcgggcagcgtttgccgggcgcggagacacgcggcgaagggaatgtaggggaagacctcctcgcaccgctttccctggatcagcgccgcgctgacgcaggtcatatcctccgcctgacggctgcaggcgaagatctcgcccttttcgttgatgccgataacgccgtcctccagactctccaataaaatatggaacaggctttccagacggacggaccgggcaaacatctggtcaaagctgtagttgctggtggcgacgctgcgggcatattcctgaaaagaaggcccctccagcagggattccagtcccagccgcagggcgatctcgatcatcatgccggaggtgcagacccgctggccgatatcaatgaccgtttccattttcggcgggacgtagcgcatctcatccggggtcacggcgatatggacgtcctcctccagcgacgcgccggggtagaaggggatccagtggatgtgggtgatgccgaactgctccagctgggcaatggcctctcgggccatggtctcggtcatgttgacaaacagtaccttgctgcctgcgggcagctccttcagcttccgcagctcgctccaccggaaggatgcctcgatcgccatggtctggctgtccagcgggatatgcttggccagctcctccggggaaccgtaggcgtccgtggaggctacaaacagatccgcccgctccagaacacctgcggcgctgccgtccagcatggaaaagacggaaatatccgctacatcggaaaacagcccggcgatgtcctcgccgtaggacttgcctgcccgggggtctaaggcgatgacggagatcttctttttggtcaccacaaaatcacttcctttgaccagtttcttcaaccatttaatcatggaccgggcggttttacaagagaaatcgcagaatttgtcaaaaaaagaagttggcacggaatttgctttctattgtgacgatctgatatgtggcatctgaaaaacaagaaggaggagcgttcccatgatcaccaaagaagaactgctgacactgctgcgccaggaggtagtcccggcccttggctgcacggagccggtgtgcgtggctctggccgccgcagacgcccatcatgccgtggggggcagcatcgtctccgtgaaggtggaggtaaaccccggcatctacaaaaacggcatgagcgtgggaattcccggtttcccccgggtgggcctgaactatgccgccgcactgggcgcccgcctgagcaacccggagaagg

SEQ ID NO: 12150 - DNA, 1450 bp, Unknown
  gut microbiota DNA sequence
ttttcgctctcaaaagtagtaaaagcagtagtaaattctgcgtactacttatgccgccttggtttcctcggcgctttccgccgcaggctccggcttggcctctgcggtggtttttgccttggcttgcagccgttccatttcctcctgtgcggaatggaaagtagcgtgggcgtaatagttcagcgtcattacaatgttggcgtgtcccatgatgtactgcaatgccttggggttcatgcccgcgtttgccattctggtacagaatgtatgccgcatggtgtgcggcgtcatcacatcgggcagcggctccttgtggcacttgttgtacttcttggcaaggcacttgaacatggcgtcatagttgacggcggttttgggcaggccgtcccggttcaggaacaggaagtccttataaccgtcaacctcaatgcacctgccgtccctgcgcttcttcaacacgcgctcaaacgcttcataggcggctgcgctcataggcacttgacggaatccgctttctgtttttggcgcttcggtatagtaaccgtcctcggtgcttctcaaaagctggtggtctacattcacaaagcgcttctcaaaattcaggtcggctggcgtcaggccgcagagttcggaaatacgaagcccggtttccagcaggatcaccacctcgtcataatacttggcatagacgggatcgttctgcatgaagtccaaaagctcgttttcctgtgtaggggtaagcggcacctttggtacggtatcgtcgttgataacctcattgatctggaagtcaaagggattcttgcggaggcaatcgtcctgtacggccatataaaagatggcttttaaggaacgcttgctgttgcagatggtgttgtaggcaacgcccttttcctgcatacgcaaggcccattctttcgcgtcagacagcttcacgctgtcaatgctggccgcgcccagcttatcttcggacagaagtttcatcaactgctggcggctcttttgggttcctttccgcacattcccgcgctgccgggtgtacttttcataaagctggcacacggtcattttcttgccgatggtgtctatcccgtcgtcaaggtctttctgtatctgcttgattttctcgcgcagggaaagacagggccgtttcccggcaggtactttgtcggtgggtactaacttccatgagtaaacaaactggggttctccaaaggtgttaatgtatttgtaagcgtatcttccatctgatcgctggctctctccagacttcaaaaggcggcctttgttgtcccgtcttttttcatctcgttcttttcttggcatttcgtcatgctcctttccatgacggaaagagccttgacacgcttataacctattataacacgcgcaaggccctttttcactatattgtgtcaagggaatcaatgattttttcaaactgcttccg

SEQ ID NO: 12151 - DNA, 23905 bp, Unknown
  gut microbiota DNA sequence
tcatcggcgcttatgctgccgctatgggcggcgtggacgccatcatcttcaccgccggcgtgggcgagaacagcgcttctcagcgtctggatatcgcctccggtctggagttcatgggcgtgaagatggacgccgaggccaacaacgtccgcggcaaggaagccgtcatctccgccgttgactccaaggtgaaggtcctgctgatccccaccaatgaggagctcatgatcgctatggacaccgcttccatcgtcaagggctaagctatattcgatccatcaaagggaccctcgatgagggtcccttttctatacggaggaactgatctatgcagctgaacacactgtctatggtccacgaatttctgcgccggaccgtgaagccgggagacttctgcattgacgccacggcgggaaagggccgggatacggccctgctgtgccgcctgacgggggatgcgggccgggtgctggcctttgacattcaggaggcggcggtggcgcagaccaaggccctgctggcggcggagggcctgacggcggaggtgatccgggacagccacgccaatatggagcgctacgcggtggcggaaacggtggactgtgtggtgttcaatttcggacggctccccggcggggacccgtctatctttacccggtcggatacctccgtagcggcgttggaggcggctctgcggctgctgaagcccggcggcgtcatcgccattgccctgtattacggcggcgccaacggctacggggagcgggatgccgtgatgacatggctggaaacgctggatgaccggaaattttccgtcctccgctgcgattgggccaaccggcggaacgatcccccggtccccatttttatctggaaggaatgatcgatttttccgtattgtcattggcgaaaggatttgctatcatgaagctgtaacgcggcgcagaagcgccggtccagtcaggaggaataaccatgaaagatctgaaggatacctgccgggtggcagttgtacagtgtgcccctgtgatgtttgataagaaagccggtacggaaaaaatggtggaactgatccgggaagccgggaaaaacggcgcggagctgatcgtgttcccggagctcatcatcccctgctatccctacggcatgaccttcggctacaccgtaggcagccgggacaaggtgggccgtctggactggaaacggtactatgacaactctctctgcgtccccggccctgagacggagctgctgggacaggcggcgatggaggtccacgcctatgtcagcatcggcgtgtccgagcggggagaggacagcgccacgctgtataactccaacctcgtattttccccggatggggagctgctgaacgtgcaccgcaagctgaagcccaccggagcggagcgtctggtgtacggtgacgccaacaaggactatttccccatcaccgataccccctggggacctatgggcaatctgatctgctgggagagctatatgcctctggctcgggtggccctgtaccagaagggcattaccctctacatttcccccaacaccaacgataaccctgaatggcaggacaccatcaagcacattgccatcgagggccactgcttcttcatcaacgccgacatggtgttcaccaaggagatgtaccccaaggatctccactgcccgcaggagatcgagaagctcggcgacatcccctgccggggcggaagctgcgtggtggacccctacggccactatgtaacgcagccggtgtgggacaaggaggacatcatctacgccgatctggatatgcagcaggccattgccagccgcatggagtttgacggcgtgggccactatgcccggccggacgtactggaattgcgggtccatgaataaagagatagccgccctgatggaaattcccatcggggcggctgctgccgtcttaccaaagaaaaacaggcctcatcttggcagaggaggcctgttgcttcggtgtgattatgtttacaggtgcaggacccggtcccggatctcctgtgtccggccctgattccagaactgggtgccgatatagccgcaggtgcggcgggccacattcatcttgtcctgatccgtgttgccgcacttggggcacttccagatgagcttgccgttgtcctctacgatctggatctcaccatcccagccgcagacctggcagtagtcgctcttggtgttcagctcggcgtaaatgatgttgttgtagatgaacttcatcacctccagcacggcggggatgttgttctgcatgtccggaacctccacatagctgatggcgccgccgggggagaggtgctggaactgggcctcgaatttcagcttgtcaaaggcgttgatctcctccgtgacgtggacatggtagctgttggtgatgtagcccttgtcagtgatgccctcaatgatgccgaaccggcgctggaggcacttagcgaacttgtaagtggtggattccaggggggtgccgtacagagaatagtcgatgttttcggctttcttccactcggcgcacttgtcgttcatcttctgcatgatggatagggcgaagggggtggcactggggtcggtgtggctcttgccggtcatgtacttcacgcattcatacaggcccgcgtagcccagagaaatggtggaatagccgttgtagagcagcttgtcgatggtttcgccctttttcagccgggccagcgcaccgtactgccacaaaatgggggcggcgtcggaggtggtgcccttgagccgctcatggcggcactgaagggcccggtggcacagctccagacgatcctcaaaaatcttccagaacttgtccaggttgccgccggaggagagggccacatccggcaggttgatggtgaccacgccctgattgaagcggccgtagtacttgtgcttaccgggctggtaattcttggcgttggcaatgttgccgatacccgcgtcggtgaagcggtccggcgtcaggaaggagcggcagcccatgcaggtatagacgtcgcccttcagctcccgcatcttcttctcggagatgtagtccggcaccatgcggcgggcggtgcatttggcggccagctctgtgagataccagtagggggcatcctcggtgatgttgtcctcctccagtacgtagatcagcttggggaaggcaggggtgacccacacgccgtcctcattcttcacgccctgataccgctggagcagcatctcctcgatgatcatggccagatctttcttttcccgctcagtttcggcttcacccagatacataaacacggtgatgaagggagcctgtccattggtggtcagcagcgttaccacctgatactgaatggtctgaacgccgcggcggatctcctcccgcaaacgggcctccaccagctccgtgatcttttccgcaccggggtccgcgccgatggaggccatttccgcctccacgatcttacggatcttctgacggctgacctccacaaagggggccagatgggtcagggagatagactggccgccgtactggttagaggctacctgcgccacgatctgggtggcgatattgcaggcagtggcgaagctgtggggccgctcgatgagggtaccggtgatgacggtgccgttttgcagcatatcctccaggttcaccagatcgcagttgtgcatgtgctgggcgtaataatcagcgtcatggaagtggatgatgccctcccggtgggcttccacgatctcctgaggcagtaggatgcgctccgtgatgtcgcggctcacctcgccggccatgtagtcccgctgggtggaattcaccaccgggttcttgttggcgttttcctgcttggcctcctcgttgcagcactcgatcagggagaggatcttctcgtcagtagtgttggagcggcggaccagagagcgggtgtagcggtaggtcacatagttcttggccacctcaaaggcgccgtgggccatgatctggtactccactaaatcttgtatttcctctacggagggggagcggttcatcttcaggcaggagaactctacactttccgcgatccgctggatctgcatgggggtcatccggatggactcgtccacgctttcattggccttggtgatggccgcaatgatcttggtgatatcaaaggttacctccgagccgttccgcttgatgactgtcatgctgatcttcctccattacattttgaaagggcgcacagggcgccctcaatatttttgtagcaaaagaatcataacatacaatatcttgcgtttcaagggctgaaaacagatttgtaatatgtcataaaaagcgcaagaaaactttggcacctatctttacctcggggacaaaagagcgtataataataaaaaatcaggatcagacaggaggaaatcaacgtggatacggtgcaaaagctgtttcgttttttagacgaaagccccacctgctaccatgcggcggccaacgccaaagcggccttgacggcggcgggagcggtggagctgcgggaatctgagcagtggaagctggaaaaggggacactatatgttgtggagcggggtgactccgctctggtggcgttccgggtgccggaggggccgtttcacggctttttgatggcggcggcccacagcgattctcccaccttcaaggtgcgggagaccgcagaagcggcttccgccggcaataccctgcggctcagcgtggagccttacggcggcggtgtgtggcgtggctggctggaccggcccttgtctgtggcgggccgggtggtgatccggcagggagaccgccttgtgagccgtctggtgaacattgaccgggatctgctggtgatccccggcgtggcgatccacatggaccggagcgtgaacaagggagcggagttgaacccggcggtggacctgttgcccctgctgggctgcggaaaggagccgggagccttccggaagctcatcgctgaggcggcgggagtgcgggaggagcatctgctctccacggagctgttcctctatcccagaacaaaagcggtgcagaccggcctgaacggggaattcatcgtctctccccggctggacgaccttcaatgcgtgttcggctgtctggagggctttttagcggcaaagcccggcgggagcctgccggtgctggcggtgttcaacaacgaagaggtgggcagcaacacccgtcagggggcggattccacctttctgaccgatgtgctggagcggatcgcccacggctgcggccttgacagcgaagcgtggaaggcggccgtcgccaacagcttcatggtgtcggcggataacgcccacgccatccaccccgcccacccggagtacgccgacaagggggagttcccggtgctgggcggcggcatcgtcatcaagtacaacgccaaccagcgctacaccacggacgccgtatccggggcggtgtttcaggctatctgtcaggaggcgggggtgccggtacagcgatacagcaaccgggcggatctccccggcggctccactctgggcaatatctccacagcccatctctccgtccccaccgtggacatcggcctgcctcagctggccatgcacagcgtctgcgagacggcgggggcggcggatacggactatctggtaaaagccatgaccgcctatttttccagagattttcaccgcgaccgtgacggcggcatcgtcttttgacagggaggatctatgaaattattcttcaagcagcggtttttttcgtggttcgacagctatgacatttataacgaggcgggggagacggtctacaccgtagagggcaagctctcctggggccattgcctccacatccttgacgccgccgggaaccacatcggcacggtgcagcagaaggtgctgaccttcctgccgaagttcgagctgtacgaacatgaccagtatatcggcagtatccaaaaggcgtttacctttttcgccccgaaattcgacattgactgcaacggctggcaagtccagggcagcttcatggaatgggactatcaggtaacggagccttgcggggcgctggtggccaccgtcaccaaggagctgttccactggacggatacctacgtcatcgacgtggtaaaccccgccgatgccctccgggcgctgatgctggtgctggccatcgacgcggagaagtgctccagaagcaactgaatatacagaaaccgaggccggacgcacaagcgtccggcctcggttatgtcagtcgggttgtctttgaaacacgccgtaccagtcggggtcctttcggaacagcgccgccgctttagcgacggcggcctcccggtcggcgggaccgctgaccagaaaccgtcccgtgtcagggtcgaaggttccggtggaggtatggcccgccttgtcggagacctccatgatcagccccgcaaagtctgaccagtcccggtcagcccgcaggtgaaagaggtcccgggtgcaggtttccccgctgggacgccggctgaatgcggtgccgagggacttcttgtcggaaaaggagacacggaacgtccacccctcctgaccgctttcaaagccgctgacggcaaaggtgccctcaaaaacgccgtagcccagcagattccgggtgtcgtgaccgcagatcacgaccgtgtgctccacggcgtatgccggatcattgaaccggtattccgtggcagtgacggtggtatcgatcttccgggcaaagggcagacagatgacggctgtcagcagaaccgcaagcactaagagaatcagaatgacgcgctttttcatgggggcctcctttctgatggggagggtttattcctccggttccgtggaagtctcagcttgttctgcggcaaattcctccttggcctgcgccagaattttccgctccgccttggtggtgagctttgtttcgtcaaaatgcgcgaacaggtccgggcggcgggtcatggtgcgcttgtagctctcctttttccgccacgccgccaccttggcgtgatccccggagagcaggatctccggtacggcccggtcatgccacacggcgggccgggaatactggggatattccagcagaccgtcccagtgggattcctcctcaaagcactcggcgtccggcagcacaccgggcaccatgcggcacacggcgtccgctactgccatggcgggaatctcgccgccggtgagcacaaaatcgcccatggacagttcctcatccacacacgcgtcgatgaaccgctggtcgatgccctcgtagtggccgcagaccagaatcagatggtcatattgggctttcagttctctggcgacggactgggtgaaggtccggccgcagggggacatgaagatggtccggccggggccataggtgttgacaacgtgctcccagcagcggaacagagggtctgcctgcatcacggccccacggcctccgccgtaggggtaatcgtccacctgcatctgcttgttggtggtgtaggcccggatctggtgggtgcggatggcgatatagccccgctcctgcgcccggcctaagatgctgacgttcagcatggcgtccacggattccgggaacagggtcaaaatgtcgatctgcatgtccatttacagcccctcccagaccttgacctccatccgtcccccgtccaaatcaacggagcggataaaggcgtccttcacggcggggatcaggatctcccgctcacccttgacggtgtagaccttgctggcggggtactcgtccaccgccgtcagagttcccagcagggcgccggtgtcacagtcgtagacctccagccccagcagttcatcgtcaaaatactctccctccgggagaacgatgtcggcccggcggaggaacaggtctttatttttataggtcagggcggcgttcatatcgtccacgccggggagcttcagcagcaccagctccttgtggacgtgattcgccgtgggggtgatgggctgaccgtcgatataaaaggttttgcagcgggtcagcagcgcgggggagacccggcggggctgcacccgcacctcgccccggatgccgtgggcattgacgatgcggcctacccggataaattcctgcttcataaagcactccttgtctgtgtttgatttcttgcctgttattatatacgttttcggcgggacaggcaataggaacctgatttctgaaaaaatgggagacttttttgacggagatctgcgctttcgtgcaatcagcgtcttgacggacggaaaaaaagagggtataagtaatatgttttgcatactgaagaagagaggaatcgtttatggagacaaaacgtgccagttgggccagcaatctgggcttcctgatggcggctatcggctctgcggttggcttgggcaatatctggggcttcccctacaaaatgggtaagtccggcggcttcgcgtatctggcggtctatgcgctgctggcaattttcgtaggctttatcgtcatggcctcggagcttgccatgggccgcaagaccggacagggcgctatgggcacctatcacgccctgacgaagaaattccggtggatcggctggctggcgctgttctctccctttgcggtgatgggcttttacgcggtgctgggcggttactgtatcgaatatatggccctgaacctcagcaactttgccttcggcagcgaatcgctggccaccggcggggagctgtttaccgctatgctgtccaatcctgccggagcggtgctgtttgccgccctgtttctggctctgtgctatctcatcaaccggagcggcatttccggcggcattgagaagttcaataacgtaggcatgcccacgctgtttgtcatgctggtggtcatcatcatccgctccctgaccctgcccggcgctatggagggcctgaagttcatgttcgtgccggggtacgccgtggaagccgggtttgtggcggagacgcccagcctgctgtctgtgtttgccagcgccggcgggcagatgttcttctccctgtctctggcgatgggcgccatgatcacctacggctcctatctgaaccagaaagaagatctggtgaaaaactccgcgatcatcgtgtttgcggatacgctggtggctactatggccggtatcgctgtgatccccgctgccgtagccaacggcatcgccagcggaacgccgctggaccagatcaagctgggcggcccgaatctgctgtttgtcaccttacaggatgtgttccgggccatgggcaccgtcggcgcgctgttcggcgtgattttctatctgctggtgctgattgccgccatttcctccgccatcgccctgatcgaggtggacatcacctattttctggaccgggcggagcagaaaggcagaaagggaaaccgccccaaggtggcgtttctggtctgccttgccattttcgcagtttcggtgctggtagggatcgacggtctgggtaccaccggtgtgttcccctggcctgcgaccgccggctggaacgattccatgctggactttgtggatatgctgtctgagggcctggccatgcccatcggcgctttgatgatgagcattatggtgggctgggagatccgtcctcagacggttctggacgagctccatatcggctataccggcaggatcgacaccttctatcggatctgcatcaagtatatcacgcccatcggtatgctgctggtgctggcgggacaggtgaacgaattcttctcactgaactggttctgattggttcagattggtcctaaataaaaatcaagggaacggttattccgttcccttgattttttactattactatgttccgcttttcagcaggccggccaaatagccgctggaccaggcccattgcagattgtagccgccgcagtcgccgtcgatgtccagcacctcaccggcggcgtacagccccggcaccaggcggctttggagggttttggggtcaaactcggcggtacggataccgccggctgtgacctgcgccccgtcaaagcccagtacgctgaccaccggcagagcgaagtccttggcggctcccgcgatcttccgcagatcggcgggagacagggatgccacagggtccgtcagtacgtagcctgcataccgcaggaccgtgcggcccagacggttgtggagcaccccggccaacaggttttccgtggtcagctccggcatggagctaagccgcctgcggagcagctcctcgatttccggtgcggaacactggggcaacaggtcgatgtgaagcgtcagggggcctttttccgtggcggcggatcgggacagctcaaacacggcggggccgctgacaccgaagtcggtaaactgcacctcaccccggctggcggccacggcgtcccggttccggcagagccggaggtcggcgttggcccggacaccctttagcgccttgacgaaggtgttgtccgtcttgatctgtaccagtgcgggatacagcttggtgacgctgtggcccaaggattgcagcagttcgtagccgctgcgggtgccccccagctttccaccggccatgccgccgcagcagacgatgacccggtccgccgggagggtctcctcggcggagaggacggtgaagccctttttcgttttcttcaggcccgtcacctcgaacccggcgcgggtcgtgaccccggcggcgtcggcggcgaagcgcagcacgtccaccacgctgcctgcctgatcggagtagggatagacccggccattgtcctccgccgtggtcagcaggcccagaccgtgaaagaaatccagcgtggcatccagactcagtgtttcaaaggcggggcggatgaaagaggcgtcctgtccgtgatagtagggaaggcccatgttcaggttggtgaggttgcagcggccattgccagtggagagcagcttgcggccaacacgggcttgccgctccagcagcgtgacgctatggccgcccttggcggcggtgatggcggccatgaggccggaggccccgccgccgataacgatgacattcatggttggctcctttcgccgcaattcggcacaggaatattgttacgctgttcattatacgggacttgagcagaaaagacaagagcggtctggacttccaacataagcaacgttaatgacagtgtttattgtgaaagcacaccataaatcagcctgtaaagcatccgttttttgccaacacctgctaaagatactaaaaatttggaaaaatggttgacaatggcgaaaagcggtgctaatatgcagtcaaaattgaatcgcttgatagaggcgcggtatccatcagtactctccacaaggccagcgcagccgtggagtgggaaaggggccaccgccgaagtgtcaggacaatgcctgttgtccggatgctgggtcggcagagaagatctgtcggactgtcacaagaattttttgtgaagcgctatcattggctgttcggaggtgtcctattttcaagggacagattttccgtatattccatgaaccgcttggcaaagcggttcatttttttcatcattcctcgccggcggggaagaaaaacgccggacaagaaggagacagtatgagaagaagatggatgagcgcaattctggccctgaccatggctctggccctcaccgcctgcggcggcgacagcagcagttcctccagcaatgacagcacccccgcggagtccacccccgccgctcccaccgtggagatcccccctgtggaggatctgaccggcacggataccagcgccattcccggccttgaggacggtgtgctcaccgttggcatggagtgcgcctacgcaccctacaactggacgcagatggacgattccaacggcgcggtgcccatttccaacgttcccggcgcttacgccaacggctacgatgtgatgatcgcccagcgtatctgcgagacctacggctgggagcttgagatcgtgtcctccgcgtgggattccctgtgccccgccgtgcagtccggcaccatggacgccaacattgccggtcagtccatgaccgccgaccgcatgaatgaagtggatatggcaggcccctactactacgctaccatcgtggtcctgaccaccaaggacagccagtatgccaacgcagcctctatcgctgatctggccggcggtacctgcacctcccagtccggcaccatctggtatgattcctgcctgccccagatcgagaacaccaacctgctggctcctgccgacagtgcccccgcaatgatcatgcagctccagaccggcgccgtggactatgtctgcaccgatatgcccaccgctctggccgccgtcgccaaggacgacaatctggtgatcctgaacttctccggcaccgacggcgacttccagtttgctactgaagaagaacgggccgagaacgtgaacatcggcatctctgtccagaagggcaacacccagctggccgacgccatcgacactgtcctctccgctctgaatgaggagcagttcaacgccctgatggatcaggctatttccattcagcctgagatctgagtgacccgccgggggtctccggacccccggtgatcccaagaaacgccccggcgcggggcctcgctgattattacagatgattggagactgaccatggataagtttgtgaagctgggacaggatatggtcctgctgtggagcaagtacaaggtgatgtactgggccggtatctggaatacactgaagctggccttcctcgccacactgatcggctgcttcatcggactgctgtgcggtgtgctgaataccattccttatacgaagaaggaccctctgcccaagcggttcctgctgaagctgctgcggattatcatccgcatttatgtagaggtgttccgggggacccccatggtgctgcaatccgtgttcatttactacggcctgccctacttctccaataacgccctccggttcgacaatattttcgccgccgcgcttctgatcgtggccatcaataccggcgcgtacatggcggaatccgtccggggcggcatcatttccattgaccccggccagaccgagggggccaaggccattggcatgacccatttccagaccatggtgaacgtcatcatgcctcaggccctgcggaacatcatgccccagatcggcaacaactacatcatcaacgtgaaggacacctccgttatgttcatcatcggctttacggagttcttcgcccagcaccgctacatcgtgggcgttaacaatatgtacttcccatccgccaccattgaaatgatcggctacctgaccctgacgctgatcgcatccctgatcctgcggctggtagaaaagctcatggacggctccgacagctacgagctggcccagggagatcagctggtgatggcggcgggcacttacagccatcccgaccggggaacaccctttgacgaggtcaaccgggaatacaccggcgaggaaaagcggaaccgcatccgcatcggcctgaaaaaccgcaacggcagcacgagaggaggacgctgatatgagcgagaatatcttagagatccgccacctcggcaagtccttcggcacccatgaggttttgcgggatattgacttcaccgtcaagaagggcgacgttatttccatcatcggcgcttccggctctggcaagtccacgctgctgcggtgtgtcaacctgctggagacccccagcagcggacagatcctttaccacggtaccgacgtggcgggccggggcgtcaatgccccggagtaccgctcccatgtgggtatggtgttccagtccttcaacctgttcaacaatatgtcggtcctcaaaaactgcatggtgggacagatgaaggtcctcaagcgcagcaaggaggaggcccggcagcaggctttgaagtatctggaaaaggtgggtatggcgccctatatcaacgccaagccccgacagatctccggcggtcagaagcagcgggtggccatcgcccgggcactggccatggacccggaggtgctgctgttcgatgagcctacctccgctctggacccggaaatggtgggcgaggtgctgaacgtcatgcaggcgctggctcaggagggcatgaccatgctggtggtgactcacgagatggccttcgcccgggacgtcagctcgcaggtggtgttcatgcatcagggcgtgatctgcgaacagggcacaccggcacaggtctttggcgccccccgacagcaggagacgaaggagttcctggcccgattccggggcgtggaataaggagactgcaatcgtaaaagagaccccggcggctgttgaaacagccgccgggggttttggctattttgcttcagaaaccagtcagaaaagctgcgcagtactcaaataaaacaaaaagataaaacacagcccgctgtttgaaaacagcgggctgtaaacattcgggaatacgcaggtgcttacatggattcgtggaaggtgcgcttgaccacctccagctgctgctcgcggctcaggcggttgaagttcacggcgtagccggacacgcggatggtcagcgtaggatacttttccggatgctccatagcgtccagcaggacctcgcggttcatcacgttcacgttcagatggtgcgcgccctgcacgaaatagccgtccaggatctgtaccagattgctgcggcgttcctcggcggtcttgcccagtgcgttgggcacaatggagaaggtgttggaaacaccgtcctggcacacggcccggtaggggatcttggctacagagttcaggctggccagcgcgccgctttcatcccggccgtgcatgggattggcgccgggggcgaagggttcgcccgccttgcggccgtcaggggtggagccggtctttttgccgtacatcacgttgctggtgatggtcagggcggacagcgtgtgaatggcaccccggtacagcgcgtgctttttcagctcggcagagaagtaggaaacgatctccacggcgatatcgtccacccggtcatcgtcattgccgtacttggggaagtcgccctcggtgacgaaatccacagcaatgccgttttcattgcggacgggcttcaccttggcaaacttgatggcggagagggagtcggcggcgatggaaagacccgccacgccgaaagcggccagccgctccaccaacgtatcgtggagggccatctggctggattcataggcgtatttgtcatgcataaagtggatgatattgatggtgtccacatacagcgcggcaacgtaggagagcaccttcttgtagttcgccagcaccttgggatagtccagcacctcgtcgtcgtccttctggatctcggggatgaccagcaggcccttcttctcgtccacaccgccgttgatggcgtacagaaggctcttggcaaggttggcccgggcaccgaagaactgcatctgcttgcctaccgccatagcggacacgcagcaggcgatgcagtagtcgtcgccgtacatggggcgcatgatgtcatcattttcgtactggatggagtcggtgtcaatgctcattttcgcgcagtagcgcttgaaggcggcggggaggttctggctccacagaaccgtcaggttgggctcgggggcggtgcccagattggtgagggtgtgaaggtagcggaaagtgttgcgggtcaccagggtgcggccgtcgatgcccatgccgcccagagactcggtgatccaggtgggatcaccgccgaacaactcattgtattccggggtacgcagatggcgcaccagccgcagtttgatgatgaactggtcgatcagctcctgcgcgccggtttcgtccagcgtgccgttgtccagatcccgctggatgtaaatatccaggaaggtagcggtgcggcccaggctggtggcagcgccgttgttttcctttacaccggcgagataggccatgtacaggctctgcacagcgtcatgggcggtctcggcgggcctggtgatgtcacagccgtagcccttggccatcagggccatctcctgcagagcgcggatctgcatctgcacttcttcccgcaggcggatacgctcgtcggtcatagcgccgtccagagcgtccagatcctttttcttctcttcaatcagaaaatcagtgccgtacagggggacccggcggtagtcgcccacgatgcggccacggccgtaagcgtcgggcagaccggtgagcagacccacggtacgggccacccgggtgcgatggggataggcgtcgaacacgccgtcgttgtgggtcttgcggtaggttctgaaatgcctttcaatttcggggttcagcgtgtagccgtactgctccagagcggattcggccatgcgcataccgccgtacaggtttacgatgcgcttcaggggagcgtcggtctgcaagccgacgatcacctcattgtcccggtcgatatagccgggggcgaagttgttgatgccggagatggcatcggtttccacatctaagatccccttgcgcagctcctctaaaatcaaggcgtgggacttgtcccagaccttccgggtgcgttcggacgtcggagccagaaagctctcgtcaccggcgtaggggatgtagttcttctgaatgaaattacgcacgttgacgagatgacgccactcgccggtgcgaaagcccttccaggcgctgcagtttacatcaataggcatcgttatacgctcctgtctattttatttaaatatggaattcacggtcaaagcgccgctgccagtcagccaaggcttccggcagcagggcgggtacgtcctctaaggaatacgggatccccagtgcatgatacttgttcacacccagcgtgtggtagggcagcagctccacccgctgaatgttgcggatcgtatgcagatacgcgcgcagcccttccagatgggcgtcggaatccgtgagtccggggaccaccacatggcggatccaaaggggtgtgccggcgttttgcacggcggagaggaattgtaaaaactcctgcggagactgtcccgtgatgctgtggtagccgtccggcgtgaagtgcttgatgtccagcaagacgaggtcagtatgggccagaatttcctcgtagccgccgcagccgcagcctgcggtgtcaatgcaggtgtggatgcccgcatttttgcacaggcgcaggacctcacataaaaagtccttttgcaggagcggctcgccgccggaaaaggtgacgccgccgttatcgccgaaatacggcttgaagcggagaagcttgttcaccaactgttcaggcgtgaagatctgctcttttccgctgcgcatggcccaggtgtcggggttgtggcagtagcggcagcgcaggcggcagccctgaaagaataccaccgtgcgaataccggggccgtccacaagacccattgattcaatggaatggatgtatccctcgatcaaatagaaaaacctccttttcaacagatcaaatgatccgtataaaaagaaaaagccgcaccgatctgagctttttctgcccagacggtcggctggtttcacgatcatactccatgtggtaacatccacttccgtcagtcatatgatcaccatgcccatagtatatgggctttggaagcttttgtcaagcaccaacgcgcggtgactttctcaacgtgtatacgccggaggagtggaatgcagcgtggcagatagccagagctttgcccgcaagctgaacagggaaggggtcaaactctatgggtgacagcctgcgctatcaggactggtttgaaaaggcacatgacctgcgcggtgcggagatcttaaatggagtgtgacggcggtaacgattcagtcatgcggcagacaatggagaaaatgcgataatgcaaggttcaactttatagcgaccgaaaggttatacgggccgctccgaaatgccacagctgtttgagcatttcgcctgtatgcaaaagaaagcacacccgttgacacggggttggtgtcgcagtgggcagatacatgagagactgtggcgttttaccgcaaaaacagcatataccattatttcatagcaaattattaaaaaaagttataggccattcgacgaactttatgtggaacttttttgcttcgacagcctattatactgtatttacagtatttacagcggtaggagggccgtatatttgccggaacaggataggagaccgggacaggggatgcggcatgcattaagtaaaaataacgtaaatgctttgctatcgacaaagcgcttacgtcatttgaaacatttttggacttgcaaacttgcaatgtgtagagttataatcatatcaagaacgtagctgtattaatatggcctgcccctcagtaggaacggaggagcagtttctaagatacagcttgctcagtaggctgatccgcccgattagggggccacctcaaagggcggagagtcttcgcgttaaatacagggaagaataataggaggaattacgttcatggcaaaaaacaaagtgtttaagacgatggacggtaatgaggctgccgcatacgtatcttatgcgtttaccgaggtagctaccatttaccccatcactccttccagccccatggctgaccatgtggatgcatgggctaccaatggcaagaagaacctgtttggccagcccgtaaagctggtcgagatgcaggcggagtccggcgcggccggcgcaatgcacggctctctggagaccggctccctgaccagcacctacactgcttctcagggcctgctgctgatgatcccgcccatgtaccgtatcgccggctctcagctgcccggcgttatgcacgtttctgcccgtaccgtggccacccactctctgtccatcttcggcgaccactccgacgtcatggcctgccgccagaccggttgggcacagctggcttccgccagcgtgcaggagagcatggacctgggcgctgttgcccatctggctgccatcaagggctctatccccttccagcatttcttcgatggcttccggacctctcacgagatccagaagatcgaggttctggactatgaggatctgggcaagatgctggattgggacgctgttcagcgcttcaaggatcatgccctgagcaccgagcatcccactctgcgcaacaccctgcagaatcccgataccttcttccagtcccgcgaggcctgcaacagcgcctatgatgcgctgcccgccattgtcgaggagtacatgggcaagatcaacgaggtcactggccgcaactatcagttgttcaactactacggtgctcccgatgctgagcgcgttgtggtggctatgggctccgtctgcgagaccctgctggaggttgttgattatctggtggagcgcggcgagaaggtcggcttcattcaggtccacctgttccgtcccttctccatggagcgtctgctggagaagattcccgctacctgcaagtgcctgaccgttctggaccgcaccaaggagcccggcgctcccggcgagcctctgtatctggacgtgtgcgacgccctgtgggaaggcaagcgtaccaacatcgaggctctgtgcggccgctacggtctgggctccaaggataccactcctgcccagatgaaggccgtgttcgacaacatgaagggtgagaagaagaaccacttcaccgttggtatcaacgatgatgtcactcacctgtctctgcccgttggcgagaacatcgtcaccgccggcaagtccatcatctcctgcaagttctggggtctgggctctgacggtaccgtgggcgccaacaagaactccatcaagattatcggtgaccacaccgaccagtacgctcaggcttacttcgagtatgactccaagaagtccggcggcgttaccaagtcccacctgcgctttggccatgagcccatccacagcacctactatgtcaccatggctgactttgtggcctgccacaagacctcttacatcaaggacttcgatatcgtttccgagatcaagcctcacggcaccttcctgctgaacaccagctggaccggcgctgagctggaggagcacctgcccaaccgtgtgaagcgtcagatcgccgagcgtgagatcaacttctacaccatcgacgctaccgctatcgctatggaactgggcctgggcaaccgcaccaacaccgtgctgcaggctgccttcttcaacctctccggcatcatccccatcgaggacgccgtgaagtacatgaaggacgctatcatcaagtcctactccaagaagggccagaagatcgttgacatgaacagcgccgccgtcgacaagggcgttaacgctgccgtgaagatcgacgttcccgagtcctggaagaccctggctgacgacaccaaggctcccgatgcaagcctgcctcactacatccgtgagatccagatccctgtcaacaagcaggccggcgatgccatccccgtgagcgagttcatgccctacgctgatggtgttaccccctctgagacttctaagtatgagaagcgcggcatcgctgtgaaggtgcctcagtggatccccgagaactgcattggctgcaacaagtgcgctctggtctgcccccacgctgctatccgtcccttcctgctgaacgcggaggaagaggctgcaaagcctgccgccttcgtcaccaaggaagccaagggcaagggctttgagggcctgaccttccgtatgcaggtcgatcctctggactgccagggctgcggcgcctgcgccaatgtctgccccgccaaggagaaggctctggtcatggagctgctggatacccagatgcccgagcaggagaactgggagcatgccctgaccctgtccaccaagaccaaccccatggacaagttcaccgtccgcggttctcagttcgagcgtcctctgtacgagttcagcggcgcctgcgccggctgcggcgaggctccttacatgaagcttatgtctcagctgttcggtgaccggatgttcgttacctccgctaccggttgcgcttacgttgtgggttcctccactccttccttcccctatgtggccaatgagaagggccatggtcctgccaactccaactccctgttcgaggataacgccgagtatgccctgggcatgaagctgtccattgaccagatgcgtcgtcagatggctgctcacgctgaggctgtggtggcttctacctccgacgctgctctgaagagcgctcttgaggcttggctggctgagggcgataacggcgacaagacccgtgctctgtccgaggctgttgtggctgctctgaacgccactgctgagacctctgatgatatcgccttcctgaaggccaacaaggatgctctgcccaagaagagcgtctggatgtacggcggcgacggctgggcttacgatatcggcttcggcggtctggaccatgtcctggcttccggcgctgacgtgaacgttctggttgtcgataccgaggtgtactccaacaccggcggtcaggcttccaaggccactcagctgggtgccgtggctcagttcgccaacggcggtaagagaaccggcaagaaggatctgggcgccatcgccatgacttatggcaatgtctatgttgctcaggtcgctatgggtgccaacgagcagcacctcatcacggctctgaaggaagctgaggcacatcacggtccctccatcctcatcgcttacgctccctgcatcaaccacggtatctccaagggcatgagccaggctcagctggaggagaagctggccagcgagtgcggctattggcccctgtggcgctatgtgcccgagctgaaggccgagggtaagaatccgttcatcctgaccagcaaggagcccaatggccagctgctggacttcatgatgggcgagacccgtttcgcttctctgaccagaaccttccccgagactgccaaggtcctgtttgccgaggccgaggagttctgcgctcagcgctatgccaaatacaagcatctggctgagcagtaattgtcggtcagaatcagcacgaaacatgaaattggcgtgaaagcaaaccttgctttctgatgtaatctcgtcttgtatgggtacaagttcaaatgcagcagcgactcaggaaaacaactgaggttacatatccgttttctgtttttactcttaccatactctctccgcataaaaggctctctggcatattgccagagagccttttgcatataattgggaaacgatcatgatgtaccgctgtgccgcgttacccgcaagggcagcgtattcgatcatcatgcattccgcaacagcaggttgcttgtcataccgataactttggggtatgatgaccgtgaggtgatgatcgtatggatacaaaggatatgattctggaactcaggacaaagatgggactgtcacaggacgagcttgcggaaaaggtatttgtgacccgtcaggcggtttcccgctgggaaaacggtgaaacaacgccgaatatcgaaaccctgaagctgctctcaaagctctttgatgtctccatcaatacgctgctcggctcaccgagacagctgatctgtcaatgctgcgggatgccccttgcggacggggacatcagcagggagacagacggctttttcaatgaggagtactgcaagtggtgctatgctgacggcgagtatatgtaccacgatttagacgatctgatcgaggtctgcgtgcagaacatggccagcgaggaatttcccgccgaacaggcgcggacctacctgaagaatacgctgccaaagctcaattactggaagcggtatgaaaatctcggcggcgcggaggcttttgcgcagtataagcagacgttgatggatgaattcaacgatctgcatattgacgggatgcccaaggtggaaaagctcaacgcgcttgtaggcaagtatatcaaccttgcataccgccttcccaacggaaaaaccgtcaaattccttgacgatcaggcgacctacctcggcaaccagctggaatgtgagtttggcggcgaccgctgcttcggcattgccgcaaatatggattttctgctggtctgcacctatgaggaagacggcaaaaccccggagctggtcgtttacaagaaaagatagcaaaaatcaggtgcacgtctcacggcgtgcatctgattttttttgactgaacaggctgacggaaaagggcgcgtctgtgtgccgatcctgcagggaatctgccagcgggcaggcatgttctgtaaggacgcgggcaaaacgcccatgatccagcgccagcggtgtgattaccgagcaggtatttgacttggatcgatcacacaccagaagccggctgcaccttccgtgatgcgaacggcctttttgcagtgaaacctatcaaaaattgacaatatggctcaaatcaggtaggattgcagagagaaagcagctggcttttgcggggaagaacgtattcatggaggcttctaatgagtgaaatgatagagaatccaggcatggaccggaagaaattggaaacgttcatcttggaaacctatccggcaagcgcagaccgtccgtggctccaatatcccaattatgaggtgttccgccacagcagcaattaaaaatggtttgcggttattatggatctgccgaaaagcaagcttggactgcagggtgaggagcggatagacgctgtcaacttgaaatgcggtcccattctggcaggctcgctgctgatggagaacggcttttttccagcctatcatatgcggaaggacagttggattaccgttgcactggatggcagtgtggcggatgacaaaatcaaaatgctgctcgatgtaagctatcaggcaacagcgccaaaggtgcgcaaaaagaag

SEQ ID NO: 12152 - DNA, 3179 bp, Unknown
  gut microbiota DNA sequence
atattattaaaaataatatttataataagtaaaatgataaacgaacgatgagaaaggggtatcttactatggcctattttttccaggagccttcccataccttcagcgaatatctgctggtgcccggttattcctctgagcactgcatccccgccaacgtgtctttgaagacgccggtggtccgcttcaagaagggggaggaatgccccctgaccatgaacgtccccatggtctccgccgtcatgcaggctgtgtccggcgagcagatgggcattgcgctggccaaggagggcggcatcgcctttgtctatgtctcccagtccattgagtctcaggcggccatggtccgccgggtgaagaactacaaggcgggcttcgtcatcagcgactccaacctccgggtgacggataccctggcggatgtgctggctctgaagcagcgcaccggccactccaccatggctgtcacggatgacggcaccggtaccggcaagatgctgggtctggtcaccagccgggattaccgggtcagccgcatggaccccgacgccaaggtggcggatttcatgacgccggtggagaagctcatctacgcaccggagggcaccagcctgaaaacggccaatgacatcatctgggatcacaagctcaacgccctgcccattatttccgaggacggccatctggtgagctttgtgttccgcaaggattatgattcccacaagggcaacccgctggaactgctggacagccagaagcgctatgtggtgggcgcgggcatcaacacccgtgactacgaggagcgtgtccccgcactggtggaggccggtgtggacgtgctggtaatggactcctccgagggctattcctattggcagaagcactgcttggagtggatccgcgccaagtacggcgataccgtgaaggttggcgccggcaacgtggtggacggcgagggcttccgcttcctggccgatgccggagctgacttcgtgaagatcggcatcggcggcggttccatctgcatcacccgtgagaccaagggtatcggccgcggtcaggccaccgcagtcatcgacgtggccgccgagcgggataagtattttaaggagaccggcatctatgtgcccatctgcgccgacggcggcatcgtgcaggactatcacatcacgctggcgctggccatgggtgctgatttctgcatgctgggccggtatttctcccggtttgacgaatcccccaccagcaagattttggtgggcggcagctatatgaaggaatactggggcgagggcagcgcccgcgcccggaactggcagcgttacgatctgggcggcgccgcaaagctgagctttgaggagggcgtggactcctatgtgccctatgctggcgctctggcagacggcatggccaccacgctggctaaggtccgttccaccatgtgcaactgcggtgcgctgacgatcccggagctgcgtgagaaggccaagctgacgctggtctccgccacctccattgtcgagggcggcgcccatgacgttctgctgaaggacaccaccaacggcaaccagcggggctaaggtatttgaacggctctcataccgccctctgaccgcgcgattgcgcgtccaagcgatttgtggagcaaatccttgaaatgggcgggcttcgcctgcccatttgagtcctatgcggggtccccgcgcgtctcggcgcgtggggagcgggcggcgcccatgacgttctgctgaaggacaccaccaacggcaaccagcggggctaagatattaaaagagacagcttttgaagctgtctctttttttgccggcccatcctaaaaagttgagtaaacgatttgctgaaacttatcctaaatctcttgtatctggacctgcaaagttgtataatataaacgattaaatacatcaggaacggcatggtcgtttctgcggatcaggagcatagcatgttacatagaaaacctcgtattttagttgttggcagctttgttatggatgtgatcgcaacaacagagcagatccccggtgctggacagacggtttacggcaagtccttccacatggcacccggcggaaaaggcgccaatcaggccctccaatgcgcccgtctgggcgcggaagtgaccatggtaggctgcgtgggtgatgatctgtttggccagcagcttctggagcctctgcgggaagccggaatggatgtcagttatgtggtggtccgaaaaggaattcactccggcgtgggacacgtggtgttggaagtcacggaacacagcgcccagaaccgcatcgtagtgatccccggcgctaaccggaccttgacggtggaagaagtggcctggatccaacaggcggtatccggatttgacatggttctgctgcaattggaagttcctattgaagtgaaccgggctgtggcccactgggccagagaggccggtgtaccggtgatcctgaacccggcccccgccacggaactggacgatgagctgctgagcctggtctcctacctgatccccaacgagcaggaggcatctcaggagacccatctgcccctgcgctttgataagtccggcccttgggatgaagatctgagaaacattgccgatacgctgcaaggtaagggcgtggagcatgtgatcatcacgctgggcagctacggctccgctgtggcggagaccggcggcccccggtatgttccctgtgtccatatggagcatgtggcagatcccacggctgccggcgattcctttgtgggcgcgctgtccaccgcgctggctgtgggcctgcccgaggatgcggcgctgacctttgccagccacactgcggccatcacggtctcgcggttgggagcaatgccgtccctgcccacactgccagaggtgctggagctaatccggacccgtggcggcgcagggctggacctgtcctgtctggatgcgctgcgctgaggagggaggaagtatgacggatctttttgagcttcgtccgggccgctaccggcatttcaagggcaacgaatatgagctgctgtatgtggcccgccactcagagactctggagccgatggtggtctacctggctttgtatggagagcggggcgtgtgggtgcgtcctgccgccatgtggagcgagccggtagaccgggacggctatcatggc

SEQ ID NO: 12153 - DNA, 37060 bp, Unknown
  gut microbiota DNA sequence
gcagagcagccgcaccatgacaacggatatgtttatcagtctggttcgcaagtacaccagagcaaaaaagctgacaccccggatgctgaatgaactggtggaaaaaatcgaagtgttcaatgcagaaaaggtcaacggtgtatgggagcagcggctccgcattcactacaactgcgtgggcaccatcgagattccaagctcacttcctttgccgacacctgatgtgtcggtgaatacaagaaaaggcgtagttgtgaactacgccccctgtgatgtcgctatttagcaaataaaaaatgacgaatgttctttgacagctaaatgctgtaagaacattcgtcatggtgcgcctgaagggactcgaacccacacgctgaaagcacgggaacctaaatcccgcatgtctaccaattccatcacaggcgcgtaccgtatatttgatctcatagagtatagcacagtttttcctcttgaacaagaagaatttacgcggtacaatggggtctgaaattattcgcatggaaatgagggatcgctttgtccacaccccgcatcgctgccattcacgacctgtcctgcttcggccgctgttcgctgaccattgccctgccggtgctctccgccatgggctgtcaatgctgccccctgcccacggctctactttctgcccacaccggattttccggcaatacctttttggatctgacggtggaaatgggccgtatcgcggatcactgggccgctatggatctgcaatttgatgccatttacagcggttttttaggcagtgccgatcaggtggataccgtggcacggttttttgatacgttcaagaaatctggcaccgccgtcatcgtggaccccgtcatgggcgatcacggcaccgcctaccgcacctgcacgccggatctgtgccggggaatgcgggcgctggcagaaaatgcggatgtgatcacccccaatctgacggaggcggcgctgctgctggaccgtccctacgaggagatccgacaggccgacgcctatgaggtggtccgccggttaagtttgggtggacggcggtctgtggtgctcaccggctacttttcggagccgggacagaccggagccctgtgctttgaccgtgacagcggcgagagcaaagctgtacagactccccgggagccgcaggacttttctggcaccggtgacctgtttgccagcgtcctcgctggaggggtggcaaggggtgttcccctttttcaggccgcccaagccgccgcggattttgtccgtgattgcattgcacgcaccttggccgagggactcacagagcaggatggcgtagacttcgagccgctgctggggcagttgaccaacagcaaataaaaaaggctgggaaggataatatccttcccagcctttcgttgttattcgtcccggtagcccatgctccgcacatagttcaaattatcccgccaatttgaccccatgaaatctccgatttcatgggtaccctgctttgacctgagcggacaggcaaagcccgtccgctccaaggttttgcaccgcaaaacgcttgcacgccgctgacgcggcggctcactggcgttcgcggaaaattggcatcaggccgtgggaaaaccgttattcgtcccggtagcccatgctccgcacatagttcaaattatcccgccaattttccttgaccttcacccatgtctggagatagacttttgtgcccatgaacttttccatatccgcacgggccagagagctgatcttcttcaacatggcaccctgcttaccgatgatgatgcccttgtggctggccttttcgcaatagatcgtggcgtccacgtccaccaccccggaatcccgctcagagaatttggtgatctccacggcggtgccgtgggggatctccttatccagacacagcagcagcttttcccgcagcagctcgcccatgacctgacgttccggctggtcggtggtctctccgtccgggaacagctgagggccttcctgagcgtatttctgcaattcgtgcatcagatcgtccagaccgccgcccttatgggcagaaatgggaatgatagcgtcaaatccgtcccacacctcgttgtaggccgcaatcaccggcagcagctccgcaggctctacggtgtcgatcttgttgatgcacaggatgcaggggatcttttcctcccggatgcggtcgatcagcgccttctccggtcctcccacatgggggatgggctccaccagcagcagcgcgcagtccacatcgctgaggctggaggtcacgacctttaccatgtaatcccccagagcggacttgggcttgtgcagtcccggcgtatccagcagaatgtactgggtgtcctcccgattcacaatgccgtagatccggttccgggtcgtctgggccttgttggaaacgatggcgaccttttcgcccaccaacgcgttggtcaggctggacttgcccacgttgggccgtccgcaaacggtgatcatggcggtttttgtaatgtttgacataggtgatcctcaactttctttgagcatttaagttcacgattcgctccatgcggtccgtttttctaacataccacagatctgccggaattgcaaccggatgtcaggtctctcccccgccaattttctcgccggagcggcggggcacccccagcggcggcagttccacacccaaaatgagttttaccaaccacacgaaaaacagcagcaccagaatcgggatcaggcaggtggtcaccagcatgactgccagagcctccaaaaagcggttcagcacattccgaagcttctccaccgcaccgactgcggcgccggtaatgctgtccgccactttggaaaagaatccggaaataccgctctgttccgttgctgagccttcattctggctgctttgaatggtatccgtagcctccttggcctcctgaatagtagccgcaatggatgcctgataggtatcctcaatcaggtcactgacccggatccccaccgggattaccagcatgattgctacgctgaacaatgccagtttccacgccagcgcgcccgccgtccgccgcagatgggggaacagcgccgcagtggcaaaggccgcgcaggccgccgggatcaggaccttgaatgccgcactggcggtgatggtcagcaaatatttttccagaaaaatggcgcagagcacgatgagaaaatagccgctgagatccgccagcttgtccgcgatcggcgtagccgtgtcgccgggcagcagcgtgatcgccgccgatgccgctgtggaggccgcagtcagttccaaaaccgtctcctgcttttcctccagtgcggcgatagacttctggtaaaaggccgggtccgtggtgagtttggccacgccgaatatggaagccagcgccaaaatcactgccgccgccacacagattattcttattccgattgttctggtcatagtacattcccctttgcaagatataatctcatcataccccgctccgctctgttgtcaagcactggctttcaagcaaaaaatcggggaaactttcataaaagcctccccgattttttgaatttatttttgaagccgatgcagaatttccgccaattcccgtcgggtaacggctttttccggctccgcaagctgggcctccgtcaggatcccagatttccctgcccatttcaggtctgcgtttcccgcctgctttgtctctgcccgaaacaggaccatcgtcggcacctttcgtgaactggcgaccttgccattgggaaagattccctgagtggaaccgccgccgtccagcatcagcgcatccgccacacccaagcccagcagcttgttttgaagctgctcccgggtcaggttggtcttgtcgcaccacaggcagatccgtccatccggcatccagcccacagctgtccgggctgcggagcgggccacatccggcgtcaggcttcgctccagcttcgccccatttttcaaaagaggcaccccggaaagaaaactgccaccccgatccgtcagcatctggggcttcccatcagaaccgatggaaattccccagtcctgataggcgtcccgactgatgaccttgccgtcgatcaccgtccagccaaccggctgaaagctgccgttaaacaaatagccgttgatgatgtggctgcatccggactcccgcttcacctgcgccagagatttccgtttgctgttgtaatagatctgcgctctggcgcaggcaaatacatcagtcatggagccggacggcgctcttggcgtagccgtcctcgtcataactgactgcaaacctgccgccggggatccactggatctgctcagtcccggcaaattccattctgcggcgcatatccaaggtacgccgggcctccttgggtttctcttctgcagggataaaaccctcccccatctctgcatcggtccaaccggccacgccgccgtcgggattcaagtggaagttggccccagccgccttcagttcggtgttgatctcctcaatgctcttgccggaattcttcccttcgctgatgattttctcaaacatcttttccatcttcgcgctcctttccgccctcagtccttcatctgtttgctaatctgatccacgcctgtggccgcgaggccgctgacgattcccaccgcagcggcggtcagcgggtccgccgccggaaaatccgtcatgaccagcatccctacaacgcccaagaccccgccgcaggcccccacgattaccgggatccacttgttgtctaggccggacaccttaacgatccaacccacaaggtagcagatcaccgtgatcgccgccacgcctgccataccaaatgctgaaatatccattcctgctcctctctgtccaccatctcaagagatgggctgacgccgctgcccctgctccaattgctccaaccggcggtccatgccccggatctgttcctccaccaccggcacccgccgtgcgaaatgattgtgctcccggacctcccgggtcagctccgtgagcttctcatccgttaccgcttgggccgcccggttgctcaagagcacccccagcagcgtcacacagccggtgatggcggcggttatgatctcactcatgtctcattcctccggcggcaccgccagttgaaagctctcccaggtatgctgtgccgtctccacctcatcccatgtatattccgccgcttcacattctgcccaggtcagatagcggaagtagaactccacctctaaatgacagggtaggatatctaaaataatcttcctgatctggtcgaactccgccggcacaccggcagttctgggaaatacgacccgcaggctgccgtccgccttttcctccgctctggcccggatgccgcagccggtgagagtatcgttgatggcctccggtgtcaggctgtcctcgctgatccgcagcagcgcggcgatagcctcccggcggtcctcttgggtcacggctgcaggcttgtgagcaaacaatacctcccggcggtcaaggccctcgctctccgccgtggccagcaggctttcccgttccaccagttctaccagcccactgacgctgtccagctccccgcccagcgccgccaactcgccgccgttatggggtgctcggagattgtagagactcaaaggggccaacaggcgaatcaaatactgctcatacacacgcctcacacctcctctgtcactgtcaccgtccccaataccggcagcaccgtgtcattggccgccagatcagctgacggggccgcaatatgacagttctctacacccggcagagcatagattctgctgttcagctccgccagcttcacgcccctgcctaacagctttccgttgaactgctccgccagatcagcctccaccgcagtcttcacattggcaaaatccgtcccttccgccgtttttaccgtcaccgccacgttcactgccgcggccgtgggcgcttttacctgcacgttcaccgcgatctcccggcttttctgaaaaaccgtctgaagctctgtcagcaacttctccgagggaataccatccggtgccgatacatacacatccactgtcccggcgccccgggcttttcccaccgccttggccgccgccacgccctcgtgacggcaggcggtcagctcataccatgcggcgttggctccattgggcagccgctgaaagctgtccaaaatccgctgccgcagttcctcatccgtttcctccgacagtccgcccgtaaatgccttttcattggtgactgccgtcaccgccacgggacacgccgtcagcacatgaacggctccggctcccacgttcccgttgctgccagtctccacggcctccgccgccacggtcaccgaaatctccccagccgggatcgtccccggctccgtagtccggaaccggacagttccctccgtcatgcacaccgttccggtctccacgctcaccgcgccggtctgtgcgttggacagccgaaaggtcaactgaccggtcgccctgctggagacctgccggacaatgcctcgcatggctccgtggcggtccagatagacccccgcagccgtctggggaaagctctgccccagcacccattccgcctgtgcctccaacgcctggatctgtgccgctgccgcccacagccgcaccgacaggtcgcagtcctcctgaagctgtccgccccgccgcttggcgtaggccaccagcatttcccgatagatcgtctccgtcgctctcacattgtcactccctcctgccccaaggccacctccgccgtcaatcggcgttcgtctttgacggcgttcaccgtcagggacgcctttccgccgttctccgccagcgtcacctgctctaccatcaggcccggctcatcccggagggcctccagtacatactgttccgccgcagcctgccgttccgcaggacgcagccggtccaaagtccacagtctgctgccgaaattctccataaagggaaactgcccccgccgggcagtcagtttcatcagcatccgctgcaaaactgcctcgtcccccttcgctgactgtaatccgtttccctgcggtacataatcaccgttcaccagcatcagcactacagaatccctccctctccgcaggtgcaaggtttgtagggctgcccgttgataagaagttgtcctctgatagaaattcgccctgtcagttcaatcgtcccatccttctgcaaatacacattgctgcccttcggaccgtaaatatagacctcccccggctgcatcccctttgggacctccgcctgcttaccgccgcagacgcactgttcttccccgccggggccgcccttaatgaccagcacggaggccccgctctccggcagccacacatagccgcccggaccgtagatgggtaactgccgcacttcgccccgggtcaccactcccatctgatctcccactatggtagagatcccctggtcggcatccgccgtggggaccgcctgcttcatgctctgtgccagccacatttcaaccacactccttcaatgtccagatcatcacggctccttctctggcggaaaaccggttttccgtctccgccacccggtaatttccggtaaggcccagcttttccagtctcatcgtcacccgatcccccggaaatgcgtcaaagctccccggcagcgttaccgtcaccgcctgctcctcctttttggactgttggatctggtattctcccgtatagcgcatggcatcccaggtgctccgccccggcgtatagatcacccggcggcactggccgcccttggcgatcatctccggatttttcacagagtagctgacattttgccgcttgtcgatgaccagtgcctccgtcagcacgccgtagtgatcctcccggattcggcaattcagcaccggactgccgctgtcaaggatgattctctttccgctgtcctgttccggtgttgccagcaactctccggttttggcaaaccggggcaggaagcctccataggtccggcaaaactccgaaatcaccttccattggctgatccccaccccagcggtatagggcaccgtggacctcagatccgccgcagccccgcaggaaatgccataaggctccgcgtgacagcggatcagttcccgcagcgtcacctgctcataggtcacaggccgggactcgttatccaacagccgtgcggcgtatccccggccggacagtgtcaccgtcatccccctgctgcccagttccacggtatattcgtccacgatcccccgtaactgggtcgttccattttcaatggcggcgaatcccgccgccatccgcagcactgtcagcatttccagctgatacaccgccgtcacggaccagctgtcgcagggcaccgtccccgtatgtctcacgttccaactcagcagcggcggcagatcatagacatgatggtctgccgtaaagatccgtcctgtcacggcagcctcacctcattccccgaataaatgagattgggatttttgatctgtggattggcagcgatcaggctgctcaaggtcacgccacagcgccgggcaatgccccacagggtatccccccgcttcacggtgtacacccgcccggctccatgggtctcttcagacgccgctaagccgctccccggccacgtcctgccgtcattgttttccgtcaggccgccatcatagccgctgtcatcctcccagaacgcaaagctgtaccgtacatagtccggcctcggttcctccgtcacggacagggaaacgaaatacgcccggtccgtccgccacacgggatgcgtcagcatccccgctcccggttcctgaaacaccgccgccagcgccttgaattcctcataggcccccggccccgcaaactcgccctcgccccgtagaatccggcaatttacgcccagatcctgcaaaacgcagccgccaaagggtaccttatgggccgccatctgccgccggtattccactacaaaggtctccggattgtggggccaggtgtaatttttatagcgcatggaggataatctcatgccattcctccctcttaaaacatggtaaatccgccgtcataccgccgtgcgtcccgctgaacagcccgggagatgtcctccacctccatcgccgccctgcttccttccgccatcagcaaccccggcagggtccccgtagaaaacgtctcactccgccaaagggcatccgcccggcgggcctgttgaaattcttctgcctgcgccgtcagcccatccagcagtctgtcatcagcttccgctctgtcccacgctttccgctttgccgatgacagtgcttcaccgctttccgcctgaccaatcagctttccctgttccgccgttggacgggagatccccttctcctgtccagcaggcgctttctcagccccctccgcagcacggcggagaacttcctcctccgccgtggtctcctctttggagggactgccggtcagcagacggtttagcgctgcctgctggcggcgccgcagctcccataaatagtccaccggctcattcccccttcatatccgcaaaccgctgaaggtcgaaggtgccgcctcgctcctccggcagcgcttctccctctgccagccgcagcagaaggtcttccatttcgccgggcgtcaggtcccgcaagacctccagctcatctccgtaaatcgcttctccctgacaatagcagctatcccgcagaatggcggcgttgcatagtagcgtccgttccagcggatcttccaccctctcccgatagtaccgccacagctccagcaactcccccgctgtcagcggcttcagagcgtccactgtcctcatgcggtagtctcgatgcgccgggccgccgtcagcgtcacccgttccgccacggtggcgttcagctccccgtcctcctgaatgccgctccactcacagccgctgtaaatgaccttgcggtccggcttgcagatcacaagagagaaatccgtgagattatagaagtcgatgccgtcggaaatggccgtatccgtggcgtacagccgggtcagctccacggtatagctcttctgcccctcaatggttgccaccggctcactctcgccgaaggcctcgatattcttgctggacttggctgccttggcccggtagctctgcaccacggcgatcttccgcccgtccaattccagataaatgtccgcactggtgggaaatcccttcatatccgtccctccttaaaccgtcagatgcaccgtcaggcggatctggttcaacccatgtgccacagcaaagctgaactccaccagacacaccgtcggatcgtccgctgcggccgtcaccgccacctcgccgtaactttcgatgatctgtgcgtcctttttcttttccagttccacaatggtctgtgcccggatagccccccggccctgagcggtgttcttggctctggcaaacttgctccgcagagcagaccgcaccgcaggaatcacatcgtcggcaatcaggacggttgtcagttcccgccaggtactgtcggcggcgctgccggtttttgtccgggtagtgatgccccgcaccggggataccacgccccctacgtcctccagtggcgttacgccgccttgaaccagcaggtcaatgtcattgtcactgcaaacgctctgtaaaccgccgatgccgtacagctccgccccgttcaggggtactgccgggtccgcgccgcaggcaatagcacctgccaccgccgccgcggcaaacacaccggaaagggctttgccgctctcatccttcatatccgggccaaccagtaccattcgctcactgttgatggcctccgccctggtcaccaactgcgccgccgtatctccgctgccgccgatgacgccgatccgctcccctctggccgcagatgccgtttccacggcggttttcagtgccttctggatggtcagctcgctgctgtcgcacaccaccacctgtacatcgcagcccgtcagggccgcaaacgccgcctgataggcctccagatccgcgccggtgtccacccgcaccgcacagaccgtggatgcgccgttggcaaacagcagcttcaaaagtgtgctcatgcccggcgtgtcagcgccgtcctcaccaaagacctccacaccggcaccataaccggtcagtgtcaccgctgtattggccgttcccttaacagccagagccgccacgccgatccgtttggccgcccgtcccgcggatgtcacgctggacgcgtcatacaccgagtagacccccggccgctcatgtctcatctcactcactcgctcataactcctttcagtcggaagtccagaaattctccggactccacggcgctctccgccagaaacagggccctgcattccagaacgccccgccgcaggaacattcccgtggtcttctcccagcaaatggcctcccaggtaagttccccggtgcggactccctccggaagcccgcccagcagcacctcggtggccgtttcgcagccgcgttcgcagtccgccgcccgattcgcccgcagttccacggtgatctgcccgaacagctccttgccgtagcgttcccggaccgcctgagtctccgggtccttcatctctcctaaataatggcagaagcccgccgtttttccgctggccgcgccgacacccaccgccgcaaccacgccgctgtacgccatggcctgcttctcagggaacgcctccatagcctgaatcccggccccgcgcagggcgtccagcaccgccatgcggatctgtgacaattccttcattccgctgccctccgctctggctccagcaaggcccaccagtgattgatctcgtctgacagggcgtgttcccggctgcttcgcacccggaagctccgtcccctccaaatgacggtatcccccggctggacctcctccagcccggtatacctccacagccgttcgtctatccagccgatgggtgtctgctctcccggcactgtctcatcccgagcagcggcaggctggataaaggcccggacggacttctcgccgtctctgctccgcagcgttacggtctgaccgtaatgttccaggatctcccccatcacgccggtcatcctcgcacccccctgaagcaaaactccccggaggcggcatagggacgcatcagccgctccgccgtctgccgcaaggtctccgccatcacagccgcggatcggccgccgctctgccgtacagtcacctcacccacggtaaaggactccgccctgcaccgctttcccatgtagtccgccgccgccatgaacgccgccgcgcaccgcagcgcgccgccacagtcctccttcgtcacaccggggtccaggcggctctcccaagccgcctccgccgcttcacacagcaccgccagcagcgggtcctcctgagaggcgccgcacagctccgccgctaatgcggccgccgttatctccataggtcactccccttccgtttccgctccaccgcaccgggaatcccggtgcggtggacaagttcagaccttcagcaccttggccgcgtcggtaaacagcttggcaaagccggaaaccgaggtaatggctgcccgctccagctggcggtcaatgagcttgtcatactccaccaccacttcactgccgcagatctgctccaaggcgtagttcttgtccagaccgatgatggtcccggcaggcacggcgctggaacgcagcaacttggcccccaaaggagtagtcagcttgccagtagcctggaaattcagcccggtgttgggattctggaattcgctgagcttcagcatggccagcatcatgtcattgctcaccagcatggtgttcatggtataggggtcaaactgggcccagaagtccagcagagcgccgtagctcagggtcccggccgtgccgccgatggggctggtggccaccttataagagggcgcggcattgccgttgccgtcgccatccttcagcaccttcacagcgtcctccagatgcatccggcccatgtacgcaccgatctgccgcagcgtcacggcaaacaggtccagtctctgaaagcggatggcctcatagggagccaccaacatacggccccgcttatgaagccgcaccagattctcctgggtatgaatggtagtctgggggatctgcgccccctcctccacacgtttgagcttcttttcctcctccgtaggagtggacgcgatagaacggtaatccataccgtcaaaattggtaacggtggcggtgatatccggcaggatgctctcctcctccataccctgacgcaccacacgggacacgaattccgggaacagcacagcggactccgtagaccagaagaacttctccactctatcgctgcccgcgcccttcaccttgatgtcaaagcgcttgagctgacgttggaaggcgtccagtccctccagagaggtgcccttgtagttctcgctggggtccagagcttccagcgtctgtgcaaagctgcggccactctgactgtacatacccttttccagtttcagattttcataatgataagccatattctctccccctccttacagcacaatggtcacggttttagcagtggtatccacctctacggcaagatggctcttgccgccgtcggaaacaaccttcacgccgccgctgccgtccgctgccaaagagttccaaccagcagcaggcgcggaagccccggtgtagcttaccgtcaccatgccccccatagccacagagcaggctttgccgtctctggccacggacaacaccacaccctcaaagccgtcattgtccgcgcatttggcaactgttccgttgccgctgaccttcaccacctgccccgtggacacaccgtcgcaggcaaaggtggcggcccactggccgatgccctcataagaaacgttcatgcaatttcctccctcatattgtgtttgtcccatcagacaaggaacaccgcttcatcctcccgcttggtctccgcctgctgccgcagctgcggagccacgggaaatttcttcgcgatctgggcctcataggccctctttaactccagcaattccgcctcatccagtctcccaacggccttggtgaagatttttccatccagatgcccgtccgccagcatagcaagacgcaccacctcccggcgcagcccagtcagataccgctgacccagctctgcctgcttgcgcagcattcgcagttctgtcccctcggaaccaaaccgtttcactacaccggcccttggctgggcaggcaccgccacaaaggaccactcataggcgtccttggggtccttcagttccataaagcacagcttttcgccgtacatctgacccttcacatggccgcaggcgccgttttccgcgccgcacacggagcacacgctccgccccatgctgcatcccacgctgacctctttcttgataccaccctcgatctccgtgataagctcctgattcttttccgtccgcatgaggtaggcccagcccttcagccaacggtactcatcccccgccgccgtcacggtgtccggttcccgcaccacctccgtccggtaaatacgggccgtctggcccttagcggaccactggtgatcaaagattccgctcttgcctaaaaacaattctcccagtcggtccagatcctccgtcccgaaccgctcaaagtcccggtccacctcgttgtcgcacagccgcacgctgaatgtatacacctgatccgccgtcagctccgccttgctgaaccggttgatctgatccagttcttcctttgtcagcatccgtttcctcctgtcacgcttttttcgcggcccccgccgccctgtcctcaattttaccttccgccacgtcattctcgattcgcagcttcctcgcctgctcccggtacagttccgccttggcacgccccacaaaagcgccgcttttgcaggggtccctttatttcactcaaatcgccaggcaaagcccgtcgatttcaaggttttgcttcgcaaaacgcttgacgcggccatgccgcggctcgcctgcgctcgcagaagccaaggcccgtcacttctgtttttccgccgcgtcattctcgattcgcagcttcctcgcctgctcccggtacagctccgccttggcttcctctacctcatcctgcaagttgatatcctcccagtccacccggaacgccgctgtctctccctgcatccgcagccacatccggcagatctgctccaccaccggtgtcagcgtccgtcgaatagcagtgatttccgtggtgagcatatccgcctgctgggcgctcatccgctccgtggagttccagttcagccccagcataaagggcgggatggaggtttttgccacgatctgctccaacacctgccgcaccggcacctgactgtccagaatgggcgcgtcgccgccgatgaccttgatatccacatctcccaccgccacgaagtcccggacactgccgcttctggtatcctgcatagcccggctccactcgctggcaagaagctgcccccgttccgcggcattgccgtcgccgtcccggcaggtcacggcaaaccgcatattgccgcaccgttcccagttgacccccaccgtgttgtagatcttcatcagaatatccgccataaacggcaatccccgcagcagcgacacgccgtaggggtgctcagcttccggatgcagcggcgtgaacagcagcagctcctgatacggcagcgctgccatccgcccccgctcatccggcccgaaaatctgaaaatccagcgggctttctccctctctcagctcgatccggtccatccgtccgcacagcagcgccgccagatcccggtttcccgccgcaggcaccatctcgcctacggcgccgccgcagatcagcagcgattccaggtactgctccaaaaaggcgttgataccgtactgtccccgccccgccgggacccgctctaaaaagtcccgcagccgcttttctgtctccggatcctcacagaacaccagcgcaccgccgctgaggcggatcaacttgcacacggcggcgtccaccaccggtacagcctcccgcaccgcctgatacagccgcagctctccgccgcgctgaggcgtaaagctccgcagccccgcatagggatgccgctcccggtcccgcagctgcatagtctgggccgttgccgcttcatcgcctctccttttccaaaaattcaaacgaacctctcctcccttcggaaatcggtctcctactctcccgtccacacccgcttttggtgtacagtcccgtacaacattttatatatttcctaacgatatccgcctctcgccacgctaactgccgcaaatccgcccttttccccgcctgacagatccatggcaaagtaccgcatctcatccatggcgtgatcgtgttcctttttcggcgcatcctttcccgccttttcgtcccagcagtaaagggccatctcccgcagacagtcccggcaggtattacacagcacgatccgcctctgccgcagcagatccgccgtcacccggatgccgtcggccacatcgttgttggccttctttacccgccagccccgctgccgcagggtctcgatgaagctggccgccgacgggtccacgatcacccgctggatctcccgccctgccgccagccgatccagcatatccgcgtactccgcgtcggttttctgccgtccctcccggcgggaatcgtaataggcctcctctacccggtaccaaacgccgtcccgttccccccaaagacccatggacagtggattcaccgtcccgtaatccacggatacccgccaccggctgaaggccccctccagcaccggtaccgcatctctggccgggtcgaaaaagtcatataccaagccctgagccgccgcccattctccctgcacgaaccgtcggtaaaacacgcctgtatacagccgctcgtaccgctgccggatctccggcgacaggccgggattatccgccatcgtaaagtgcagccgcagcgccccccggctctccgccttctcgatccactccttgtagaaccagtgctccggcccctccggattgcaattgaaccacagcttgctgccccggacgctgcaccgggccaccgcctgctctacaaaggaccgtggcatcagtgccgcctcatccaacagcagccccgccaatgtgctcccctggatcagcgccgcactggactcgtctttcccgccaaacagcagaaattgattccgttgcccgccaaactccaccgtcagggaattggcgctcctgttttcacgcacgatcataccgatccgccgcaggcaggggaccaactccgtcagcaaattccgccgcagcgcccccaccgtcttgccgcacaaggcaaactgccgtccgtcaaaacaactctgggcccacagaaaaaaagacagtcccatgcaaaacgtctttccactgcggactgccccatcgcagatgatggcctgccaacggttctgcctccaccaggtcagcacctgcctttgcttgcgggaaaaccggatcatatcatttctcattccagtctcccgtttcccccggcagcgccgccagcgcctgaagcagcggatccgcctgctggggttcgctggcctccagcagcttccacagcgtctctaacgcccggacccggtccaccagcttgacctctacacccttttctgttacccttagttcagacacagccgacagttccagtccctccagctccgtctctccccggcgcagcgccagcgtcaccgcatcatccacccggccaaaggccagccgtgccagctgccgcagcacatcctcccgcttcagctgcgccgccgcgtcgcagcgcatccgttccagcttctgttgggtccctttctgccccagcatggcatagccgtcccgtctgccgatctctgcggcagcctgctccgggtccatggtccgcagataggccctgcaaaagcggccatcctcctgtttcttctccaaagccatccccccattccatccctccggcagattttcagaaaaagtgcatctctctgtgcaacgtcttttcaagacgcagccgaagctctgcacgttttctctttcctcccatttaatttttagcaacaatttaacgatccgtctgctatactgaaaccagcaaggaggcttcctatgtctcatcccaattccaaatccaagaccagcctggccaccctattccccttctccatgcgggacctcattgtcaccgcgctgatcctctttgtggccgtggccttctgtatcctactgcagaggctggaccccagcgctggcttcgccacgccggtttttgtgctgactgtgctgctgacctcccgcctgaccaccggctatttctggggtcttttctctgcggtgttgggcgtcatcgccgtcaactttttcttcaccttcccctattgggccttcaacctgaccatcaccggctaccccctgtccttcctgacctttctcagcgtttctgtcatcacctccgctctgaccaccaaaacccgccagttggacaagcttcgaatggaaaatgaaaagatccggatgcgggctgacctgctccgttccgtatcccatgacatccgcacccccctgacttctatcatcggctctacctccgccgttctggataatcccaatctctcccaagaggaccgtcgttccctgctggaggatgtgaagcaggaggcccagtggctgatccgcactgtggaaaatcttctttccatcacccgtatcggcagtgaccggacggaactgaacaagcaattagagccggtggaggaagtcctggcggaagccgttcaaaaggcccgcaagcggcttcctgaaatcaaattctccgtggaggtcccggcggagctgctcatggtccctatggaccccatcctcatcgagcaggtcctctccaacctgattgaaaacgctgtcatccacggcaaaaccaccaccgccatccatctccgggcggaaaaaacggaggataacttcgccgccttctccgttcgagacaacggtcagggcatctccccggccctcctgccccacttattcgattattctatccgccatgcctctccccccacgggagatggcaagcggaacatgggcctggggctttcggtgtgcagcgccgtggtcaaggcccacggcgggcgtctcaccgcccataaccacccggatggcgcggaatttatcttctgtctgcccatgccccccgccgatcccgctatttccactgatttatccgaggaggaaaccctatgaacatccgtgaaaagattttggtcattgaggacgaaaagagcatcgcccgctttatctccaccattctcaccgccaatggctacgaggctatgcgggccgccagtggagccgaggccatgtccatgatctcctcccactgcccggatctggtgattctggatctgggcctgccggatatggacggtctggacattctgcgccagctccgcagctggtccaccctgccggtggtggtggtctccgcccgctcccacgagcaggacaaggtctccgctctggatttgggggccgatgactatctcaccaagccctttggcaccgatgagctgctggcccgtgtgcggacggccatccgccacacccgcaccgccaccggcaacagtgagattgcccagcagggcacctacaccgtaggcgacctcaccatcgactacaacaagcatcaggttctcgtccggggtgaaaacgccaagctgaccctcagcgaattccggatcgtcgctctgttaggcaagcacgctggccgtgtgatgacctatgattccatcatcaaggagctgtgggggccccgggccagcggcgataaccagattcttcgggtcaacatggccaacatccgccggaagattgaaaaaaatcctgccgaaccggaataccttttcaccgaagtgggcgtaggctaccgcatggcggaatccgaaaactgacatacataaacagctcctccgccatgcagcggaggagctgttctgttttgcgatccatttgtcccttttattcccgttcttttccgctcctggtcagtcatttctctcggagtgccccgcattttgaagatgccccgcgagacgacctccaattccgcgttttcagaatgaccggcccgtctcccgcatagagtgcagtgcacccatttctcaaaatcaatgcttgggagtgtcgaacgatggcaatgtcttatatctggtccggtctggtgatcctctccttcctttggggcttttttcacgggaacctcagcgccgtggccgccgccgcgctggacggtgcccagtccgctctggagctgagcctttctatggccggcatcctctgcctttggagcggcgtcatggagattctgaatgtctgcggtctgtcccgccgcatcgccgcgctgttccgtccgctgctgcgccgcctgctgcccaacgccagccgggacgaggaaacgctggcggcagtctccgccaatgtctccgcgaaccttctgggccttggcaacgccgccacgccgctgggcatccaagccgcccggcggatggcccgaaactgcggcggcactgccagtgacgagctgtgcctgctggtggtgctcaacaccgcctccatccagcttctgcccaccaccgtggcctccgtccgggctgccttcggcagtgccgcccccttcgacattctgcccgccgtctggatcagttctctcgcctctgtcacggtgggcctgctcaccgcccgccttctctcccgccggaaaggaggccctgcatgaacccctctgacctcatcatccccctgctgctggcgggagccgccgcctgcggcaccgggcgccgggtcaacgtctacgccgccctaacccgcggcgcggaggacggtctcaccgtcctgctccacgtaatccccgctctggtgggcttactcaccgccgtcagtatgttccgggcctccggtgccatggatgcgctggcccagctgtgcgccccggttctgaaccttctgggcatcccggcagagaccgtgccgctgatgctggtccgccccgtatccggcagcggcgcactggccgttgccagcgatctgatggcctcccacgggcccgacagctacatcggccgggtggccgccgtcatgctgggcagcacagaaaccaccttttacaccatcgccgtctactttggctccgccggcatcgtccgtacccgccacaccgtcccggcggcgctggcggcagacctcactggctttctcaccgctgccctcaccgtgcggctcctgtttggcccctgacatttgcaaattcacgcaaaaaaagcacggcaaagccgtgctttttcgttttccttatgcagattttctcacctttcgttcaaatgcgcccgcagacgttccagattcccccgcatgagcgtcacatacgtctctccccctgccaactcattcggggacacgttgtggcaggtgtggaacatagcggtccccgcccccgccgcctcggcgatggcgtccgccaccagatgattggaaaactcaatataccagaccgtcgagatcccttcctcccgtaccttgtccgtcagaaaagcaatggtcgcggcggacggttccgtctgggtagagcaccccggaaacgccgcgtagtaccgcagatcaaattcttccgcgaagtatcgcagtgggaaccgatctccaaacactatggtccggtccggcaagctgtcgaaaaacgcatgaaattcgccatccagagtgtcgatctcctccgcatatttttctgcgttggcccgataccgctccccattcgcactgtccaactccgccagcacctccccaaaccgccgggtgatggccgcggcgttggccggggcggtccaaacatgctcatcgatctccgtcacggtccctaagtggtcgtggtcatggtcatcctcgtcctcatcgtggtgatgccccacttcctcctgcatcccctctacgtgctcctcctccagagtctccacgcagtcgatcagcgccagtgtccggcccgtaggctccgccgcctctaaaatcgtttctacccactggtcggagtcccctcccagatacaaaaagaggtcacagctctgcaccttcaaaatatccgccggagtaggttcataggaatggctctccgtccccggcggcagcagtaattccacatccgctaagtctccggcggcggcccgggcaaagtcatacgccggaaatacagtcgctacaatgtgcagctttccatcctccggttcctgcacggatgccggtgcgcatcctgccagcagcgccagtgccagcatacaaatcaacagttttttcacagtggtctccttgtaatttgagaatcattttcaaataagataccacatccgcccccaaaaagcaaccccgactatccgtcggggttgcctctgttttcctgtttacttgctgcgcttcagaacctcgcacaacagcttccacgtccgctggacggacgcgatgtgcatccgctctctgggggtgtggatgtccgtcagatccgggccgaaggacacgcagtccagtcccggcaacttttcgcccagcaatccgcactccagaccggcgtgaacggtctccaccaccggctccttgccgtactgctcccggtagacctcgatcatccgctcccggaggggagaatccggcagatattcccaagcgggatagtcgccgaccacgtccacacggccccccagctgctccgtcaggcaccgcaggcggtcccggaccatctgcttctggctggctacgctgctgcggacggagcacaccgccgtcatttcatcgtcgccgcatttcagaatgcctatattcaaggaagtctgcaccagaccgggaatatccatgctcatggcctgcaccccgttaggcaggcaggtcagcatgcaaagcgccttgccggtggtcacttcgtccatcggcaggctcttggtctccaccgtttccacagctaccgtcagaccgggatccgcgatccggtattccttcttcatctccgcagccagcgtctccgcagccttccgggccgcactgccgtcagccacggtgaccaccgccgccgccgccgtggggatggcgttgtccttgctgccgccctcggcggacaccagacgcagcttcgtctcggcagacatggcccgcagcagccgccccagcagcacatcggcgttggcccggcccttgttgatctccacacctgagtggccgcccaccagaccggacacccgcactgccagcgtctccccagagaagttctcccggaccagcggcagatggcagaacacgctgctgccaccggcacagcccacggtgaagatcccctcctcctcggagtcgatattcagcatggtccggccttgcagaggtgtcacatccagcacggcggcgcccaacataccgatctcctcgtcggtggtcagcacgacctccagccggggatgctgcacggtggtgtcctccagcgccgccagtgccatggctacggcgatgccgtcatcgccgcccagagttgtccccttggcgcctaccagatcgccgtccacaaagaggtccaagccctccttgtccatatccttggcgcagcccgcctccttttcgcataccatgtccacatggccctgcaagatcaccgccggggcgtcctcatagcccggcgtggccggggcgatcagaatcacgttgttggcctcgtcctgataatgttccagacccagcttttcgccgaatgccacgcaccagtcgctgatggcctttgtattggtggagccgtggggaatggcgcacatctcctcaaaaatttcaaatacccgcttcggttccagatttgacaggattcccatattacttctctccctttttctgtaattttattttgttgcccttttcatccacgatataggtattgtccagctgccctttcaaattgcccagcacggaatcaatgtattcccgccgcagggcggcgcgctccatctcctcccactccgtcaacccttcggggctttttgccttcttcgccaattcgttgatccggtctatttgcttttgttccatatttactccttttccgcggtttcccgttcaaaaacgaggtctatcgtttctataaagccgcctgcccgttgggtggccgggatccagcccgcaaaccgccatccgtcggcagcccatttccggatgatctcctgatggcccactgttgccagtccaacgccgcccaaaaagctgtacccgccggagccggtgcagtccacccgttcaaattcatattccagcacagaaaccacctctcacttatagcactgcacggtgatggggatgcggccctttttcgtcaaggctcccacctccgtcagctcaaatttcccaaagccccttgcagagaccgtatcgccctcggaaaccgtccgatccggcttcgtacactcccgccagttcagctgcacccggccgctttcgatgagcgccgccgccttgccccgggccatgcggaagccggtggagcacacggcgtccagccgcagggaggacaccgtatcccgccgttcctcccgtcggatctccgggatgtggacgcagccggggtcgatctccgccacccgcagcttcacccgtccggcggactcccagctttgcgccagaaattccgccacggtatccagcaccagcacatcggcgctgtccggccctactaaaatatctccgattttctcccggacgatccccatgcccatgagactgcccaaaaaatcccggtgggtcagattctcttccttccggaaggccgcccgcagacaccggatggggctgtacgttccggcgtccgaagggtccatccaatccggcaggaacaggagcaccgcccgttccgcgccgtcatagccgccccagcggatatatgctgtttccggaattcccgccgcatgaagcagatcggcggcctgcgcctgctgggcggggcttaaaaagtccgttgccgccgggatattccgctctgatgcctgcttggcccgatccagtacccgggccagcagcgtccggtcctctcccagagcgccgcactggtccagcagcttgctcttatccatggcgcagctcctgtgtccgcaccaaccgggcataagcgccgtttttcgccatcagctcatcatgccgccccagctccgccacccggccgtcctcgatcaccgcgatgcggtccgcgttccgcacggtggacagccggtgggcgatgatgatggtggtccgcccctgggaaagccgctcaaaggtctcctgcaatttcgcctccgtcacgctgtccagcgccgaggtggcctcgtctaagatcagcacaggtggatttttcaaaaagatccgggcaatggagatccgctgcttctgtccgccggagagcagcgtcccccgctcacccacataggtctccaaaccgtcaggcatggcctgaatatcgtcatagatctctgccagctgcgctgctcggatgacctcctcctcggtggcctccggcttgccgcagcggatgttgttcagaatactgtcagcaaacagaaatacgtcctgctgcaccacgcccacctgctgccgcagagagcgctgggtcacgtggcgcacatcctgtccatcgatgcggatatcaccgtccgtcacatcgtaaaatcttgggatcagcttgcacagggtagactttccgccgccggaggggcccaccaccgctagcgtctctcccgccttgatatgcagatccacatcgtgaagcacatccagatctccctcataggcaaagctgacgtggtccacatccacctgtccctttacgtcggtcagctccacggcgtccggcacgtccttcatggccggctccgtccgcatcagctccagaaagcgggaaaaaccggcagtgccgttggccagcagctcggaaaagttggccagcttccgaacgggattcacaaaggttgtgatatacagactgaaggtgatcaggtccacggtgttcagctcgccccgcataatgaggacgccgccggcggcgatcaccgccacggagagaatggacaggaagaattccatcacgccgttgaatcggcccatcgccttatgaaattccttcttggaggttttataaacgtcattggagacattgaacttctccagttcctccgcctcgttggcgaaggcctttgccgtgcggatgccggagataccggactcgatccccgcgttaatggcggcggttttctgcttcacatggcgggacgcctgactcatcgaccggcggcaggtccacaccacgatcaaaaacaccggcagaatggcggcgatcaccagcgccagccgccactggatcgtaaacatgatgacaagcgcgccgatgacggtcacgccggagatgaaaatatcctccgggccgtgatgggccagctccgtgatctcaaacagctcgctggtcaggcggctcatcagggcaccggtccgattgcggtcatagtagccgaaatccagttcctgcatgtggcggaacagatcccggcggatgtccgcctctaccagaataccaaaggtgtgcccgtagtagccgatgatataggtcaacaccccccgcaccgcaaaagccgccgcggccactgccatcaccgtgaaaaaggtgcggtatgcgttctgcggaagcagctcgtacatgcaccagcgggacaggtacggaaaggccagatcgatcagcgcaatggtaagggcgcagaccatatccagcacaaacagcttcttatggggtttgaaataagacagaaagatccgcagatcggaccgctcctgaaattccttggtggtcatgaaaaattcaaagctcctctcacagagtacagccgctttttccggctgctgtccgcctccggcggaccgatagctgcatcataccatgattttcccaccttggcaatgggtaaacagccccccgaacgcgccgcgtccggggagctgtcggaaaagcgtatgttcagctgttggccagataatctcccttcatgtagccggtggtggtttttccgccgttgccggagaaggtgatctgataccagccgtcaccggcgctggatacgatcttcacatcgctgccgtttgtcagggatgcaatggaatcgtagctcttgccaggaccggaacggacgaacacaccgccgccggcattgatcaccttaccgctgccggttttcagggccccggacgtggttgtggtgctgccggccgtacctgtggtagtacccgtggttgtacctgttgtgcccgtggtgttgccggatgcacctgtggaagtggtccccgctgtggttgacaggaattcacccttcatataaccggtagtatcccggccgccggggccggagaacgtgatctcataccagccgttcccggcgtccttcaccaccttcacctcgtcgccgtttttcagggaagcaatgggcgtaccgctggtgctggggtccggtcggacattaacgccggtagcggcgttcaccacagtggcggtactgccggtcgttgtgcccggcgtggtaggtgttgtgggtgtaatgggcgtggtggtatccggttcatccggcatcacgccgggatccgtattgtcctcaggctcctccgtctcgcccggttccgagggattcttctccgtgctgtcatccggctgcaccggcgtcaccacgccaggttgaggtgtcaccgggtccttggggccggtaggacttttgtcatcccgcagcaggaaaagtaaaatccccgccatgatcaggatcagcaccaccagtatcggcgtcagcacgctgaaatgacggctctgccgggcccgccggcctccccggtccttgccctttcgcaaaacctcttcctcttcgcagaaggggcaatacttataggtatcggagtatttctccccgcagtcggggcagcgcttcatcgccatagtggtcctccttgtatccgcactcgacagtatcagactctcgtaaatttatactttacataataccgatttttgtgcattcagtcaagtagagccgggtcgatttcacaggaatttcatactttttcttgctttcatgttatcggacacctataataaaattatatactgtcaaccaaacgtgaaaaatacgcctgccatcaccaatacgcaccccacgtgcccgctactttatatgaaatgggaggttcctcatgagtaccatcctgatcggtatcgccggcggtaccggctccggcaaaaccaccctcacccggcatctgaaagagcatttcggcccggaagtcaccgtcatcggccatgacaattactataagcgtcaggacggcaagactctggaagaacgggccaaggtaaattatgaccaccccgccgcctttgatacagagttgctcatcgagcatctgaaggagttgaaagagggccgccccatccgttgcccggtctactcttatgtggagcacaaccgcacggaggagacccgggaaatcctccccaccaaggttatcatcgtagagggcatcctgattttccagaaccccactctccgggatatgttcgacatcaaaattttcgtggagacggatgccgacgtccgcatcccccgccgtgctttgcgggatgtggaggaacggggccggacgctccaatctgttgtcacccaatacctcaccacggtaaaacccatgcacgagcagtatgtggagccaagccgcaaatttgccgacatcatcgtcttggagggtggccgcaatctggtggctctggagatgatcatgcagcgcatccgcgcccacatcgacaccccttgaattttctaaaatcgaagcggagatggcttttcccatctccgcttcgttatatttcggcatgattatacattttggaatcattttgcctgtcttttacggtttttccccgtctggcgccaacaactccaaaacctgactctctcccagcacacggattccgtgtgcccgcagcagtgccgccgttacgccgtccccggcggtgagggtgccggtaaatgtgccgtcataaacggctccgcagccacaagaagggcttcgctccttcagcaccgccgccttacagcccagcagctgatatagccgcaaggcacacgccgccccccggcggtactgctccgtcacgtcctccccggtgcgcatcaccacccggtctccccgccgttccgacggatttcgcggggtgggcagaccgcccatctgctccgggcacatcgggatcaactcgtggcgccgcgccagttcctccacccagagttgtggcttggatgcgccgtcataccggcagggaaggcccagcagacacgctgagatcagaattttcattctatcccctccccatagcccggtgttcccgctgaagctcccggtaaagccgtcccggcgtccagcttcggttgtccggcgtcagcaccgccttcaggcacacgaccccggcctgacgcagcgccgccaacaggccgtccaactcccgctccaaaccgcagaataccagcatcttccctccgatgggcacaccactctctctgccagtctttccctgggctaaggcttccagcgttaaaccacagttctccttcgccaccggcacggcctctccgccgaactgctgaacgatacccgccaccgttaagatctccggcagcgtttcaaacccaaacagcaatacctttttcacagctctacctgcttcccgttcaggaccgcactttccagccgatccccagcgtaacacaatttcagggaaaaaaacggttcgtcggaatccagcagccgcagaaagattttatctccctcccacatgggcagggtcagcagctccgcctttttgatccacgccagatccccttcatcgcagacgtggggttctccggtccaaccggtagcggtgaacaggtgcatatactccgtgggccactccgtattcacaaaggtcaccaatccccggtagcggtagtccgtcagggtcaggcctgtctcctctcggcactcccgcagcagacagtcctccgggctttccttgtcctcaaacttgccgccaatgccgatccacttatcccggttggcgtcatgttcctttttcacccgatggagcatcaggtatgcgtccccccgctccagatagcacaaggtggattgcagcatgaaaccacatcctttctctgttattatacctgcttttcccaaaaaagaaagccccggcaagccgagactttcttgctgatgcgttctgatccgttccgctttttgcttactctcccatgacctgaaacacgatgtcccgcacccgatcccgggtgtcgcactccaccaaggtcaaattctgccagggtcccagcgtcattcgtcccgccacaatgggcaccgtgatgaagggggacagcagcagcgccttgatgtgggaggaaccgttgtcatcatgccaggtgtcctggtgctgatagtggatcacccggcccttttcgtcccggtaaggggaaaacacatccagcgcagccttcaggtcatgccccaccagtcccggctcaaattccagcgtggtcagcgccgccacgccgccggtggtaaaaccggtgatcgtaccgttccggatattcttctgctgggctgcctcctccaccgcatgacggaaatcctccgtgacatcgatcatacccatgtgggccttggtgtggtaggtctttgtttccgtataagcggccattgccgtatcctccctgttttcagcttgtgttccgccgtctgttcagcggccttgaaaaagacctccggcattttttccttattcctccggatccggcagcagacagtccaccgccgcccggtccgtccggatggatttgcacagagcggagaccgccttgtgccggggatcattcttataggtctccagcgccgcccggtccgcgaattccgagatcagcacagcgtcatagtcgctgctctccataccccggaggacctgacaacttttcagctccgggatagctccgtaaagtccctgcaagccagtgaggaaaaggtcccgctccgcctccgtgccggggcggaatttccacatcacgatgtgccgcagcatcaaacgcctcgctttgcgttataggcggcaatgcccttgcccaaaagctgaatggcccggcgcaaatagtcgcagttgtggacataggcgatccggatttcgctgcggccatcggcgggatcggcatagaagccgctgccgggggcatacatcaccgtgtcaccgttgtcctcaaattcctccagcaggaaatactgaagcttttccacatcgtccaccggcagcgttaccatcatgtagaaggcgccgtccggcgtatggaacttggtgccggggatcttgttcagctcctctaccacagcgtcccgccgcttcttgtactcgtcccggacctccttgaagtaggaaggctgcacatgctcgtacatggcggcggcgcccgcctgatcgagggtggcagtgcacagacggccctggcacagcttcatggcctcggccataaattcccggttccgggaaatgatggaaccaatgcgggcaccgcaggcggaaaaccgcttggaaatggaatccaccacgatcacatgatccttgatgtcctccatctcgcagaaggtacccatgggctcgtcatcgtagataaattcccgatacacctcgtccgccaccaggaacaggtcatgctccttgaccacgtccgcgatgacccgcatctcctcgtgagtcagcaccagaccggtggggttgccggggttggtgaccagaattgcccgggtgcgctcgttgatctgggattcgatcagctcccggtccgcgaagcggtagccgttgtcagcggaggtgggaatgggatggatcacgccgccgctcataaacgtgaaggtattgtagttggcgtagaagggctccggcaccagcagctcatcgccatcgtccaggatacaggccatgatgaattccagggcctcaccgccgccggaggtggccagaatgtcctcccgctccagcttcacgcccagtttggcgtaatagccccgcacagcgtcgatataggcgggcaggccggaggcaggtgcgtattccagcgtcggctcccggaattcccggaccgcctgatagaaggactcaggggtctttacatccggctggccgatattcagatggtaaatggtccggcctgcggcaactgcctgatctgcgcagggattgaacttacgaaccggagataactggcacttcaagatcttactggaaaacttcatgggacttcctcctccaaaatggaaaataaaaatcgcccctgactcctgtcaggggcgaaaaaaattcacggtaccaccctgatttacccgcacgcgcgctgcgcgggtatctcatgtcatcctgtaacggggatgggtcgtcccgctcctcgcgggctgctccaaagcggcgtaccatctctcctgaccgggggcttgcactgtcccccctcgctgaaggtcggtctgaaacggctgactttgtcatggcttttgtcgatttgaaattcattatagacattttctgacatttgtcaagtggaaaaagcctgttaattttcaaacaaaaggcggcgggaattcccgccgcctttgttattcatcgcctgtgtcaaacggcggcgcatcctcaactgctggagcgccccccatctgcatttcgtcccactgtgcgcgggtgatgagcagttgtctgggcttggagccttcaaagggccccacgatcccccgttcttccatctggtccaccaagcgggccgcccgggaataccccagtttcagccgtcgctgcagcatagacacagaggcttgtcccgtttccagcaccacatccacagcagcgggcagcagctcgtcctcgtcgctgctttccgtatcggcggcagcggacgtgcccttgctgcccttgttctccttctcctggacggactgctcgatctgggcaatgacctcctgagagtagttggcctcgccggtctccttcacataggacaccacgtcctcgatctcctccggagagataaagcagccctgaacacgggtgggctttccctcacccagcggggcgtaaagcatatcgcccttaccaaccagcttttccgcgccggtggtgtccagaatgatccgggattccagagaggaggccactgcaaaagcgatccggctggggatattggccttcatcaggccggtgatgacgtcagcagagggccgctgagtggcgatcaccagatgcacaccggcggcacggcccatctgggccacacgacagatggattcctccacctccttcgccgccaccaacatcaggtccgccagctcgtcaatgaccaccactacgctgggcagcttttccagatcctctctgacggcggccagcttgttgtactcctccagcttcttcacgccgttttccgagaaggtcttatagcgcttcatcatctcaaacacggcccactgcaaagcgcccgccgcctttttcggatctgtcaccaccgggatcaacaggtggggaatgccgttatagggggccagctccaccattttcgggtccaccatgataaagcgcacctcgtccggcgtagacttatacagcagactgatgatgagggaattggtgcacacggatttaccggagccggtggtaccggcgatcagcacatggggcagtttttcaatattgccgatgatattccgtccgccgatgtcccggcccaaggcgaaagccgtcttggaaggatgctccataaagtcacgggactcgatcacatcccggatcagcaccggcgtcaccgtcttgttaggcacctcaatacccaccacagagattttattcggcacggcggcaatacgaacgccgctggcgcccagcgccaaggcgatgtcgtcctgcaaattagtgatcttggagagctttaccccctgatccaaggtaaactcataccgggtgaccgacggcccgtggatcacgtcgcctgccttggcgtccacgccgaagctggccaaggtctccgcaaggcggcgagaattgttccgcagctccgccccggcagccatgtggttctccccgccattttcatgcagcaaactcaccggcgggtagcggtattccgcctcgctccccgccatattttcggcgatttccgccgtaaccgcagctgtctccgcagctacggcctgggccgccgcctttttggtcagcggctcctgcacagcaggtgcggcagcaggcgccgtcccctgcgcgggagtatttactgcggcaggaaccggggcattctccggctgctccgccggcgtagacaccaccaccggctccatggtggggattgccttggccgggggctgctggccgataggcaccggagccggtgcgggagacggatggacccgcgcattggcaaagggatcgccctcctccatcacgctgaccaccggttccgcagtcccggactgtgccaccacctgcgccggggttttctgcttatcggacttatgccggaaaaagctggtaaagccagtcttttccggtttgggtgccggagcattcaccggatcgtccaccggaatatcaatccgggaccgggcgctttctgccgggatggcagcaacggtctcctgcggccgcttcgcctctctgacaggcttctccggttccggctcctcctcgtacttgggccgctcccggtgcttctcgatcaaggcccccacggtgagccgcagcgccaccatcagcagcaccacaaacagcaccgtaaagatgattattgacgcgattttggaaaatacagccacagacccctggcccagtgcgccggagatcacgccgccgcatttcaaggccacgccgtctttccacatggccgggatgatctcgatagaggaggcatacgcctccttcaccagcagcatgtggcacaacgttcccagcagcaccggcagcagcagcgcgctggtcacccgcaaagtcacaggccgtccatgatggaacagcagaatgcagcccgccagcaccagcgccggtccaaacagccagtagccatagcccagcaggcccttgatgagaacagccagccagtcaatgaagatcgcgctgattccaaaatagctgacaaatacgcacagtgccaggaccaggcataccacgccgcctacctcccggcggataggccgtggctgcggctttttagcggtagtccggctgccggatttgccgcttgttttttttgttgttttcttctgtgatgtggaagccacgatcaaaccctccgcatattgaaaaatccatggacgtgccaaatagacctaccgaactcggggtcacgccccgaccagcgtcaaaatcacggtcagcagacccactgcccagcagtaataggcaaaggctccgaatttgctccccgctaaatcaagaattttgcggggtccccgtcattgaattcaaatgttcaggcaaagcccggccatttcaaggtcctgctttccgcagaacacttggtgccgcagacgcggcgaacgcgcagagcgcgtcagggaaaattcgctcagcctctgaccagcgtcaaaatcacggtcagcagacccactgcccagcagtaataggcaaaggctccgaattttccctttgccgcaatcatcttcagcagccggatgcaggcatagcccacaacagccgccaccagaacacccagcaggtacaccggtacatctttccagatgacctctccccccagtgcgtccttcagactcagaatattcgcacctaatacagcagggatcgacatgatgaaggaatagcggaccgcaaacttccgctcaaagccaaggaagcagcccacggagatcgtcgtaccggagcgggacagtcccggacaggtagccagcgcctgcgcagcacctacgatcagcgcatcggtcatccgggcactatgctcatttttacgtcccttccgcacccggtccgaagcgaacagcaggcagcctgtcacgatcagcgcaccgcctactacatacagattactgctcaggctctcgatccaatccttgattctcaaaattgcgaacaagggcagtgtccccacgattaccaacaggatcatccgccgcgccggaggcaccggagtaggcgttgtgccatggatcaggtcactgatcccccggaaaaactcctggatcatctcccagatttccggccaataagccacaaaaaccgccgccaacgtgcccaaatgcagcagaacgtcaaaaaatccaggcacctccgcagcgcccttcacatctaatatctgctctacgattgccagatgtccggaactggaaatgggcaagaattctgccacaccttggaccagacccagcaaaatggaatgtaacagcgacataacatcacttccttgcgaaatttcataagtaaatttatgataccacactgcgcgaagaatttccagaagattttggcagtttacataagtttatcaccgccattttctccccaaaaagccgctatttccataaacaagcaaaaaaagcgacggtcaaaagaccgtcgcttagtgttggcgctatctatcttcccaggccgttgccagccaagtattgtggacagaaatgagcttaactaccgtgttcggaatgggaacgggtggaccctcatcctaatcagcaccaactatatgtcatcgagcactgctcgaaaacaaactatattatattgtccttcgcgccttttgtcaagacactttttaagtggtgacccgtaccggattcgaaccgatgttaacggcgtgagaggccgctgtcttaaccacttgaccaacgggccatggtgcgccttcacggactcgaaccggggacccactga

SEQ ID NO: 12154 - DNA, 7442 bp, Unknown
  gut microbiota DNA sequence
ggtttccaatctgcgtcaaacgaaaatccgcccgaaaaaggtccgcccgtatgggcggacctttgatgattctatcagcgctttatcaggcttccggttccgcaggcatgggcagccccagacggcggtacatggtctttttcaccgcccggaggatgttctcatagccggtgcagcggcacaggtgcccggagaggagcttgcgcagctccgcgtccgtatagagcttgccgctctccaaaatctccaccgccgtcatgataaagccgggggtgcagaaaccgcactgaacggcggtctcgtcgataaaggcctgctggatgtcgctgagctcgccgttgggccccatcaggctttccagtgtgcggatacgcttgccctccgcccagacagccagatagatgcaggagttgaagcactcgccgtcaatgatgacgttgcacgcgccgcactcccccacctcgcagccctttttcacgctggtcatgtggtagtcgttccgaagcatatcggtcaggctggcccggacgtccaccatccgttccacatccttgccattcaggttgaaatggaccaactgatactgtgccattacagctcacctcccgccagcttcaccgattcgataaatgcccgcttggcgctctccactgcgatgtgcagccggaaatccttagcggcccgccaggaatcccgggggttgatgtccgccgtcaccgcttgcgcgaaccgctccgccagttccagactcacgatctggccctttgccatcgcttccgccgtggctgcccgcaggggcaccggtcccgccacgccgaaggccacccgggcccgctccaccgtctttttatctgccgacagccgcacgttcacggacgtacccagagtggcaatgtccatggcgttgcgcatggcgtacttgatatagtggccgaagcagttttcatagctttccttggggatcagcacggcggtctggatctcgccgtcctccgcccggatgtccaccttgcccgccttgatgtagaaatcatggatgggcaggcggcggacaccgtttttgcccgtcagctcgatgacagcgtcccacgcgtggagggtagaggcggaatcggcggaggtaacgccgttgcaggtgttgccgccgatggtgccgatgttgcggatctgggggccgcccacctgatccacagcctcgcccagcacgttgatgtacttctgaatgaggggatctctggtaatatgggaaaagctggtgagagagccgatccgcagtgtgccgtccggctccatggaaacgccccggagcgcgtcgataccgtaaatggagatcaactccgcgccggcccgcttaccctctcgcatctgcaccagtacgtcgctgccgccggcgatgatctgggcctccgggtgctccaaccggagcgccacggcctcctccacactggcggcctgatacagggctttcatatcatacatggtcagtcaccctccttctcgtcatggatcagcccggcctccttaaatgcgcggtacagcacatggggggtgatgggcgtggtgtcgatggaaacgccggtggcgttgtaaatagcgctgcggatggccggcgccggggaacaggccggtggctcgcccagagccttcgttccaaagggagaggtcggctccgcgttctccacaaacagggcctccagatccggatgatccatcacggtggacagcttgtagtccagcaggttgttgttcagtggcttgccggtcttttcgtcgaacagcagctgttcggaaaggccgtagccgatgcccatggacataccgccatggacctgtgcctccgccaaggcggggttgatgaggctgccgcagtcatggacattgatgatgcgcttcagcgttaccttgcacatgggaatgtctacctccacctctgcgaaggtgcaaccaaaggaataggcgttggagcggatggtggcggtgctctccgccgtgatatgctcggagtggaccgggttatactgggcggtcatggccagatgggacaggtccatctccaccgcgccgctttccttgcggaccacattgccctccacgatgtccaactcctccgccgaacagcccagcatctcggcggcataggccagtattttctgccgcaggagccgcccggtctggtcgatggcgaagccctccatgtaggtctggcggctggcgtaagcgcctaagccggtgggggtgatgtccgtatcctgacaggacaccacatgaacgtccttgtagctcttgaggcccacggcctttgcggtcatctgtgcgtaggcggtatccgcgccctgaccgatctccgtctcgccgcactgcatggtaacggtgccgtccagattcagctgcatccggttggaggccgtctccagagagatgggatacacgccggtgttgtaccagaaggacgccgcgccgatgccccggcggacagagccggtgtccttggcgaattccgccttgcggcggtcatagtccatggcgtctcggcccttttccaggcaagcccggaaggagtcgaaatagttggtattgccggagaaggcgtcgtgataatccttgggcatgatgaacttcatgcggtattccagcgggtccatgcccacggcggcggcacattcgtcgatgttggcctcgtcagcaaagctggcctggggcataccgtagccacgcatggcgcccgccgcgggccggttggtaaacacggtccagccgtcacattccatgtggtcgcaggggtagatctgggcgaaggaacccaaagccttggcgcagatggagtgaccgtgggaggcgtaggctccctgattggagaagcactccaccttccgggcggccagctggccgtccttccggagccaggagacgatatggaaccggatagcatgacggacgcggttggaaacgaaagtctcctcccgggagcagtcgatccggacacagcggccgttgacctgcgtggagcaccaggcgcaaaggggctcatacagggcatcctgcttattgccgaagccgccgccgatatagggcttgatgatctcaatatccgcccacgggcggcccaaggcctgccccacgatccggcggatgatatgggggatctgggtggagctgaccaccactacccggccgttttcctcgtaagcgtagcagccgtggttctcaatgtggcagtgctggaccgtgggggtctcataccagccctccactttaatcagacccggctcctgaatggcggcggcatagtcgcccttgcggatgtccgtgtgcttgaggatatttccggaataattctcatggatctgcggcgcatccggctccatggccttctgaacgtccagcacgaagggcagttcctcgtactccaccttcagcgcccggacgccctgcatggccgccacctcgttctccgcgatgaccacggccacatcgtcgccgtagtagcggacatggcggttcagcaggtggcggtccgccacatcctgatgaccggggtccatggaccaggggtggcccgccgtgggaaagggaatatccggtacgtcaaaacaggtcagcaccttcaccacgccgtcgatggcctccgccgccgccgtatccacggactttacaaagccgtgtgcgatctccgcgtgcttgatccggatgtacagagcaccggcaggcatccggtcctcgtagtattttgtgcgcccggtcaccttatcaaaggcatccacacgggccacgctttttcctactgttatgctcatggagcatccctccttctatcgctcatattgactgacagggtctgaattgggtatactgagagagatctggaattttcctatgaggtgatcgctatgaaaatcggatgtgtcgtgctggcggcgggtaacgcccgccggttcggttctaataagctgcaggtgcaggtggatggggaatccctcatccgccgggcattggaaacggttcccagcggtcttgtgaccgtggtggtaagtcaatacccggagattctgtccttggccggtgaatacggctttgaggccgtttggaacgatcagccggatctggggctgagccgcagcgtccgtctgggtttggaacgactcacggactgcggcggggttctgttcctcgtggccgatcagccgtggctgaagcgggacagcgtcgaagcgctggccgcgctctgggcccagcacccagcgaagattgctgccatggcccacggcggtgtccgtggcaatccctgcctctttcccgctcggttctacccggagcttttggccctcaatggggaccggggcggcagcgccgtcatccgcaaccacgaggccgacctcattttgttagagacagacgccctggagctgacggacattgacaccccggaggctttgaagcaagccggaagcgccggttaatgcgtgaagtatatgtgccttgacagcggttcgccgctgtcatttttttgcataaagggtgtttttcaggggaagctcggtacgcagctcgccgtcatagcggcggtatgcctccgcaatggcgggggccgtggggatggaggtgatctcaccgataccgatggccccgccgcccacgttcaatcccggtttttccacgatgataggcttgatctccgggatctggttggcccggaataggcccagtgtgccgaattttaccgtggggcggcagttttcgtcaatgggataccgctccgtcagggcgtagcccatgctcatcaccacgccgccctcgatctgtccctccacggagagggggttcacggccttgccgacatcgtgggccgctaccatccgtttgatgcgtccggtgtccttatccagcacgcagagctgggtggcatagccgtaggcaatgtggctcaccgggttgggcacatctgcgcccagtgggtcggtcttacccagatattcgccgtagaactcctgtccctcaaggtctgccaagctatgttcctctaaggcctttttcaagtcctgacaggcccggatgcaggcctcgccggtgaacagcgtctggcgggagccggaggtagtgccggaatccggcgcgatccatgtattggaacgctcgtagaccacgttttctcttgggatgccggtctcaccgcagacggtctgggtcagcaccgtgcccaagccctgaccgatgcaggaagcgccggcgaaaatatggagctttccatcctgtaccgtcagccggacccggccggtgtcggggatgcccacgcccacgcccgcgttcttcatggcacaggccagacccacgggatcgccgttcttcacagcctcgtcgtaatagggcttcaccgcctccagcgtttccaccagtcccgtggagccgtccacgatctgaccgttgggcaaaacgccgccgggtcggatggcattgcggtagcggatctcccaaggggaaatgcccaccttgtctgccatttcgttcagcagtgtttcaatgcagaagcaggtctgggtcacgccaaagccccggaaggctcccgccgggggattgttcgtatagtaggcccagccgtcgatctcataggcttcgtactgataaggccccgcgccgtgggtgcaggcccgttccagcaccggcccacccagagaggcgtaggctccggtgtcggcgatgcactccgccgccacgccctgaatgatgccattttcatcgcagcccagagagaattccatctccatggggtgacgcttgggatggatcagcaaactttccgcccgggtgagcttcacctttaccgggcgctttgtgagataggcgatcagcgcggcgtggtgctggaccgttacgtcctccttgccgccgaagccgccgcccaccagacagttgcggaccttcacctgctccgcaggcaggtccagcattcccatgatctcgtgctgggtatcgtatgcgccctgatccgtggagagcaccagaacgccatccccatcgggacaggccacggcgcactccggttccagaaaggcgtgttccgtccagggggtcgagaaccgccgggtgatgagatacttggatttggccagtgcctccgccgggtttccccgctggatgtgcttatgggccagcagattgccctcccggtgcaccagcggcgcgtccggcaggatggcctcctgcgggttatggacggcaggcagttcctcgtagtccaccttcaccaacgccttggcctgagccagagcctccggtgttttcgccgccatcaggcaaatggcatcgcccagataatgggtgatatcgcccacggcgatcatggtgtcccagtcctttttcaggtggcccaccttgttgctgccggggatgtccgccgccgtcaggacgcagaccacgccgggcagggccttggcctcctccgtatggatggccagcacccgtgcacgggggtactggctgcggacggcgctgccgtagagcatcccgtccagatatacgtcatcagggtactggccggtgccggtgaccttttcctccacgtctacccggtggacccggctgcctaccttccagtccgccggtgcctccggcagcttgtcctcccggaagcattttgccgccagcaggatcccgtcgatgatcttcacatagccggtgcagcggcagatgttgttgcggatggcaaaggccgcctcctcccggctgggatccgggttcgtgtccagcagcgccttggcggagatcaccatgccagggatgcagaagccgcactgaacggcccccgcctcgccgaaggcccatgtatagaccttcttctcccagtcggacaagccctccaccgtcaggatgttttttccctccagcttatccgtctgcggaacacaggccttggtgggcttgccgtcgatcagcaccgtgcaggtgccgcaggcgccctcgctgcatccgtccttcaccgaggtcaggcgcagctcgtctcgcaggaaccgcagcagcttttgatttttctcagcggttaccgttttgccgtttaccgtaaaaacagccatgtcgggtccccccttcaaaaggtcaaccttttatttcttgaacttattatataataggctgtctgttttcgcaacggttctttctatcattcgttatcctttccataagatagcgaaccgaggaagtgcggcagcctctgtcacccgccggaaactcctatgagccgctcccccgattgccatcccttcaggctccgattttccccctctgagtgggcgaaaaaagttttttgaaaaaaataaaaaaagtgttgacaaagaggaggtgccctgatatactagctattgttccgagcgaatgaaacaagttcaaaacgaactgacctgggggattagctcagctgggaacccggttgaagcggtaaacaacccccgcac

SEQ ID NO: 12155 - DNA, 974 bp, Unknown
  gut microbiota DNA sequence
ccgaatctttgccaaagatgatgtgtcgtttcttgttttagtgtcttaacaatgttacagacggaatccgtcgtgtcgtatccgagaaggatatgcacgtggtctttgtcggtttccattgccacgatttcgcagtgatgagcatcagcgatgctctgaatcttttgttttatggcatcaatccataagtcacctcaatgcgccttgatgttcactatctattattatataatagcgctagtgaaacaacaaagaaaggaggattgactatggctcaaatgtccatcacggcaaaaatccaagtagtggcatctgatgaagataaggcgttacttgatgaaacgatgtctgtctatcgtgaagcgtgcaactatgtctcggattatgtgtttcgcacacacgatttaaaacagttttcgctcaacaaggctctgtatcctacgttgcgcgcagaattcggactaaaatctcaaatgactcagtctgtattcaagacggtcattgccagatataggaccatccttgagaatcagaaagaatggataaaaccgtcgttcaagaagcctcagtatgaccttgtctggaacagagactactctctgacgcaagaccggttttccgtaaacacgctcggcggaagagtgaaactgccttatttcgcagaatggatgtcgaaatacttcgaccgctctatctaccggttcggcaccgccaagctggtgaacaagcatggcaagtacttcctacatatccctgtgacctatgatgtagaagagagtaatctctccgatatctgtaatgttgtaggcatcgaccgaggcatcaacttcgtcgttgcaacttacgatagcaagcacaagtctgggtttgtgagaggtcggtccatcaagcagaaaagagcccactattcagcacttagaaaagaactccagatgcggcataccccgtcttcaagacgtagactcaaaaggatc

SEQ ID NO: 12156 - DNA, 48099 bp, Unknown
  gut microbiota DNA sequence
gttttcagaacttttatgaagttctgaaaacttgctcagcggggagaaaagactttttcgacacgctggagccgacggccaaaaggccgccggctcccttgatgatttgaattttacatggaaaaaatttatttcgcctgcttcatggaaaggctgatgcgctttttcttctcgtccacctccagaacgaccactttcacaacatcccccacggacaccgcctcggaggggtgccggatgaatttgtcgcacacctgcgagatgtgcaccagaccgtcctgatggacgccgatgtccacgaacacgccgaagtcgatgacgttccgcactgtgccggtgaggatcatgccgggcttcaagtccttcatttccagcacgtccgtgcggaggatgggcttaggcagctcgtcgcggacgtcacgccccggtttcagcagctcggatacgatgtcccgcagggtggggacgcccacgccgatctcctccgccgccttttcctctccgtaagcgccgaggcgggcgggaaggtcggaaatggccccattcttcacatccgctaaggtgtggcctgtcagctccagcagggccttggcggcgtcataggattccgggtggacggcggtgttgtccaatacgcttttgctttccggcacccgcaaaaagcccgcacactgctggaaggccttgggccccagcttgggcacctttttaatctgggcgcgggaggtaaagacaccgttttcctcccggtagaccaccacgtttttcgccgtggtgccgttgagccccgccacccgctgtaaaagggagggcgacgccgtgttgatgtccacgcccacggcgttgacgcagtcctccaccacgccgttcagggcctcgtccagctgcttctggggacaatcgtgctgatactgccccacgccgatggacttgggatcgatctttaccagctccgccagcgggtcctgtaaccgccgggcgatggacacggcggagcggagatttacgtcatactgggggaattcctcggcggccagcttgctggcggaatagacggaggcccctgcctcacttacgatcatatagctgacgttcccgccgaccttgcggatcagctccaccgccatctgctctgtttcccggctggcggtgccgttgccgatggcgatgtgctccacgccgtgcttggcgatcagcttactgagggtagcgatggcctcattcttctgccgctccccgtaggtgggatagaccacggcggtatccagcaccttgccggtgccgtccaccaccgcgactttacagcccatgcggtagccggggtccagacccatggtgaccttgcctttcaccggcggctgcatcagaaggggcttcagattcagggcgaactggccgatggccccctcgtcagcccggtccgtcagcgctgcccgcatttcccgttccaaagaggggtaaatgagccggtcataggcgtcctcggcggcggccttcacaaactccatagcggcggagccgggctttaccaccgcgcgccgcagcagcggcagcgccagctcccggtccagcagaacagtgaccttcagcttttcctctttttcaccccggttgatggcgaggatctggtggccctgcaagtggctgagggactgctcaaaatcgtagtacaggcggtaaacgctgtcctcctccgtggcggcgagggaacgcagagtaccccgccgctccagcagctcccgcaggctcttgcggacggccgcatcgtcgctgatccactcggcgatgatgtcattggctccttgcagagcgtccgctgccgtctccacgcccttttccgaatcgatgaagcccgccgccgcatcctccggacggggacagtcacgctcctgagcaaataacaatgccgccagcggttccagacccttttcccgggctacggtggcgcgggtgcggcgtttctgcttataggggcggtaaagatcctccacctctgccaaggtctgggcgctgtcgatggcggcggccaattcctccgtcagcttgccctgctcctcgatggattttttcaccgtatcccggcgttcctccaacccgcggaggtattggagccgttcctccagcgttcggagggaggtgtcgtccatagcgccgtgaagctccttgcggtagcgggcaatgaaggggatcgtgttgccctcgtccagcagtcggaccacattctctacatgccgggggtccttgttcagctcctgcgccagtgtttgaatcatatccatgcttgtatcctttcgttgaaaagccaccgtcgcgacggcggtggcttttggctgtttgaaatttctgctctcaggctcgcttgaaaagcttttcaagctcgtatttcgagacctttaccaccacaggccgcccgtgggggcaataccggacctcgccgctctgcactttttccaccaagaccttcaattcggcggggtcactggtccagccgcccttgatggcggctttacaggccatggtgtgcagcagcgcctcccgtttttcatccagattccggcctgagcggaggttttgagcaaattcctccagcgtggcggcggtgtctgccgcatccaagtctgccgggacctcccgtaccagaatcgcgccgtcaccaaaatcctcacagccgaagccgaactgttccagaagctccagattatccaacagcagggcggcgtcctccttgccgggttccacggcgatgggctgcaaaagggtctgccgcatgggcggctccttggaggtcatcagccggtcaaagttcatccgctcatgggcggcgtgcttgtcgatgagccagagggtctctgcgtcatcctcgcagatgatgtaagtgttcaggacttctccggcaatgcgccacggggctgcctccggcagcactgtttcctgccccggcagctccatggcagtctgctgggacgggacggcgggaatggccgggacaaagggcttaggggccggggcgggttccaccgtcttttccggcacgggaaccacaggcttggcggtcacggaggcgggggcctttcccagggcgctggcaggcgctgccttgacagcaccccgaggcggccagatgggcggaacgctgtcagctaccttggcggtagagccccattccgtgttccaggagggcttgacaggcgcagccggtgtcaccggctgcggacggaaagcgggttgggccgccttgggtggctgggccggggcgggggattttacaatggtaggtgcagcggcgggtttcgtcccctgttcccggtacgccttggcgtccatggactgaaaaaagtcctgccggggattttgggcctctcggaccggcgggggagccggcttcgtcacagccccaccgcgagcatccaacgcgtccatgaccgtgtggaacacagcatcaaatacgtcatgctccttggcaaatttcacttgggtcttggcgggatggacgttcacgtccaccgccgtcaccggcagcagcacctccagcacacagccggggaaccggcccttgagaagctgattccggtagccttcctctaaagcagtggtcagaagctgggacttgatgaaccggccattgacgaaaaatacctgcatggagcgggagccgcggccgttgacgggagcggtcacaaagccccgcacctcgatgtccccgccccggccctgtaccggcaccagcgttttggcgaattcccggcccaaggcggcgtacacggcggattccagcttgccgtctccgggggtgtgaagggattcctgcccgtccttgatgaacttgaaggagacgtccgggtgactcagcgccagatgctgcatcagccccgccacggcggcggtctcggcactgtccttcttcatgaatttcaaccgggcaggggtgttgtaaaagagatccgccacccggatggtggtaccctccggggcgccctcctcccggacaggctccatgtgcccgccctcgccatggatagcggaacccgtggtatcccccggccgccgggtcagcacgtccacccggctgacggcggaaatagccgccaaagcctcaccacggaagccaagggtcccgattttagccagatcctccgccgtgcggagcttactggtggcgtggcgcaaaaaggcagtgggcagctcctccggcgcgatgccgcagccgttgtctgtcacccggatcaggcccatgccgccccgctggatctccaccacgatggcggaggctccggcgtcgatggcgttttccaccagctcctttacaacggaggcggggcgctccaccacctcgccggcggcgatcaggtcggccacatgagacgataattgttgaatgtgaggcatatgatttctccttacagcaatgctgccaaaacgggaatggtgataatagacatcagggtggtcaggaaaatgctctgggccatacattcggtgtcaccgccgtattccatggccagcatactgccgttgagggcggtgggcatggccatgaggatcacggcgatattagccaccagaggtgtgccgataccggtccacttcaggagcagccacagcataatgggaaggatcagaagtcggaaggccgccagagcccacagccggggtgaagtaaatgcccgtccaaaaggcaaatctgccagcagagaaccgaccaataagagggataagggggttgtcaggctgcctgtaaagttcagacactccccaagcaaggctggcatattgatgtggaacagggccaccatcaaggcgatcaccgaggcaacgatacatggcgatagcaactgctgccaacgaaactttgcctgtccagccagcatcaagggacccagagaataggacagcaggttaaagggcaggaccaggatcacggcatagaacagtgcctcctgaccaaagagagcgaccgataccggatagccgataaaggccatatttgaaaaaatcaacgaatagcgccagacacactgctgcttgactgttccacccaacaggtggggcacaaaggtagcggcacagaaacccagcccataataaacgattgctacctttaaaacggaaagaatttcctcggtactgggcagggtatctccagcggagacggagcctaaaatcaggcaaggcacaatgatacccaggagcaaacggcaaagattctgatccgtttgcttgctcagatatcccagcttgtgggcgagaaaacctgcggccatgcagaagagaatgaccagcatttcagaaaacacgtcaaaaaaactcacagaactccacgctcgattctatatagggtatcacatacctgccaacacatgaagggcattggcggcggcgtggagcagaatggagctccacagggtcccggtgtggtcataggcccaggccagcaccagacccggcaccagatactgcaccatcagcaggaaataggtgatgtcctgccgcactacggcaaactgccacacatggagcagagcgaacagcagacagctcaccacataggccaccgtccggcttttgcttttcagattgccgaataccagcccgcgaaacagcacttcctccacgaagggagccaggaaaattacgatcagcagcgttactctgggggcgtcatggatctgggcggagatagtggtgtcattcaggttggtgtggttgttcaccagcatccgggtcagccggtagactaactcattgaggccgtacagagcgatgagtcccactaagatcgacttgcaggcgttgcctaagttgtccgcaaaattccgagtggtgcggcccagaaagctgtgaaaaatgatgagcgtaacggcaaacagtgtgtaataatagatggcattttgcagcgagggcgaaacgctggcatccagcagccgctccgccaatcggaacaggggcgctgcggcaaagggcagcaccaccagatagatcacaaagaaaacagttccggcgatctgctcaccgggggtcatataggaggcggatttacgtttggccattggtcaggctcctttgaatggttctccctgaaagggaggacccagaatgtgcggcgaatcgccgcaggaggtgccgctatgcggcacaggattacaccccccattttctttttgagacatcaaaaagaaaatgcgccgtgtacggtggaaaagaaaaaatgtcagggatgaattggcctgcaaaaggccaactcacccaaaacgaggggcctgccgtcacgaactgccatgcagccccggagtccttctgtcggctgcgctgaaagtctccaaatgacctaagtgcgtccccgcatttggtggcgtggcattcatcgggctgcaaaaccggacttgaccagtttctctttccgcgctttccgcttcgctaagcgctgccctgctctataaatgagcacgagcggcagcggaaaaagaagcagagggtgtcctatttgcatcccgaggtttcatgtgactatcagcacggtgtacaaggctgaatgaaatccgcactccgcccgtgccacgaagcagaaaacaaatttctgagcagaacagttgagaaccgcattccccaaacttgcacaaatgtgcaagtttggattcggtgtcttttctcttccaccgtgcacggcgcattctcttttccgcaagaggaaaagagaatggggggtgcattccaataggcaaagcctattttgaagaatgcccttctgcgggagcagcctttatttgctcaatttctgcttcaattcatacaacagccccattgcctcaatgggcgtcagcgtgtccggctggcagcggcggatggcgtccagtacctcgccctcgctcatggcgtccagcgagacctgatcgctttccttccgagcggccacgtactgtacgccgttttcgtcctccagctccttcagaatgaccttggcccgctggaccaccttctccggcagacccgccagcttggcgacttcgatgccatagctgcggtcggcgccgccggggatgatcttccgcaggaagatgatgtcctccccccggcgcttgacggcgatgttgtagttcaccgtgccggggagggtgttttccatttctgtcagctcgtgataatgggtggcaaacaaagtttttgcccccagcgtctttttgtcggcgcagtattccagaacagcccgggcgatggccataccgtcaaaggtggaggtgccccggccaatctcgtccagaatcaggagagaatttttggtggcctgatggagaatatcggagacctccgtcatctccaccatgaaggtggactgcccggcggagagatcgtcgctggcgccgatgcgggtgaagatccgatccaccacgccgatatgggcgtatttggcggggacgaagctgcccatctgggccatgaggacgatcagcgccacctgccgcatataagtggatttaccggccatgttggggccggtgatgatggccacccgttcttccttttcacccataaaggtgtcgttggggacgaacaggctgtccttcagaaccttttccaccaccggatgacggccctcccggatctcaatgaccccggactcgtccacctccggacggcagaaattgttgtggactgctacggaggcaaaggagcacagcgcgtcgcactccgccaccgccgcggcggttttctggatgcgcccggcgttgtccgcgatctgctggcgcagggcggagaacagctcatattccagcgccaccacccgctcggaggccgtcaggatctcatgttccagatccttcagttcctgtgtgatgaaccgctcgccgtttaccaaggtctgcttgcggatgtaggtttccggcacctgctccttaaaggcattggagacctcaatatagtagccgaacaccttgttatagccgattttcagggtgcggatgccggttttttctttctccttggcctccatctccgccataacgcccttgccgcttttcaggatgtgccgcaggcggtccacttcttcattgaagccatcccggatgatgccgccttcccggacggaaaagggcggctcgtcacagatggcggcggcaatgtccccgctgatatcgtccagcgtgtccagctcggcggtcagttcggtcagacggcggtcggaaaacccggaaagctgttccttcagggtgggcagcttttccatggcggcgcggagggaggtcaggtcccggccaccggcggtgccatagacgatgcggccgatgagccgctccatgtctccaaggccggtcatcccggcgatgagttcctccctgcggatggtgtcatccaccagcgccgccacggcactgctgcggcggtcaatatccgtcacggacaggagggggcgttctaaccagcttcgcagcatccgcccgcccatgggggtcttggttttgtccagcacccagaggaggctgcctttcttctccttgctccggagggtctccgtcaactccagattccggcgggcggccagatccagctccatgaatcggccctgacggtaataatccagttcccggatgtgggagaggtcggttttctgggtctcgtagaggtagttcagcaaaccgcccagagccatggcggcggcaggctccccggcgggcagcctggaaaaggcttcctcaccaaattgggcgcggatatttttctccgcctctgccagccggaaccggcgctcaccgccgttttcatagcggcagtggaatttgtcggtaaggacgtctgtcagcgccttctcgctgaatgccccgtcgctgagaatggcctcggcggggctgaaccggcccaactcattgatgatgtgggtcagggtatctttgcctgagaaggcggtgaggtgagtctcaccggtggagagatcacagaaggccacgccgccccccttgctgtccagatagatgccgcagaggtagttgccggacttatcatccagacatgcggcgtcgataacagtgccgggggtcaccacccggataatatcccgctttaccagccccttggcggtggcggggtcctccatctgctcgcagatggccaccttgtagcccttggcgatgagacgggcaatataggactcgctggcgtgataggggatgccgcacatggggacccgttcttcctccggcttggcgtttttgccgtggtcccgggaggtcagggttaggtccagttccttggaagccagtttggcatcgtcggcgaacatctcatagaagtcccccagacggaaaaacagaatggaatccgggttgtccttcttgatttccagatattgcttcatcatgggggtcagttccgccataaaaatacctctttctttatctttcagcaaatgtttctgttttattttaccaaatcgtatacgcgtgtgccgctttgcggcacgggaaagcatggtgataccatgcagaattgaatccccattttcttttcctcttgcggaaaagaaaacggccattcatggtcaaaagaaaagacgctgagggatgatttgacacctccgtgtcaaatcacccaagacgggggctggccgccacgcactgccgactaagcccgcaactctcataccggctgcgctatgctcgttctttccagaactgcgtctccgcaccagaaagtccgtcgcacaacgaggtgcaaaactgaatcggcgtatttctactcccgtgcgttccgcttcgctacgcactaccctactctgcaaatgagcaggagcggtagcggaaagagaagcagagggtgtcctatttgcaccccgaggcttcatgtgacgatcagcacggcgtacaagacttgataagctccgcaccccgcccgtgctacgcagggactgacaagtctttgggcagaacagttgagaaccgcattccccaaacttgcgcttgctgcaagtttggacaaaagcgtcttttctcttccaccgtacacggcgcattctcttttccacaagaggaaaagagaatggggggtgtattccaataggcaaagcctatttagggaatatcacaccggctcgccgtacagcgcccaggtgttgctgtccgttatctttacgtcaataaagctgccgatcagactcttgtcacccttcagccgcaccagccggttgccctcggtgcgggaggcaaggggaaagttctcgtcgtcactctcaccgtccaccagcacccggacggtcttgcccacataggcggcgtggagcttggcggaattggcattctggacttccaggagcttatcgaaccacttctgcttttcggcccgggtggcggggtccggcatggctgccgcccttgtgccgggacggggggagtagataaacgtaaacaaagcgtcgaagcccacttcctccaccagagaaacggtgtccatggcttctgcctccgtctcaccggggaagccgatgatgacgtcgctggtcagcaccagaccgggcatcacctttttggcatagttgatctccgccaggtactgttcccgggtgtaacggcggttcatctccttcagcacccggttattgccggactggaagggcaggtgcagctgctttgccacatgggggcatttggccatcacgtcaaagagccggttggtggcgtccttgggatggctggacatgaagcggatcaggtactcgccggggatcttgtcgatgtcctccagcagatccggaaagtggtaatccagccccaggtcgttgccgtaggagttgacgttctggcccaggagggtaatgtccttgtacccggcctccaccagctcccggacctcctgcaaaacgcactggggatcacggctgcgctcccggccccggacatagggcacgatgcagtaggaacagaaattgttgcagccgtacatgatgctgacccatgccttcacgcccttttcccgcaccacagggatgccctcggcaatggtgccgtcctcattgtccacggcgaagacccgcttccgggtctcatagacctgccacaaaagctccgggaacttccacagggcatgggggccgaacaccagatccacatgacggtaggattccttcacccgctgagagacccgctcctcctgcgccatgcagccgcacaggcagattacctgctccgggttttcctttttcgtgtgggtgaggatgcctaaattgccgaagacccgctgttccgcgtgctcccggacggcgcaggtgttcaggatcaccagatccgcctctttggggtcctccgtgaaggtgaaaccgcagtccgccagcatccccatcagcttctggccgtccgccacgttctgctgacagccgaaggtgtccacgcaggccacgggatgggcttcccgggcagtgaacatttccttgatctttgcttcaaactcccgctgacgcgccagcgcgtcctcggacaccagtacattttcacgcttcaaatggtatatcctcctaaagttatctgataaaatgagtggcgatccgctcttccttttccgggagaccgaactgctccttgcccagcgcgatgctgcgcatcaggaatgtcatgttccgggccagagtccgcatggtctgaagcccctcgccgtcctgcgccgcttcaccgggcgtccggccgtgaatactgttccagtattggctggaggccacaggcatcccggagatggtgaaatacttgttcaactcatcaaaggtggcggagcagccgccccgccgggcgcaggctacgctggcaccaaccttcatggtcttatcaaaggatgtgctgtgaaacagccggtccagacaggcaatcagcgtggcgttggcggaggcgtaatacaccggactggcaatcaccagaccgtcggcctcctgaagcttgggggccaactcgtttactccatcgtcaaagacgcacttgccggtcttggcacaggagccgcaggccacgcagccccggatgtcccggtttcccagaaccaccgtttccacatcgacgtcattctccttgaaaatcgcttccatttcccgcagggccacggcggtgttgccgttggcatggggactgccgttgagcattaaaaccttcagggacttcatatttcgcactcctttcagagtcccggcttcatgcgttcatccacttgaagccgggagaaaaagcacataacttaactaaaatatcatagcataaaagctcccggaacacaagaaaaagggaggacaaaagtcctcccttttctggaatgcagtttgttacggcaggtagttcaacgggtttttcgccacgccgttgtaccgcacctcaaagtggcagtggttgccggtggagttgccggtggagccggcccgggccacctgctggcccttgtaaacgtgctgccccacgttgacggtgagactggagttgtgaccgtaccgggtgacgtagccgttgccgtggtcaatctgcaccagataaccgtagccgctcatccagccggagtaggtcacggtgccgccgtcggcggcgtagatgggtgtccctctggggacggcgatatcgatgcccttgtggttggtggagccgatgccgccgggggatttccgtccgccgaagtaggagctgatccgaccgctggtgggccagcggaagctgccggtaggcatccaggtgggccggaccttggtgccccgaagccggtattcggtgacaggctccttcaaagtcacggaggagagaatggtccgctccgtttcctcgccattgacataggtggccttagccatcacgtccgccttgccgtattcacccttggaggtcaccttatagtcgccctgatagaggtcagcgctgtcggtgtactcaatgttgtaggacacatcatccagataccgctcctgctttaccacagtcatggtcaggtaggggacagaggcggacagggtcagcacttcgccgatctggagcttattgatgttgtagccggggttcagcgccagcagctctgcggaggtcatgtcattcttggcggcgatctgagaccaggtatcgccctttttcacctcgtaagtgacctcggccgtcttggtgctgtaaagcagctccgcaatatagcccaggttcatgatctcactggtgggaacgtactcctgccggatctcaacatcctctgcaaattcgcaggaaatggtatcttcatcggaggccgccttctgcagctggtccagcagttcctccaacgcgccctcgtagggggtggcgccgatgcgtacatcgttgacgtacaggcagtaggcggaggtcacaagaccgatctcatcggaaagctggtcctcgtatacggccttatcctcaatgtcctgacggagcatccagccggaatcgtattgcagcagggaatcgtcgatggtgtaggtctctcccagtgtccgggaggtgatgctttccagatccttccggacggtttcggcttccgatttggaagccagccgtcccaacacctgcccgtcataggagacggtggtgccgatggtgaagaaggaacagaacaggataatgcctgccagcgcacagcttcctcccaggaacatcagggagtggaggcgcttttccttttcaaaccagacggagaatctgctggtgcggaggttccgctctctgcggcggcccagcaggatctcccgcagccggctggcagcggagggcagcagcccccaaagcatcagtaggaattgcagaggcttccggttggactccgggaaccgatgggcctgagcctcccggacaacccggcggcagcggcggccaaaccagcggaccttctttccggcccggaagcggagtttgccccagaggtcttcgggctcagcgggagcgcgccgctttctgcggggtctgggcgcttcctgggtctgttccgcctctgcgggccagtccggcagatcataaggctttttggtgttttgactcataatgctcctatcgtatcgcgggcagatgccctttaaaaatttgtgaaccataaaaagtaacaaattgttaccgctttatattatcccttttatattcgcccgtcaagcaacttctggctttttggcatatttttatgtattttaacgatgcttttttgccgaatttcgtggttgacacgcaaaaatcggaaaaaattacgtcccaattcgtcacttttttcattgaccccggctgcggaccgtgtataataaagggtggaattgaaaccccgttccctgaattaaaaattggaggaatcaacatgtttgaatttctgatcaaaaagctgaaggcgcatccccgtaagatcgtcttcaccgagggcaccgatccccgcatcctggaggcttctgcccgtctgctgtccggtacttttctgactcccgttctggtgggcaacgccgacgagatcaccaaggctgccgaagaggccggcttcaacatccgcggcgctgagatcatggaccccgccatcttccctgacatggacaagatggtggccctgatggtggagctgcgcaagggcaagatgaccgaggagcagtgccgcaagtccctgtctcaggccaactacttcggtaccatgctggtgaagatgggctatgccgacgctctgctgggcggcgctacctactccaccgctgacaccgtccgtcccgccctgcagatcatcaagaccaagccgggcagcaagatcgtgtcctcctgcttcattatggtccgtccttccgctaccggcgagaacgaggtcctggctatggctgactgcgccatcaacatcaagcccaccgaggatgagttggtggagatcgccgttgagactgcccgtaccgccaaggtcttcggcatcgatcccaaggtggccttcctgagctactccactttgggctccggcaagggcgaggacgtggacaagatgcgcaacgcctgcgagaaggccaaggttgccatgcccgacgttcccgtggacggcgagttccagttcgacgccgccgtgtctcccgtggtggccaagaccaaacacatcaccagctccgtgggcggtcatgccaacaccttcatcttccccgacatcaacgccggcaacatcggctacaagatctgccagcgcatgggtaacttcgacgcttacggccccatcctgcagggtctgaatgctcctatcaacgacctgtcccgcggctgcaacgctctggaggtctactccatggccatcatcaccgccggtctggtggattgatccccgtctttgaaaagtaaaaagtccggatcatgcggctccctttgacggaggcgacgactgattccggagatcccccggcgggtcatcgcgtttgcggtgcccgttggggtttttttattttctgagggcgtgggctatctgtatcctactgaggactatgcggccaatgaccgcaggaacagccgggaaacagttcgtacatggcatcaaacagcagatcggtatgaaacggctttggaataaactgtgagacgcccagagcaaaggcctgatcggtgacttgctcagaaacgatgctggagagaagaatgaccctctgtggggcagttccccggcgctgtaactcattcaacacggttagaccgcagacatccggcagcgccgtgtccatcagcagcagatcggcagtctgtttttgcatacataataaaacatcgcggccactgccgacggttgcgagggagaaaaaatcatgatttgccacatttttccacatcaaccagcgaaattcctcgctgccgtcggccaatagcacacgcttgcgactggtcatattctaaatcccccccatattttcagatacagaaatactgcaaaaaggggtctatgcgacctcctgctgatcctgatcccggaactgctttttcatctgcgcaagaaacgccgccagctcatctggctccagcatcagtaaaaagaataagagagcgattgcagaacaacaactgcagccgcgctctaaatcgccataggcccgaaccgtgatatgtaactgctcggacatttcctcttgggtcagcttccgcttcttgcgaagcgctttcgcctgtacagaaaagtactgccgaagtgactctttatacccgttcattcgtcaaaacctccgtatatctgactgataccgagattctatgtcaggtgaaagtaggcttccatgaagtgcacttcctctttttcgggtttcacacggaatttacggatcaaaccctgggggcgtagatagaaaactcccctgctgaacgttttctcagcaggggagcggtacttcttgcatatttgcatttgcgcgaatggatccgtttggaaggagcggccttcgatcgctcagacggcgggtttggccatgaattcatcctctacatcgtcccggatccccagacgctggtagagcctgtgcataaaagagaaggtgaagccgccgggcagcatcccattgacaaaaatcgccgccagcacgccgattccggtgtccagaatacggttcatggcgtaggtgatataagtgtccgtgggggtgttgaacagcaggatgcacagcaccacgccgccgggctgtacgccgcccacccagatacgctggcacagcaggatcaaaatgatcacgccgacgaaggtcaaggggatcaggacccaggcgttgctgccgtcagggaacagctccatgtaaatggcaaacagccccatgccgataaaaccgcctaccattgtgccgaagaaacggttgccgccgtggagacggctttgcataaagctgctgcccatgccgaaaatggcgccgatgcaggcgaaggtagggttgcggtccagaaagtagtagaccagcgcgcacagagctgccgcaagggcggtcttgacgttgcgcataccgattttaggaaacaggcatcctgctttttcatggtgttccatggcattttctccgttcaggatcgttccgcggcggataaaggcagcggaaatattgttaagaacgtgtcaaattataccatggaaccagttagctgtgaaccccttgcaggtatttttatgcaattcacaggagaaaacgtttgcgaaaatcaatgattctgtggaaatgtttgcacttttgcgaagaaaatgcggcttcgcagcagaatgtggggacagtgggcctgtcatatttttcagatatccgggtaaagccagccgctcccggcccgaagactcccggcggcgatccggagaccggagccgcccagcgccgcggcaaagcggtccgccagagaccgttgggcctccgtgtcgatctgattcagaaacacggcgtcgcacagctgttccgccaaaatggcctttgcggcctgttccggcgtgacggggtctgacgcagcggcgccggtcaggacgcagaaccgctccagccggtggacgctctcccggatgggcttcccgaaaccggatgcgcccaccacgcagatcacctgacggctgacggcggggatcaccggctcgtgggcatcgtgggccttcagaggcagctgccgggaaccgtcggcctccaccagcacatggtccgccagtgtggccagcgtctccacggaaagggtgggggcggtcagcttgccgttttcgcagggcgttcccagacagaggacccgatgggcggccaaggccttgcggatgtcctccggcgtgggggccgtcagcagggggtattcctcaaagggacggatatgggtggtggtacagaggaggaccgtccccggcaattctgccgccagacggcgcagcaaactggttttaccgccgctgccgatgacggcggtgacgccggggtatacttccagcagcttggaaaaatccataatccacctcttttcgtttgctgtgcccgcgatgctgcgggcttgtttcctctaccgcttcaccatcaggcgcttcatgccggcttccaaaccctcggcggaaaggtcgaacatggggaacagcttggccaactgcaggtgggtcagggtccagaagtcctgaaatgccggcagaggctccgggttcagccagatgagataagggaagtgctttttaaacagctccagccattccagaccggaagggccgtaccgctggttccgccaatcgtactgcttttcccgcagctcgtaggggttcatggcggcatcgcccacgagaatgaccttgtagctggcatcgaaattctgcaaaagccattccgtaggcgtttggccgtcctgccagaggcgggggccgttgtaaacgtcgccgtaaatgcagttatggaaatagtaggtgtgcagctctttaaagtggttggacttggtggccgcctgaaacagctggctgcacaggccggaatagtagtccatagaaccgccggagtccatcagcagcaggaccttcaccgtgttcttccgggggttcttgtaccggacctccagccgccccgcgctctcgcaggtatcgtggatcgtggcgtccacatccagctccttttcggcgctccgctcctgcgcggacagctgacgcagcgtgcggaaggccatctggaactggcgggtgtccagcttattgtcttttcggaagtcccggaattttcgttctcccgccaccatcatggcggtgcggtgcatggactgcccgccgatccggatgccgttgggatgccaaccactgttgccccaaggggtgcggccctgggtcccaacccagtagttgccgccgttgtgctcttccgtctgctctttcagacgttcctccagcattttcagcagttcctccagcgtttcatccggaaacccggcggagcgcaggtcggcaatggtccgtttcagatcctcgctggggtggttcaaccagtccagcaggtcctccggcagctccccggtgtagggcacgttcttgaaaaattccaaaaagatctggtcaaagcggtcaaattccgtttcattcttcaccacgatggcccggcacaggtgataaaagccggtgagcgtcgaatggtgcagtcccttttccatgccctccagcagcgtcatccactcgttcagggaaacgtgcagcccccgctgacgcagcaggtaaaaaaacgcggcgaacatggcttacttcacctttcgcagggtctgaagatccttgccttttttcagcaggacaccggcgaagggaatctccttttcgatgcgggccgggtccacgccgccggccaccagcgcccggatccagtccaccaactcagaggtggagggctttttctcaatgccccgcagctcccgcagccagtagaaggcggcgagggactgcttcaccagcttttcctccaaatcaccgaagtggacccggagaatggcttccatctgctcctgctccgggaactcgatgtagtggaacacgcaccggcggaggaaagcgtccggcagttccttctctgcgttggaggtgatgatgacgatggggcgctgcttggcctgtacggtctccttcgtctcggggatgtagaactccatccggtccagctcccagagcaggtcattgggaaattccagatccgccttgtcgatctcgtcgatcagcaggaccacctgctcatcggcagagaaggcttcgcccagcttacccagcttgatgtattttttaacgtcatccacaccggcgtttccaaactggctgtcatagagccgctgtaccacgtcatagacgtacaggccgtcctgagccttggtggtggattttacgttccagataatgagttttttcccaagagcgtccgccacggcctgagccagcatggtcttgccggtgcccggctcacccttgatgagcagaggcttctgcaaagccacggcaatgttgacggtctccatcaggtcgcgggacgccacgtaatttgcgctgccgctgaattttgtatccatatttgttctcctttgcgtgggtttggtgtgctgggccgattatagcagactttttttcgggagacaatgtaagtttacgttttgacacactatcccagcgccacgtctaagatcatcataattaaaaagcctcccacaaagccgcaggtcccggctttggaatgggcttgaggcaccagttcctccaccaccacatacagcatggctccggcggcgaagctgaggagccatggcatcagaggtcggacaccggcggctaccagcactaccagaataccgaaaatcggctccacgctgccggagagggtccccaacagaaaagcccggccccgggagctgccctcctgccgcagaggaagggagatggcggcgccctccggaagattctggatgccgatgcccagcgccagcgccgcagccccggccatgccctctccctctgccgccagtgcgaaggcgaggcccaccgccatgccctccggtacattgtggagggtaatggctgccatcagcagcgtgctttggcggcgggtcaagtccatgtcctttgcccgccgtagatggggcagaacggcgtccagcgcggagagaaagcccacgcccagcagcagccccgccgccgcggggagccagccgggaacgccgaagtccgccgactgctcgatggcgggcagcagcaggctccagacgctggccgccgtcatcaccccggcggcgaagccaagcatggtccgctggaactggggccggggctcctccacaaagaaaaataccaccgcagcccctaaggtggtcatcagaaaggtaaagccggtgcccaaagcggcccagctcaatgcttgcagcatacgaatcaacgccttttcctcgattcaggcggaattttgcctgtacgccagtataggcgacaattcccggatgtgtgccgacggtgtgtgccgacggtgggacttgcctttttcccggcgccgtggtatgattaaactgtaaaaggaaatatggctcatataattccgctgatgggatcgtctcaggcgcggaagtttctatgagatcgcctaagatcttgctatgagcgtccgcttatgcgggcgctcttttgttttgaaaggaggacgcaatgaccactattctgaaaggaaatatcgtttctgcaccggcctgcggccggctggatgtgatggaacacggttatctcatcgccgaaaacggcgtcattaccggggtgtatccggtgctgccggagcaatatgccggagcgtctgtggaggactatggagactgcctgatcgtccagtcctttgcggacctgcacctccacgcgccccagtatcccatgctggggatgggtatggatctgcccctgctggactggctgaatgcctacgccttccccacggaggcccggtttgcggagccggactacgcccggacggtgtaccggcagctggcgggagaattggcgtcccacgggacgacccgggtgtgtatgttttcctctctccacaccgacgctaccctgatcttgatggatgagctggaaaaagcggggatcaccggctatgtgggcaaggtgaatatggaccgcaacggcgcacccggcgtgttggaggagaccacggaggaatccatgcgcgaaacgctgcggtggctggatgcctgtcaggatctccggcacatcaagccaattctgacaccccggttcaccccctcctgcacgaatgagctgatggcatttttgggaaagctggcggcggagcgcgatctgccggtgcagtcccacctgtcggaaaacggcgcggagatggactgggtacgccaactccacccggattgcagacagtattgggagacctacaagaagtacggcctttggaatgatcgcaccgtgatggcccactgcgtctggtcggacgagcgggagcggcaggccatgaaggacgccggggtaacggtggtccactgcgccgactccaatcagaatctctgctccggcgtggcgccggtacggaggatgctggacgagggcgtaaaggtggctcttggcagcgacatcgccggaggagaccacttggatatgttcgatgtgacggcctccgccgttcgggcctccaaggcccggcggatgatggatgactggaacacccccttcctcaccgtggcggaggggtggtatctggctacctctgccggggccgctctctttggagagcagccgggctttgccgcgggaaattcccttcacgccatcgtactggcggatgacacactgccccagccccgcaccctgactccggcggagcggctggaacgggcggtgtaccgccgtcaggagggggccgtacaggcagtctggtccgccggaagaaaaatctacgcgaagccgtaagaaagttgtccacaagagtttggaacataaaaaacgcagccgttttcgggagattatcccgaaaacggctgcgttgttttgcatttctttgcggtcgcggcgtattccattggttctgttggaattactgcacggtgacgggcttgggatacacgccccggaagtcgaaccagccccgggggtcccggatggcacccagataggtgtcccgcagcttccaggccgttccaaccgtgtagaggggggatatggcgcagtcgatctccagcagcaggtcctccgcgtcatggagacagcccatacgggcggagccgtcctcggcaccggcgatgatggacatcagcgtatcgtaagcactgttctcatagtggaggaaattgtcctgattgccggtggtccagtccatcaggaaacattccgcgtcattgcacacggcgctgacggacataccggccagtgtgtacgttccgctgcgcagggctgcggctagttccgtttctgttacggctctgggggtcacattcacgcccagatagtgtccccacataccacacagggccatggccacggtcttgttgctgccctgatccacatagagatattccagagcacccagctccgcactcaggtcgctgccccggtcatatccggcattctgcatcaggtccacagcgtcctggcagcggtcggcgtagctttccgggtcgttgtccagcaggctgccgccgcaggcgcggaaatccagatctgcgttgtcctccggcacaccggggggcaccagtccctcggcgggctgtgccgtaatccccgccatggcggccagctgttcccggtcgatcaccagactcagggccttgcggatggattcatcctccagacggctgcagttgaacatgacggagtaagtctccagaacaggctctgcccgccaggtctcgtccgcttccatctgctctgccatctcctcctccgtcagaggccagacagcgtctaccacgccctgatcatacaggacctccgccgtctgcgtgtctccgaagcggaaggtcagatcctccggaccggtcagctttttgccgtaggcggtattttccgtcagcgtcagagcattttcgtcctctgcggaggcagtatagggaccattggttaccagacgggtgggatcggaccaccagcggcgaggcgtctcatcctctttcagattttcgttggcggcatccgcctcctgcttgagccgctgtacaacatcctgccgcagaggcatggtggcgatggaggtgcagacctcccgcaggaaccagtcgtaatgaccggtcagggtcaccacaagggtggtgctgctttttgcgctcaccgccagcagactcatgtcgccggaggcctgagcctccgcatagccgctgacaatggacagcagcggggcatacacggagccggtggcggggtctgccagacgctgccaggcgtatacaaagtcgctggccttgacctctacgccatcggaccacttgccgccccggaggcggaaggcgtaggtgacggtgccatcgctgttctccttcatgtccacgcttttggcggcaccggggactgcgatggcctggctgttttcgcccgtttccagccgcatcagattttcataaaggtggttcaggatggtctggtccccgatccgctgggcgtagataggatcataggtggcgggggtctcacccacgcagacggagagagatgcccggccgtctgccgattccttccggccgcaggcggtcaagagggtaacgcacaccagagcgctgagacacagcgctgtcaggcgcttccataatttcataggaactccttttatgttatgccatggtcaggctgccgttttcatcgaatttcaccggcaggatctcattgcgggtattcttggcaatatcgtcgatccggatcttggaggggaagtccgccacaaagctgacggccacgccctgccgtttggcccggccggtacggccgatccggtggacatagtcctgattttcatcaggaatgtcgcagttgaacacgatgtccacatcatccacgtcgatgccccgggcggccacgtcagtggaaacaaagacccgaagcttacccttgcggaacagatccattacctgctcccgcttcttctggggaatgtccccgtggatgcactgagcgtcgatgccccgcatctgcaggaacttggtgatgcgctctgtgttgcccttggtgttgcagaacaccatgcagcggtcaaagccggtctcgttcagaatcttggcgatggcctccgccttgccgtcaaagctcacgtccatgcggaactgcttgatatcgggtttgttctgctcgtcctcccggacggtgacctcctccgcgtcccgctgatacacccaagcgatgtccatgacctcacgggagatggtggcggagaacagtcccagatttttccgcttgtccatgcggtccagcagccgggtcacgtcatggatgaagcccatgtccagcatccggtccgcctcgtccagcaccacggtttttgccgtatccacccggacggtgcggcgcttcatgtggtcggacagccgtcccggtgtggccactacgatctggggatgttttttcagcgcgtcgatctggcggccgatgggtgcgccgccgtacaggcacactgcccggatgccgggtttataggtgtagaggatccgcagctcatcggtgatctggatggcaagctcccgggtgggggccaggatcaccgcctgaacgctctcgtcctccgggtcgatatgctccacaatggggatgccgtaggcaaaggtcttgcctgtaccggtgggggccttggcgatcacgtcccgccattccagcatgggggggatgcagcccgcctgcaccggggtggattgtacaatattgcgctccattaaagcgcgcagaatttccggtgacagctccaatgtgtcgaaccggacgccttgagtcagttccatgattaaattcctcgcatttgcagatatttgcacataattaaaaatattatacacactttcaggccatttgtaaaggggacgtcccggatggcttttttaattccgatgcacggtttcgtgcaatttttcaccttcggcggcatatactgagtaagttgcaaatgcagatatcgcaaaggagggaagcgtatggagccgaaaaagcctatgggcgatgtggataatctgatctttcaggacgcctgggaggtcagtcaacgataaaggactgccgctaagcggcagtccttttgctgtgcaggtttgccatgcaaaagcatagcgaaataagaaatgtgccatttcctcgcccctgcggggcaaccggaaatgatgcacgaaaccttcacgcactggcatttgcgcatgttcgtggtgcactgctcatgcatgaagttttatacaatgaagccgccgtcggcggtgaggacctgaccggtgataaagcctgcccgttccgaggcgaagaatgccacagcgtaggcgatgtcctccggtgtgcccaaacggcccagaggcgtctcgcggatcagctcctccacggtctcctgtcccagcacctggaccatatcagtgttgatgacgccgggggccacacagtttacccggatgccggagggggccaattccatagccaacgaccgggtcagggcgatgatgcctgcctttgtgcaggagtaagccacctcgcagcttgccccccgctggccccagatggaggaaatatttacgatgcagccccgtttttccgagatcatgtgggggagggccgccttgacggtgttccgggcgccgctcagatttaccgccagataccggtcccacatctcgtcggtggtgtcctgaaacagcccctgacccgacacaccggcgttgtttaccactaattctaccgggctgaaggtctcgcccagcttccggaccatctcggccacggcagcgctgtccgcgacatcggcctggaacatggcggcatgacagcccgctgccgtcagttcctccaccagctcccgggccttgtccgcccggttcaggtagttgatgcccacagcccagccctgatgagctaattcccgggccacggcccgaccaattccccgggacgcgccggtgatcaatgcggttttcataagatacccccaaacaaaaacttccggtgaagcgttaacgaaaaagaaaaaccactccgatggagtggtttttatggtggagacgaagaggatcgaactctcgaccttacggatgcgaaccgtacgctctcccagctgagctacgcccccatacagccctgttattatagcaatatttcctgaacttgtaaaggccttttgcgggaaaaatcaaaaaagatcggcctgtgcatacagcggcggcccggaatgactccgggccgccgctgtcagatcatatgtaggagtgttccacctggatcacggggacatagtggctgtcgaaggcgcggatgagagcccggagctgccgggctacctcggcgtcctccagccggaagccgaagggcgtcaccacgtcgaaaatcagattggtgtgggtggggccggggaccatgcggaaatcgtggatactgagggccggatcgatgcaatgggccagctctgtgatcttattccggaggacaacggtcgtgctgtcatccgtggcgatggggtccatgtggatcaccgcctcgcagcccagcttccggtgcagctcctgttcgatgttgtcgatggcgtcatggatcgtcatgacgctgccggtggccgggacctccgcgtggagggagatcatcacccggccggggccgtagtcatgaaccaccagatcgtgaataccggagatctctttgtgagccatcaccagatcttcaatttctttaacaaattccggcgtggggggctttccaagcaggggatcgatggtgtccttggcggcgtctatgccgcccttgaaaatgaacagtgccaccagaatacccacccagccatccaccgggagctggaagtaatggccgatcagagtggcgaccagaacggcagaggtggacatgcaatctcccagcgaatccgccgctgccgccagcagcgccggtgcggagagttttttgccgagggagcggttatacatggccatatacagcttcacgcagatagaagcagccagaatcccgatcaccagccagctgaactccaccagagcggggtgcaggatcttattcagggactccttggccagttccacgcccatcagcaaaatcagcatggataccgccagaccggagaggtactccgcccggccgtggccgaagggatggcctgggtccggcgctttggcggcaatgcggaagcccagcagcgtgaccacagaggaaccggcatcagagaggttgttgaaggcgtccgccgtgatggcgacggagccggagagggtcccggcaaagaacttgcccaaaaacagcagcaggttcagcccgatcccaacagcgccgcagagaataccgtaggccgtccgcagctgagcggggcttttcccgtcgcttttgcagaagaaacgggccagaagcgagatcatacagttttacacctttctttttgagaatagaaggagacggtcacttcccgccgggaatgaccagcttcatgtggcagcagagatcgtccagatcccggtcggtggcggcgctgagccgcaggcgggcgccgcagtcccggcatgtcagctccaccgcgtcccggcggatctccatgctgtaatcgtggctgccgcagccgcaggtgataccgttgggccgggcggcgatgtccttgagctccgagaggaattcgtacatgatcacattgtcggtaaaggcctccgcctcgccgccgttctcctgcgccttttccttggagatggcaatgctggcctcccggaggtgatgttccaccgtgccctcgtcgccgatgaagcagcagaactgcttgctgtccgggcagctgagggcggtggcggcgtggagcatccgctccggcggacagacagcctcgtgggtctggccgcaaacgccgcagggcaccagaatgtgatagttctggccgtcatagttcgtccgcaggacactgccgccgcaggagcattcgatctcggcgtcagacgcttccagcgcaaatacggagcgggcacccatcacttgggcaccgcatttcgggcagatatagcccagagttctcatatcgtcagccataggggcctccttgcataatttgtcaaatttggatatcctgcgcgtggggcaggtgagattgtgtatagaggaacaccttgtcacctgccagcagcttcagaccgccattggggatcagtgtccggttccggcggcggaccataatgatgaccgtctgccgggaaatatccagatcccggagcgggtggtccacccaggggtggtgtgtctgaaggacgatctcctttagctggatgcggacgtcatcctcatagacgcctgcccccagcacaagattgtcaccggggaggagcaccacatcgccccggggaacaatgatgtctcgtccccgctggacggcggcgatgatgacgccctccggcaggcccagatcccgcagcggggcattggcccagcggtcccgaggggtcaggtggatgcggatgaagtgaatgtccgcttccgtgccgtattcgctgatccgcttgatgcgggaatactggtccacgaagccggcggaaatgataccggtggggatcgccaccatgcccacgcccaggaaggtgatcaggatgccgaagatcttgccaagggtggtgatggggtaaatgtctccgtaacccaccgtcagcagggtggataccgcccaccagatgccggaaaaggcgttggaaaacacctggggctgcgcgtcatgctccagagagtacatacataaactggaggcggtcatcagcaccagaatgataaacacggaggagagaagctgctgggccttgctggtaaggacctgggtaataacgttcagggaatcgtaataggcgttgatccggaacaggcggaagatccgcaccacccggaacatccggaaggccacggccccggaggggaagaaaaagggcatgtagtagggcagaaagctcagcaggtccacgatgcctgagaaggaaaaaatgtatcggcagacggccttccattccttcagattgggatggtggtacttggcagtccagatccgcaggacgcagtccacggcgaaaaaggccacggtggcagcttcgatccgcagcagcagcggaccgcaggcggcctctgcctcgtcgaaggtgtaggcaatggcgaccaccaggtttaccagaatgaccaaggtgtagaaaatgtcataggcgcggctgatgagatcgtccgccgtaccaatgtcaataatggtgcagatccggcggcgcaggaactcaagagacctgaaattcggcataaccgcctcctgatgtgtaggtagacggtacactgcctggcggtgtaccgtcgggaaatatccttatattatagtaatatcccctcggaatgtaaacagatttctttattttgcggaaaagaagcggggaatccggagcgtaggaggatgttccactccggagcggctgggggcacttgacacagagtttacaaaaaaatcacaattactgccttgcaaaccttcaaatgcagacgtataatcagaatgaaaattgagaaaaggagggatgtgcaatgacgatgaacaagttcatggcagatgtggatgacctgatttttgacggtcaggagcagagccacagcgaacggtaaaaccggaagaaccacgccgagagggcgtggatttttttatgcctttttgagggtgccaaaaatttcgaccatgcgtaatcgtttttctgaaatttttcgcaaacgtttgagaaaaaatcacgaaattattgctgctttgacatatattgaaagaaaatgtggcttaatatatataaaaaaatttgataattcgcatattttatgaatgttaaatgaaaaataaagacgaaaatttaaaagctttcaaggaaaaaattgggcaaaacgtaaaacttgtttaaagtgatttgctcgttaggtaaatttacttgaaaaaaacgcgcggtgttgttagaatgatacagcaaagttagacactcaattttatacaaaacgtttaaggagtggaaggaatggaaaacatcatttgggtagttttgctgtgcgcggttctggctctgctgtttgccgcatggaagacctccgtggtctccaaggctgacgccggtacggaacggatgaaggagatcgcgggaaacatcagtgatggcgcccgggcatttctcttcgcggagtacaagatcctggtcattttcgtggcggtgctgttcgtgctgatcggcctgttcatcacctggctcaccgctggttgcttcctgatcggcgcggtcttctctgtgtgcgccggttatgtgggtatgaacgtggctaccaaggccaatgtccgtaccgctgccgccgctaagtccagcggcatgaacaaggccctgggcgtcgctttctccggcggttccgtcatgggtatgtgcgtggttggcctgggcctgctgggctgcgccgccatctatgccttcaccggcaacgtggagatcctcaccggcttctctctgggcgcttcctccatcgcgctgtttgcccgtgtgggcggcggtatctacaccaaggctgccgacgtgggcgctgacctggtgggcaaggtcgaggccggtatccccgaagatgacccccggaaccctgccgtgattgctgataacgtgggcgacaacgtgggcgacgtggccggcatgggcgctgacctgtttgagtcctacgtgggcgctctggtgtccgcgctgactttgggtgtggctgtggtcggcaccttcaacggcgccggcgctctgttccccctgatcctggctgccgccggtatcgtggcttccatcatcggctgcttctttgtccggggcgatgagaattccaacccccataaggctctgaagatgggctcctatgtttcctccgccatcgtggtggtcctgtctctggttctgagcaatgtgttcttcggcggtatggcccaggccatcgccatcatcgcgggtctgatcgttggcctgatcatcggtatcgtcaccgagatctacacctccggcgattataactccgtgaagaagatcgcccagcagtccgagaccggccccgctaccaccatcatcagcggcatcgccgtgggcatgatgtccactgccgtgcccatcctgctgatctgcgttggcattttcgtttcctatcaggttgccggtctgtacggcatcgctctggccgctgtcggcatgctgtccaccaccggtatcaccgtggctgtggacgcttacggccctatcgctgacaacgccggcggtatcgccgagatgagcggtctggatcacagcgtccgtgagatcaccgataagctggacgccgtgggcaacaccaccgctgctatgggcaagggcttcgccatcggctccgccgctctgactgctctggctctgttcgtcagctatgctcaggctgttggcattggtgatgccggcatcaacattctggattcccgcgtgaccatcggtctgctgatcggcggtatgctgcccttcgtgttctccgctctgaccatggactccgtgtccaaggcggcttacagtatgattgaggaagtgcgccgtcagttccgcaccatccccggcatcatggaaggcaccggcaagcctgactacaagtcctgcgtggccatctccaccaccgctgctctgaaggagatgctggttcccggcgtcatggctgttctggctcccttggcagttggcctcctgctgggcaccggcgctctgggcggcatgctggccggcgctctggtcaccggcgttctgatggccatcttcatgtccaactccggcggtgcttgggataacgccaagaagtatattgaggacggcaaccacggcggcaagggcagcgaagctcataaagccgctgttgtgggcgacaccgtgggcgatcccttcaaggatacctccggcccctccatcaacatcctcatcaagctgatgaccgttgtttctctggtattcgcatccatcttctctgccagcggcctgctgtaagagaactgtcagaattcaacaaacttttcagaccgggcttccgcataagcggaagcccggtttttattgcctgccggatcgcggcggaagagcataagcattccatattcttttttaaggtatggtgacgacccttgacagagtaatcgtttgccgatataatatgaacgaaaaaccgtcaaaatgccgggccagctctggaaaaaccggcaaaattcggaacgaatagaaaaggagagcggacaatgatctattccagcgaagtacagcgtatgtgcccggtggccaagggcgcgtatcacggaccggcccccatccctgaagaaggaaagtgggttcaggccaaggaaatcaaggatatcagcggtctgacccacggcatcggctggtgtgctcctcagcagggcgcctgcaagctgaccctgaacgtgaaggagggcgtcatcgaggaggcgctggtggagaccatcggctgctccggtatgacccactccgccgctatggcatctgagatcctcatcggcaagacccttctggaggcactgaacaccgatctggtgtgcgacgccatcaacaccgctatgcgggagctgttcctgcagatcgtctacggccgcagccagacggctttctctgagggcggcctgcctgtgggcgcttctctggaggatctgggcaagggcctgcgctctcaggtgggcaccatgttcgccaccaaggagaaaggtccccgctatctggaaatggcagagggctactgcacccgcgtggctctgaacaaggacagcgagatcatcggctatgagtttgtgaatctgggcaagatgatggaagccatcaagaagggcgtggacgccaacgaggcactggagagcgccaagtctcactacggtcagtgggacagcgccgccaagtacatcgatccccgtcaggaataagagaaggaggaattggaaatggctctgtttgaaagctatgagagaagaatcgagaaaatcaattccgtcctgtctcagtacggaatctccagcgtggaggagtgccgggagatctgcaaggctgccggctttgatccctatgagatcgtgaagggcatccagcccatctgctttgaaaacgcctgctgggcctactgtgtgggcgcggccatcgcgctgaagaagaatgtcaagaccgccgccgaggccgccgaggccatcggcatcggcctccagtccttctgcatccccggctctgtggccgaggaccgcaaggtgggcctgggccacggcaatctgggcgctatgctgctgcgggatgagaccaagtgcttcgccttcctggcgggccacgagtccttcgccgccgccgagggcgccatcggcatcgtccgcaacgccaacaaggcccggaaggagcccctgcgggtgatcctgaacggcctgggcaaggacgccgcccagatcatcagccgtatcaacggcttcacctatgtccagacccagtttgactactacaccggcgagctgaagatcgtccgggaggtggcctattccaatggtgagcgggccgctgtccgctgctacggctgcgatgacgtccgcgagggcgtagccgtcatgcaccacgagggcgtggatgtgtccatcaccggcaactccaccaaccccacccggttccagcaccccgtagccggtacctataagaaggagtgcatcgagcagggcaagaagtacttctccgtggcctccggcggcggcaccggccgtactctgcaccccgacaacatggctgctggccccgcttcctacggcatgaccgacaccatgggccgtatgcactccgacgcccagtttgccggttcttcctccgtccccgctcacgtggagatgatgggtttcctgggtatgggcaacaaccccatggtcggtgcgactgtggctgtggccgttgctgttgctgagagcaaaaagtaaacgaaaagtcctgaaatcataaaaagcaggaacttttctggaaaaaacacccgtttctttacgaaacgggtgttttcctatcattaaattcaggagagcagcatccggtcattgctcagggtcttgccggtgccggccttgaaccggaggatcagatcctctacggtcatgcccgcccggtcagtgccggaaacgtccagcacgatccggccgtcagccatcatcaatgtccgggttcccagctccaaagcctgctgcatgttgtgcgtcaccatcaggcaggtgatatttccctccgccacgatccgcttcgtcagctccagtaccttttccgctgtgccggggtccagggcggcggtatgctcgtccagaagcaggagccaggggggattcatggtcgccatcagcagcgtcagcgcctgccgctggccgccggagagcaaccctaccggctgattcagccgatcctcaagtcccatgtccagaagggccagccggtcgcggaaacgagttcgatccttctgggtcaagcgggaaaaccaaccgccgtttcccgctgccagcgccagattttcctcgatggtcatattgggggcagtccccttcagaggatcctggaataggcggccgatccgcttcgcacgtttgtattcaggcagaaaggtcatatcgtgaccgcctacggtgatggcgccatcgtccacataaaagctgccggcgatggcgttgaacagggtggacttgcctgcgccgttggaaccgatcaccgtgacaaattctcccttgttcaagtggagagacaggtccgtgatggcctttttctcattgacggtgccgggattgaaggtcttggagatgcgttgaatgtccagcatgtcagttccctccctttccagcggccagcttccgctgctggaaggccgcccactttcggatgctgggagctgcaatggccagagccacgatgacggccgtcagcagtttcagacactccaccggtacgaccttggtgtaaaagacaacggcgtagataaaccggtagatcacggagccgatcatcaccgccagcacgcccttggtaacggtccggcgtcccagaaccgtttcaccgatgatgaggcaggccagaccgatgaccacaatgccggtgccggagttgatgtccaccgtcttttgatactggcccaccatggccccggaaagggctgtcagagcgttggatacgcacagtcctaccgtgacggtgaatgccgggttcagggacgaggcccgcaccatgtcgggattgtcgcctgtggcccggatggaaaggcctatgcgtgttttcagaaatgccagcagcagtacgcccgccagaacggtgatcgaagccgccagcagcaactcgtaccaatcgccgccgatgccgctgtcccgcagaagggtgaagatcgtgctgccgcccagcaggctctggttggctttccagcccatcgccatcagattgacggtgtacaggcccgtgttggtgacgatgcccgccagaatggagggaatccccaagcgggtctgcaaaaaagctgtgacgaatccggcgcagctgcccgccagcatggcggcaggaatggccaggatcgggtgtcccccggcggccagcgtgacagagaccgccgccccaaggacaaaacaaccgtcggtggtcatatcggcgatgttcaagatccggaagctcagaaacagggccatggccaccaaagcgtataaaaagcccagttccagagcggtttgtgtgatcatcagcaagagaatgcgctcctttcataccgctgcccccggcagcaggccgggggagcggggcggggaatttgactggatcagtccttggtggtggtgacctctaccacctcgcccatgctgtcgaagcaggcgtagtcggcctgcttgccgatgagggcacaggtgtctgtgttgacggtgatgatgccgccgtccatcaggtagtagtcctccatgccatccatgccctcggtcatggcggtgtagaccaggtcagcggtctgggtgcccaggtcggtgtagttcacgccgcaggtggcataggcgccgttgcggacgaaggagtcagcgccggtgtagtgggggatgccgtttttggcaagatcttcatagatagccagctctgcggccatgatgacgttatcggtaggagtaaacacggcgtccacaccggcagcgatcagggcggaagcggcagcaactacttcatcgttggtattggcggtctgttcaacgtactcgatgcccttagtatccagataggccttggcgtcggcaatgggcttggcagagttgggttcagacagggagtacagcaggcccacctttgcgacagagggattctgggcgaacatcatatccatgatgaagtcggtattcaaggcgtcgctggtgccggtgacatagtcgatcccggtcagcttggcggtctccgggtcggagactgcggcgtagaccacaggggtcttggtctcctcggcggagagggcggcgatctgggcggcggtggtggcgatggggatgatggcatccacaccgtcggcaatggcctggtcgctcaactgcttgagaatggtctggtcgccctgaccggaggtgacctcgtattcgatcttcacattcttatcggcggagatctgatccagctccgcggtgacggcgttggcaatctcgtccagagaggcgtggtccagctgcttgatgacggcgaccttataggtcttggcgtcgctttcagtgggtgcggcggtgttctggtcgacagagctgtcggcagagggttcggccttgctgccgcaggcggccagagacagggtcatggcacagacaagcgtcagggtcaggagcttcttcatcatgttgtttttcattttggtttcctccaaaaatataaaatgtttgagtggcagatgaccgtttttgctgtgccggggccaaacggaaataaaaaaacagccttcgccccactcatgggacaaaagctgatgcttctgcgataccacccaaattgacgtttacacgtccgctcgcttacgcgtaccatcatacgcgccccgatggataacgggtgggattcccgtcggtctctacttggtttcccgttcggaccgccctccgaagtccattcgccagccgactcctgctccgatctcaccgcccggaactctctgaaaggtcatcttgactgggtactgctctccgtcataggtttgctgtgattttcttgttgtgccgtattataggcgtggagattcggaatgtcaacccctttatccaaatttgatgaagctgccaagaaagggcggatatttgtctggatatcagtccgttcttacaaaaaatgggacgaaaaggttttggttttccacggtaagcccatataaaaagcatcagcccccgcttgttccaacgacaagcgggggctacttctgctgaatttctttcaatacggttacctctacttccatctatctgccgttgagagctgaaacactgcctgccaatccatgaagcaccgtgcgtacagaattcatgtctcacgcgatcccataaatgatgtgcttcgtatttgaccttccggtaacactctccggcaaagaaagagggtttcccatcgagggctttttctccctctttgtgtctataatatataatagcctcagtaataagtcaatagtttttgtgcattttcaacgtttttgacaaaaaaatctgcggcgggcaagcaggtcgcacaaaggtggacctatccgccgaaggccgatagcagcgcggaaagggaaaggccctccgtctgccagaactgctccagcagagtgtccagattgtcctcactgtgctcaatctctcggctgaacagccgcagggcctccggcagtcctacgaaacgggagaggcggtctgtcaccagtacccccagcgcgcagaactgcgcccggcccagcaggtctccatcgttgacggccttcagcagataccggaaggcgaagtacacggcgatgcgttccagcttttccgggtcttggggagcgaagccgggcaattccggcgcttgctcccattgcttcagcagcgcaagccagtccggttccagaatttccagatcctgtaagcaccggcaggcggcagcttcccaagagccggaaccggcattggtttccgcagaaatcgccaaagatcccgtgcagaaggcggccagctccgccatgttttcgctgtccaatagctgttgggcctccccggtgatgagcaggaagtcccgcagacgggcctttaaggaacggctccggtcccgcaagagatccagcaggcggtcccgcagagggaccagccaatccagccattcgtccccgtcctccgtgggctggttatcctgacgctccgagaaggtcagagggtcacgggtgcccagcagcagttcattggccttgggacaggcggcagacagagtgatctcctgaaagggaccgtagtcctcaataaaacggggatgctcccggcaggtgacggaggtggcctccggccccaaggcacagtggatgtcgcagaggttttcctgattcagaaagggacagcggcggccgtccagcggaaagcagacgtcctcgccgtcaaactgcatggcagcccggagcttctcgcccagagggccgggttctgtctgatatcgcccggcggtgtcttcgtcgatgaccacctcccagccgatgcagcagctgtggggacagtctcccgccagacaggcaaattgatcaaaataatccggaatacgaaccagcatggaaattcctcctgaatctggcaggaaatttcaaacaaaaagttgcaaacgcaacagattttatgagcctattatacgatactaagggcggaaaaacaagcctgcatagctgaggaaaaaggagataccctatatggtacggagagtgatcgagatcgaccgggacaaatgcaacggctgcggcgcctgcgccgatgcctgtcaggagggggccatcggcatggtggacggcaaggccgtgctcctgcgggatgactactgcgacggactgggcaactgcctgccccattgtcccaccaacgcaattacctttgtggagcgggaggccgccgcgtttgacgaaaaagctgttgccgccgcacaactgatgaaaaaggcggcgtccctgaagggcagcgcgcccatcacccgcagcggctgttccggcagcgcacccttacagatggactgccccggcagtcaggccaacacactgcggcagggaacggatacggatgcccctatgcagcctgtcacggcctcccggctcatgcagtggcctgttcagatcaagctgctgccggtacaggcgccgttctatcagggggccagactgctgatcgccgcggactgcaccgccttttcccgggcagacttccacgagcggtttatgaaggggcggatcacgctgatcggctgtcccaagctggacgagggggattacgcggagaagctgacggagatcatccgttgtaatgacatccgggaggtcaccatcgtccgcatggaggtgccctgctgcggcggtttgcagagggcggcggaaacggcactccgggaaagcggaaagtttttgccctggcaggtggtaacactgggccgggacggaaccattcaggaataatggaggtaaatcgtatgaaagcaacagtgaacgaaaactgcatcggctgtggcctgtgcgcgggaacctgcccggtggtgtttaccatgggggatgacggcttggcccacggtggagagatcccggccaaccagcagaccgaggcagagaccgcccgggacggctgtcctgtcagcgctatcagcattgaggactgacaacggaaagacctgccaaacgtctttagcagtctattctgaatcagatcaacaacgcagccgtctcccggagaaatccgggagacggctgtaaaacgatatggagttttgagatcgacagagaagttgccgggacagctcagaccttgcaggtccagccatggggatcgggctgcgtgccccactggatcccggtgagggtgtcatacagcttctgtgccagagggccggtttggaagttgttgatggtatatgccttgccttcgtaggtcagttcaccgatggggcagatgacggcggcggtgccgacgcacatggcctcctccagcgttccattggcggcggcctcaaacagctcgtcgacagagatgagccgttcctctacgggcatcccccaatcctcaaacagctggaggcaggagcggcgggtgacgccggggaggatggacccggtcagcatgggggtgatgatcctgccgttgatcttgaagaccacgttcatgccgccgccttcctccacatacttgtgctccacgccgtccagccacagtacctgagaatagccgttggcaaaggcccgttctccggcccggttggaagcgccgtagttgccgccgcatttggcctcgccggtgccgccccggacagcccggacgtcctcggtctccacgatgatcttcaccggctccatgccgttgtcaaagtagctgcctaccggggagagaatgatgatgaactgggccgtgtgaacgccgtgaagccccagcttcgcatcggtaccgtacaggaagggacggatgtacagagaggtgccgggatcagaggggacccagcgctcgtcaaccttcaccagcgccttgacggcttccagtgcgtcctccggggggactaccggcagacccaggcggatggcggagtttttcatccgctccatgttgtcccaggggcggaacaactgcacctcaccgtcaggacggcggtaggccttcaacccttcaaagacctcggcgccgtaatggaacacacaggcggcaggggacagagagatgttctggaaggggacgatacggggatcgtaccagcctttttcatcgctgtaatccatgatgaacatgtggtcggtgtagtggatgccgaagcccagctgatccgaggggaggagtgttccggggtgtgtcgttttcgtgatgctgatatacatggatgatacctcctgaaaaaataagagtctgttgataaagtggcagattttccgcgacggtaaggaagagtgtgtgcgggaaacccaagaagagtgtcctgcgcattggaattaaacattttcagaacttttgtaaagttctgaaaataagttcgagttctttcaaatgttttacgctttgacagccggataaccggagcgaaagcaaacagaaaagcggccccgtcgaatcgacggagccgcttggtgtttcaggtccgatcctcagaggatcgaaagggaaaccgggcgttgtaccgggattcgacaaatgggaaaatgatgtaccagaataataatgggtaaaataataatggacgccagcagcaggctgtcgtccagaatcatagcgatattggagtgggaagaagcttcagagcagacggaaacggcgcagactgcctgcgcagaagcgtatgcaaaagtagaaccggtcatgcaggtcatcgtttgtcttcgccctttcactcaagttggctgcagtttagcacggtgaaggcggtccgtcaagagaaaatcatgcaaacgcccaagagatcggcggtgtgaccaacaacctcatgtttccgagcaggtgattttgtaggaatttgcggaaacggttgccgataggtcggcctttccaaatacggaatcaggaaaaggaccggcagcgggggttgaacccccgttggaaatctgtcataataagaaaaaaacaggccgggcaagaggctccggcggaaacggatattgcccatgaaacagatctgtatcggcattctggcccatgtggacgccggaaaaacaaccttatcagaggccctgctgtaccgggccggagccatccgccgtctggggcgggtggaccatcaggacgcctttctggacaccgacaccatggagcgccagcggggcatcaccattttctccaagcaggcggtgctggaactgggagatacccgggtgacgctgctggacacccccggccatgtagacttctctgccgaaatggagcggacgctgcaagtgctggactgcgccgtgctggtgatctccggcactgacggcgtacagggccacacccggacgctgtgggacctgctggaacggtatcaggtgcctacgttcctgttcatcaacaagatggacttggcgggcgcggaccgggcgtcgctgctggcccacttaaaggacaaactcggcggcggctgcgtggacttcggggacccggataccctgtgggaggaggccgccgtctgcgacgaggcggctcttgagcaatatctggaaatgggagaacttccggaggacatgatctcccgtctgatcggggaacgaaagctgtttccctgcttcttcggttctgcgctgaaggtggagggcgtggatgagctgcttgccggcgtggagcggtatgccccccagccggactatccggcggaattcggcgccaaggtgttcaagatcacgcgggacgcgcagggtgcccggctgacccacatgaagatcaccggcggtgcactgcacaccaaggaactgctcaccggccgggagggggacacggtctggcaggaaaaggcggatcagctccggctctactccgggtcgaaattccaccccgtggacacggcggaggccggggccgtagtggcggtgacgggcctgagtcacaccttccccggacaggggttggggatcgagccggactggtccggggcggtcttgcagccggtcctgacctaccgggtggaactgacggacggcacagacccccacacggcgctgcaaaagctgcggcagttagaggaggaagacccccaacttcacatcgtttggaataacggggagatccacgctcagctcatgggcgaggtgcagatggaggtgttgcagcggcttgtccgggagcggatgggcatggagatcagctttggcgcaggggctgtctgctaccgggagaccatcgccaacgccgtggagggcatcggccactttgaacccttgcggcactatgccgaggtgcatctgctgctggaacccggcgagccgggcagcggcattaccctcgcctccgtgtgccccacggacaagttggatctgaactggcagcggctgatctttacacatctgttggaaaaacctcatttgggggtgctgaccggctcacccatcaccgatatcaaaatcaccttgttggcgggccgcgcccacgaaaagcacaccgagggcggcgattttcgacaggccacctaccgggccgtgcggcacggactgatgcaggcggaaagcgtgctgctggagccgtggtaccggttccggctggaggtccccgcccagcaggtaggccgggccatgacggacttgcagcagatgggcggcaaggtggatccgccggagactgtgggagaggaaacggccctcaccggcacggccccggtggcgggccttcgggattatgcccgggaggtggcggtctacacccgtggacaggggcggttgtcctgcgtcccggcggggtatttcccctgcgcggaggcggaagccgtcatcgaggccatggggtacgacccggaacgggacgtggaaaacacggcggattccgtgttctgctcccacggggccggtgtggtgatcccgtggcgggaggtggcccagcacgcccaggtggacagcggctggcgcccgcaggggacggagcctgaaccgaaggaagcgcccccccagcggcggcccgtcagcacctacgccgggaccgcagcccaggataaggaattgcaggccatcttcgagcggacctacggcgcggtgaagcgggagagttttcttccacccaaggctcctaagcggcctgtggccgatcattcggaggaaaaacggcgagaattgaaacaggccttctccggcgaggattatctgctggtagacgggtataatatcattttcgcgtgggacgagctgaaaaagctggcggcggaacatctggacgccgcccggaaaaagctgtgcgacctcctgtgcaactatcagggctaccggaaatgccgggtcatcctggtgtttgacgcctacaaggtgaagggcggtctgggcagcgtagaaaagtaccacaacatcaccattgtctataccaaggaggcggagacggcggacgcctatatcgagcgggcgacctacgagatcgggcggcagcaccgggtccgggtggccacctccgacgggccggagcagatcatcattctgggccacggggcgctgcgattgtcggcctccgctttccacgaggaaatgatggaggtccagaagcagatcggagataccgtgtggcagaataaccggaagaatgccaacagcggcgcggtgcgggcggcgctgaaaaaggcgaaggagggcggcggatgctgacactgtttaccgcggcggcggttttggccgcctgcgcctgtctacggcagcttttgaaccgcccggagcggaaggacgcatttttctggggaggacgcatccgattgacggccctgtggaatgacggcgcggccttcagcctgcctctgaaacggaagctggtaacggcgctgtccattctgattttgccgctggtgtgggtgttccgccgccgcagtcccataggagcgggactggccttgggcggtggtctcagcaacctgtgggagcggctgcggcgcggcgcggtctatgactatgtgcagtttcccaagctgccgaagatcggccgctatgtatggaatctggcggatctcgctattttgatcggcggattgctgctggccctgctggaacggaaaaaatgagcaacgctgcccggaggatattcctccgggcagcgtcagcgtgtcgaaaaagtcttttcgccccgctgagcaagttttcagaactttataaaagttctgaaaactcaggatttcaatggcgcaggacacccttcttgggtttcccgcgcacacccttccttaccatcactgagaattaaccactttatcgacagtcttcagcgttattttgggcagtgaaattttttggaaacggcggggcaggtggtcaggacttggccggggcggaaagctccgtcaggggggcgaagcggtagcccatgtcctcccatttcgtcagcagatcgtccaagatggcggcattggtggaggaggtggagtgcagcagcacgatggctccgttgtggatgcggggcagcagcttggcgtaggcctgctccgctgtgggctggttgtcggcataccaatccacgtaggcaaggctccagaacactgtctggtagcccagttcctgagccagtttcaggttttgctcactgtatttcccctgcgggggccggtagaagtgggacaattcctgcccggtgatctcctgatacagcgccgccagagaatccagctccttttggaagctggccttgtcggaaatggcggacatatccgggtggtgataggtgtggttgcctacgatgtgtccctccgtcgccatccggcggacgatgtccggggcggattcgatcatgtggcccaccacgaagaaggccgccggagcactatgctttttcagcgcatccaaaatggcctcggtgttgccgttttcgtagccgcagtcaaaggtgagataaatgaccttttggctggtgtctcccacataccaggcgtcatactgggtgagaaagtccgctgtggcattgccgatgggggtttcgtgctccgcagggaaggacagtccccagttatcggcggaggcggggatggcggcattgctggacgtggacagggcggcgggggagccgcggccaaggatccccatcagcgtcagacagggcagaagcagcagacagaaaatttgcagacgtttgcgcatggcgttcctcctgagaatggattttcattagtctgcccggagggaaaccccttcatacccggttgcgaaacccggcgaaagctgttatgatgtggcagtgaaaatttcgcaggacccaaaggagaaacaaaatggcaaagaaacggcgtacctctcgaaaacccggccggaaggaggcattggcagtcatcatcctggcgatgctcgtcggtctggcccgacaaatgctggcccctagctatgatctatcgaatatcccggactatgacggcaccagcgcttacgccgtcatcgaccggaatcagccttcctttacggaggaggaatacaccaccgattcctatgagtattacagcgagctggacagactgggccgctgcggcgtcgcggaggcctgcgtcggcgtggatctgatgcccacggaggagcgggagagcatcagcaaggtgaagcccaccggctgggtgcagcaccaatatgattttgtggacggcgggagtctctataatcgctgtcacctcatcggctttcagcttaccggtgaaaacgccaacgaaaaaaatctcgttaccggcacccggtacatgaacgtggaggggatgctgccctttgaaaatcaggtggcggactatgtggcctccaccgggaatcatgtgctctaccgggtgacccccgcctttgtggataccgaattggtggcccggggcgtggagatggaggcatattccgtggaagatcagggccggggcgtctgctttcatgtctactgctacaacgtgcagcccggtgtggagatcgactatgccaccggggagaattgggaggcataatggaactttggaagaattttgaccggctggtggtgttcgatacggaaactaccggaattgagttcggccgggaccggatcattgagatcggcgctgtggcgctggaaaacggcgcggagcgggggaatttcaatgcccttgtccgccttccggcaggacagatgctgccgaccttcattacggagcttaccggcattacggacgagcagttggaccgggaaggcgtggatgaccgtgcggcggcggagggcttctgccgattgttagagggggcagagcatcctctgctggtggcctacaatgcccagttcgacctgaatttcctctactatttgctgaaacccttggggttggtgtccgttttgcgaaaaccccggtttctggacgctttgacagtgtaccgggaccggcgggactatccccacaagctgtgcaacgccatcgaagcctatggtctgacggaggcggaaaacagccaccgggcagtggatgacgcccgggccactgttctgctcttggaggccatggcggcggagaaggacgatctgatgcggtatatcgacttgttcggcacccatcccaagtacggcatgagcgggaaaaagattgcctccgtgacctactgcccccagccctacgaccggcgggtgccgctgtatgagctgactcatacaatgtgaaaagtttgtgaacatttgaaggaaatacttgcaatatgacaacctgtcgggtatcatacccgacaggttgtcatattaggaagagt

SEQ ID NO: 12157 - DNA, 535 bp, Unknown
  gut microbiota DNA sequence
ttctgcattgcaggctcttattctaccaacaaccgcatctatgatatttatatcattttgattttcggcatcgtttcttacttcctgcggcgcatgggcttccaactggtgcctgttctgctgggcatcgtgcttggacctctggctgaaaagaacttccgccgtgccatggtcatttctgaaggcagcttcagcattttcttcacgcgtccgatcagctgcgcgttcattttgatcgcgattgtgtccgtggcaatttttggcatccggaactacaagtccagaaagctggcaaagcagaatactgctgaaacttccgggacaaaataatcgaacggaaaacgtctccgctcagtttggaaacgaaaactctctgctttggggagtgcgctgactggaaatgacttgacagacgaacttaagacaacataaaaacataagtgtaaaatctaaccacgtataaaaggccgccatctcaaagccgttcactcaatgagatggcggtcttctatttttgtggcatatagcattctac

SEQ ID NO: 12158 - DNA, 46659 bp, Unknown
  gut microbiota DNA sequence
tgccagcttcagggcagaggaaatgatttgatggatgttgcgtactgttttggcgctcagtcccttgggctgcttctgtgcttcgattcgctctacccgcccttccgccaacaatttcttgtagaactgttgcagatgcagcgtcgtcagatcattcaacgggatcttatgtgcgggatctgctctatgatgccttgcgcgatgcggactcctccgtagaagcctttgaagagagcgtttcgtctgagaatatctaccagcgctgcgggatcaccagaacggccaatccaaggggccgtccgccgaagaaaaaggcgggtgagcaatcatgaccaacgagcaactgattcgccaatattatgacggcgatgaggccgcgctggaaaagctgtaccataaaaacatcggtctgatccgcggcatcgccaaggaaaacgcggcggagttcaactgcctgataacggactcacatcatccgaatcagtattccgcgtatacgaaaacgattctggacgatctctgcggcgagggcgcgttggagtttctggcacggattcagagcagagaatatgaccagaactgcgccgcgctcaccacctatctttacccgcatttgaaggggcgcatgacccgctggctggaacagaatattggctgcatggcgttgagcagggatgagatggctgccgtccggcaggcgcagaggctgtatcatgttgcatggaaggataccggcgaaatcgcggaggagctgggtatccccgaggctcgcgtcagccggtatgttcgctacaacacccatttcctcggtgtgcatgaccttgtcccggagggctatgacggcgatccctatgagcggctgatgccggggttgctctccgcttcggcggagcaagccgtgtaccgcaaggtctgcattgagctcctccgggagctgttcgacgccctgccgaagaaggacagggacattctcggcaagacctgcggcgtgttcggatacccggaggcaactttgaaagagatcgggatgtatcacatgatgaaggagtccgccgtggagaaggcgaagaaccgcgcggtagagaagctgagagaatcctatcccggcagcaggcttcaggtatggaggactgttcatcgtatgatgcggagaccgatcccgccgccgggggatgacagtgagctgcggcgcaattttccgcagtacgttcgcgccttggcggagggctatggcgtgctgaacaagctatgatctgacaacatcgtcaatattgagcttcatcaaattctgcaaaacctttacaaaacctgcatagacaggctgcgaaaaccgtgctatactatgtgccaaaatcagaagcggtatttggaagaaggtgtgcacggtgatagaacccatactccatctgaaacgtcatttgacttcttttcaaatcatgatcctcggctttgcgggtgtgatcctgttgggagcgctggtgctgatgctgcctatcgccacagtacagcgggtctggacgccgtttcatgaggcactgttcacctccacctccgctgtctgcgtgacgggactggtggtgcaggataccggcagctactggtctgccttcggccagacggtgattttgctgctgatccagatcggcgggttaggcgtgatcaccggtgcggtgacgttcctgatgctcgccgggcggaacatcacgctcaaggagcgcagcgccatgcaggacgccatctccgctcccgcggtgggcggcatcgtgcgcctgacgcggtttatcctgagaggaaccctgattgtcgagctgctgggcgcgttggcgctgctgccggtgttctgccgggactataggctgcggggcgtatggctgtccgtttttcattccgtttccgccttctgcaacgcgggcttcgatattctgggacggacggattccccttacccctcgctgacgacctatgccgccgacccgctggtcaacatcgttatcatgctgctgatcatcgtaggcggcatcggctttctaacgtgggacgatatctgtacgcacggtctgcacctgcggcgttaccggatgcagagcaaggtcattctcagcgcgacggcgcttttgatcacgattccggcgtttctcttttatctgacagactttgcggatctccccgtgggagagcgggctttggcctcgctctttcaggcggtcacaccgcggacggcaggctacaacacggttgatttaacgaaaatgagcgatacctcgcaggcggtcacgatcctgctgatgctcaccggcggcgcgcccggttccacagcaggcggcatgaaggtcacaacactggcggtgctcattgccaacgccgcggcagccttccacaggagagaggactcgcggctctttgaccgcagattggactattctgccgtccgcaatgccgccgcgatcttactgctgtacctgtccttgacgtttgttggcgcggcggtcatcagcgaggtcgagggcctgccgctgggcgcttgcctctatgagactgcctccgccgcgggcacggtgggactgacgctgggactgacgccgcagctcgggacgctgtcgcagagcattctcattctgctgatgttttttgggcgcgtcgggggactgaccttgatctacgccgcgtttttcgggcatgacctgacctatgcccggtatccgaaggaaatgatcaccgtaggctgaaaggagcgcacgatgaaatctgtattgttgatcggacttggccgcttcgggcggcatcttgccatgcagctgaatgagcttggccatcaggtgatggcggtggacaaggacgaggagcgcgtcaatgaatgtatgccctttgtaaccaacgcgcagatcggtgacagcacccgcgtggactttctgcgctcactgggcgtgagcaactatgacgtctgctatgtcaccatcagcggggatttccagaattcactggaaaccacgtcgctgctcaaggaactgggggcaaactatgtggtatcccgcgcggagcgggacgtgcaggcaaagtttctgctgcgaaacggcgcggacgcggtggcgtacccggaaaaacagctggcgaagtgggcggccatccgctataccgccaaccatattttcagctacattgagctggacgaacagcacgccatcattgaagtcgccgtaccggaggactggcagggccgcagcatcggcgagttggacatccgcagaaaatatggtgtcaacatcctcggcgtaaagcggaacggcaaaaccgatgtgaacatctcaccggaaatcatattggacggaagtttgactctgctggtgctgggagaaaacaaagcgctgaaaaaacaatttcgcctctgaacccgctgattcacgctgaaaagaacgatcagaagaaagggacacacgcacaatggcgtgtgtcccatttttacgtcatggctcgctgggccgcgcagtcctgatcaattattgcgcggcttccatggcggtgatgaccggcggtttctcttcattttcaagggttccggtataagtgatcaccacatcatcaccctcgctgaagccttcgacagaaaagttttcgccaaaatccatgacctgatattccccatcgtccgtgatgagcaccaggtagtccgtatccagtcgattgatcgtgcctgtgacggattctttctgctggcttccttccgcagcactgccagacgcgccgcaggcagccagaagcagaactgtgctcagggccagagccagcaaaacccaatgggatgttttacgtttcatatcaatactccttttcgcttgtattccgccatcgtttcgtaacagaggaggacattattttccgtgcactcctcgatcagacattcgccggagagggtatcacaaatctgcgttgcttctgtatattccacatggatctggatcaagcatccacttgttccgtcggacggcagatgtgttcttcttcctcccgctcgaaggagtagaacccatctgcctccaattctttcgccatgccccacgccagcttgaagccggccgtgaagcgcatcagcttggattcagccagcaatgcgttctgcgcgtccagcagacgcaacagccttctgtgccccgcggcgtccatgtcccgtcgcagttccttctgggcgcgttcgacctgctcggccagctctggataccaccttgaaacaggaaagcggatcatcaaaaatgtgctgggtaagacacaggcggaatgcaaggcgaagctaaagaaagccattgaggaaagcaaagcattggacatcagccgcgcaaatgaatatacggttgccacatggctgcggacgtggtttgaattatatgccaaaccgcacattcgcccatccaccatgaactactaccaccgaaacatcgaacagcatgttgccccggctatcggagacattcctctgaacaagcttactacccgtgacctgcaaaagctctacaatgacctgcaaagcaacggcaggttgcggaaagttcagaaaaagaaaaaacccgggctgagcaattccactgtgcgcggcatccacatgatgctgcacaatgccttggacagagcggtgaaagaaaaactcatcctcagcaatcccacggagaactgcatcatccccaaaattgaaaaacaagagatgaagatccttcatccagaccacatcagcgcataccttgacgccgccgagcagcgcggcgcgctccccatgttttatctggaactggtcagtggattgcgaaaaggtgaactggtggcgctccaatggagcgaccttgacgaagccagctgcaccatctccgtcagtaagcaggccagctgggacacagagggaaacctcattctgagccaacccaaaaccgggaattccatccgagaggtgtccattccgcaggatgccgtggagctattgaagcaggaacacgccaagcacccggacaatccgtggatgttcccgtccagcagaacaggagaaatgtaccacccagactcggtggtaaaccttcataagaaaatcctcaaggacgcgggactggaacatatccgctttcatgatctccgacataccttcgcaacgctggcactgcaaaatggcgtggacgtcaaaaccgtcagcagtatgctcggccactatgatgccggattcaccctccgcacctacacccacgccactcggcagatgcagcaaaaggctgcggagaaaatgggcagtttcatggcacagattcgataagacccacaggcaagcagatcaccggaaaggaaacggtttcctctccggtgatctttgaatctttctgcgcatttcgttgtgtgggtcacggtgtgggtcaagccggcgtttccagacggtaatttttgaaaagcgtcggagaaaaatgccttcggcgtgaggtgtaaccgcaatttgtgtgggtcaaaacttttcttaaaagttatgaaaacagcggaaatcattcgatttccgctgttttttggagctaatgatgtgactcgaacacacgacctgctgattacgaatcagctgctctaccgactgagctacattagcatattcacttttggagtcgcagacctgattcttacgaatcagctgctctacgccagcatggggaacgatgagataatttaagcagaaaatatgataccatacttttaccggagcgtcaacacattttcacaggaaaacgaactttttctactgtcgaacggggataatacgaattgtatattatggattttccggagcttctgaaaaatgggcgatttgccatctttacaaacgccggattcgcgttccgcatgtaactttctgtaaaaagttcataatttgacaaaaaccgcagccagcgtccggtttcgccgggaagcgttagtgtttacataaaaatgacaataattttcatctacaaggagttattcacattttccacagagttatcaacatcgtttttctttagtattatcaacgtattcagacaaatatctccaaatatccgcaaaaccgcaaaccctattttcaaccaaatgaaaaagcaaaaatcactttacataaccgttctgtatttacccttttctacgtacgcgcaaggctttctcccttgacagcggtcgattttagctaaaaaaacgggaccagacttccgtccggtcccgcctgttcaaattacatagtcacttgtccgcggctcgcgcatcaagtccgccagcgtgacaccggaaaagtattcccggctcagcttataatagccgtcccacactgacagggtacggcagtccgcagcccgtgcgcagggggccgcgccactttgcaggcaggctaccggagccagatctccttccgccagccgtagaatttcccacagggtatactggtccggctcccgggtcagccggtaaccgccgccgattccgtggacgctgtccaccagaccggccgccttcagggccggcatcagccgctcgatatatttcagagaaatgttttggcgggcagcaacatccttcatgggaatgtagcttccgttgcggtgttcggccaagtccagcaggatccggatagaataccgcccctttgttgagatcatagtatatcctccttgctccgtattttcgtctttattataccaccagttttgtaggtaaatcaaccgctatttctacagaattcaaaaaacgttgatatcccgttgattttcagaaatcatcgtgctatgatggggccgaaaaaagacggcgcgtgtccgcggcgcacccaacagaaaggaagtaaacgattttgttggattttttagagcaggagcaaatcagtaaggagttgttggagggcatccggaaataccggaacgcctatcccacccctccggagctgcaaaaccggatccccaagccccgctaccattactacggaaaggaggtctgggaagcctctattgccgccctcctgtgcggggaaaatctgctgctggccggcagcaaggctacgggtaaaaatgtgttggcggaaaatctggcccaagtctttgcacggccaagctgggatgtatcctttcatgtgaacatggacgccgccagtctcatcggcatggatacctttgaaaacgggcaggtgaccttccgtcccggcccggtgtacctctgtgcgcagcatggcggcttcgggatcttggacgagatcaacatggcgaaaaacgaggcactggctgtgctccacgccacgctggacttccgccgcgccattgatgtacccggttatgatcgggtggaggtggatccagccgcccgcttcattggcactatgaactacggctacgccggaacacgagagctgaacgaggccctgaccagccggttcgcggtgatccagatgcccgccattgacggggacggtctggaccggcttttgggagaggaattccccacgctggagaagaaataccggggacagttcgtgcagcttttcctcgacctgcaaaaaaagtgtgaaagcgccgagatctcctctaaggcgctggatctccggggtatgctggacgctctgcggctgatccgccgggggatcagcgccggaacggcgctggacatgggtatcaccaataaggcttttgacagctacgagcagggtctcatccgggatgttattgccgcccggatcccgtcgaagctggaccgcagccgactgtttaccgactgatatggaaacctccggttacagcgcccgccagcggcgggccatcaatcaggtgtggactgcctgcgggaattacaaatttgaaccgcagtttctggccatgcagtctgacggccagcctgatctttatatgaactgcgtcattgggttggtccacaaatggtttggggatgagcttcccaagcagttgttcgccgcttgggcgggggacgcacggcagaccgtgtacgatgaccttgcgtggctggctctggaaaacgccgtttatgagaaggaattaccgaagcgtcccgctttagcagcactgcggcaggcccatgcttccgcgttttttgaatcagaatatcagctttcccggcaggagtggatggagaaaaaccagctggtgtacgccatacagtccgccagatggaaaaccgtgcttgggcagaggctgcctgtgctgaccccttgggaaaagggactgtcggaggctcttgcctgtcccggtaccatgagtggagaggaggtagcggcggcgatccggactgccttccaaaaatatctccgctttgacggcaccgcccacgccaaaacgccccttaccctccatttcggagagcggtgggcgccgctgctgacgaagctgttcaccacggagatggtccgcaccgacgatctggccatcggccgatctgcggcggtgggagaaaacggcatggtgcgggcgaccaatgccctgcgcgcccatttacgttccaatgagcgggaaaccgaggatcgggactatgtggaacgctgcttcggccgcagtctgtacgctcccaaggaattggcgctgatggagcagcgggactgcaccggaaaccatctgggctgccacctctggttcacccgtggggagccgtcgcccgacaaaccggtcagcgccgatgcccagcggctttttcaacaggcagaggagcaggccaagcgaaaccgggccgcttacgtcaaaaacagcgacctctatcaaagcgccctcctgcggctgacggagcagatccgcaactgtatgctgatccaccagcagccggacgccgtctccgcccgacagggccatctggacagccggcgggtctggcggctgccagtgctgggagacgataaggtgtttttacgcagcgatgaagaaagcacccccggctttacggtggacctgctgttggacggctctgcctcccggcttcactgtcaagagactatcgccgcccaagggtatattctggcgaaaagccttgcggactgcggcattcccgtccgcgtcagcagcttttgcagtctccggggctatacggtgctgcgggtgctgaaggatttcggtgagaaaaacggagaacggaagatttttgactacttcgccgccggctggaaccgggacggactggcgctgcggatggcagcggagctgctgaataccgccccggcagacaagcacctgctgatcctgttgacggatgccagccccgacgacagccacaagatcctccctaccggcaaggtccccctcagccaggactatgacagtcaggtaggtgtagaggacacggcggacgaggttcgggccttgcggcggaagggtatccgggtggccgccgtctttatgggggagaacgccaatgtccccaacgcccataccatctacgggcaagatctggctcccattcaccggatggaccagctttccgctacggcgggacggctgatccaaacggagatccgggagctgtccggctgaataaacaaacaaacacgccataccgggaggtatggcgtgtttgtttgattcttttgtgccaatatttcgtattacttcatggtcaccacggtgacgccgttttccccctcgccgtagacgcccagacggaaagacttcacgtttttattccgccgcaggatatcatgcaccgcattccgcagtgcgccggtgcccttgccgtggatgatggtgacggtttccaaatggcccatgacggcggtggagaggaaggtctccaccacgctctccgcctccagcgtctccatgccacggatgtccagttcccggctggcagcagtgcggagaccggtcacagcggtccaggtgggcttgggggcttttttcttcatggcggcccgctcatcgtcctcaatgagccgtacttcgtcggccttggccttcattttcaaaataccggcctttagctgcaaggtgccgtcgctgcccacgcccaccacctctgccggtgtggaaacaccagggatctccaccagatcccccttctgaatgggacggctgggtttggggatcggctcggagcgggcatcccgcttgtcgatggcgtcctccgcctcgttcagctggcggcgcagttcggctctggcttcattggcgttgatggcccggtctgccttggcctgctccttccgcatccgttccagttcggcaaacactgcgtcggaggcggagcgggcgtcccgcaggatgcgcttggcttcggcctcgccccggctgcgggcattttccttggcccgctgcatctgttcccggaattcccgggctttccgggcgtcctcctcccgctggcggtacagccggtcagtctcctgctctcgcttttccaacgcctgccgcttggcctccagttgggtcagcacgtcctcaaaccgaacgctgtccttgctcatctgcgattgggcgttggtgataacttcatcgggcaggcccagccgccgagagatggcaaaggcattggacttgccggggatgccgatcagcagtcgataagtagggctgagggtctccacattgaactcgcaggaggcgttctccactcccggcgtggtcatggcaaaggttttcagctctgcgtagtgggtggtggcggcagctctggcccccagtgcccggacgtgctgaatgatggcaatggccagcgccgcaccctccaccgggtcggtaccggctcccagctcgtcgaacaggatcagactatcccggtccgcctcctgtaaaatctctacaatggttttcatgtgggcggagaatgtggacaagctctgctcgatactttgctcgtcaccgatgtcggccagcacccgttcgtaaacggacacctcgctgcggtccccggcggggatgtgcaggccacattgggtcatcagggtcagcagacccagtgtttttaaggaaacggtcttaccgccggtgttggggccagtgatgaccagggtatcaaacgcgccgcccagttcaatatcaatgggtaccgccgtttttttgtccagcagaggatgccgcgccttccgcagacggatcaagccgtcccgccgcacctgggggcgaatggcgtccatcttatagctcaattcgccacgggcgaagatcagatccagctgcaccagcgcgtcatgatcccactgaatgtcccgccggtgggcggcggcatcggcggacagctccgctaaaatgcggtcgatctccgcctgttccttggcctgtaattccgcgtattcgttgttggcctgcaccactcccatcggctctacgaataccgtagcgccggtggaggaaacatcgtggatcagtcccggcagattgcccttctgatccgcccttacggggaccacaaagcgcccatcccgctgggtgatgatgttgtcctgtaagaccttggaatagctgggggaagagatgatcttctgcaaaatctgtcggctttttgccagcgccgcccgcatgtgacggcgaatgtccgccagctccgggctggcggcgtcggccacggtgttctcgtcgctgatgcaccgccggatcttatcctccaagaaccggttgccgtggatggacagaaaaatctggtcgagagcggtaggctctgccgcgtcggcattgaaatactccttggcccggcgggcagcatacagcagatcgccgatccggatcagctccgggatgttgaggctgccgccccggtccgcccggtccagcaggtcctttaccggcttgacgccggaaaaacccggcgccccccgcaggacgatcatggcccgtgcgccgtcggtctgatccagcagacgcagcacgtcctcataatctgtttccggccgaaccgccagcgccagttctttggcctccggactgaccgcctgctcagacagtagttggagaacccgcggcagctccaaggtgcggatggatttatcaaataattcgctcataatcgctccttaccgtataaaaggcacggtatcatacaaaatgtaatcaatcaggatggctcattcatgcaccggacactcttatagaagtccagcgtccggaatccccgctccaactgggcggagacaaaggcttcggcggcagcggacagccgcttttgggcctccggtcccagtgtgaaggaataaagccgcttggggtcgccgtaaacgatgtgccgcagggcggccagtgaatcccgacacagtggaagaccccggcgcccctctccgcaggtcccgcagcggagaacgccctgcaaaacgtcgaaatacggctgctggggatcggggcaaccgcagtaggcgcaggcgtccgccagaggctcgtagcccgccagacacagcagcttgatctcaaacgccgctttcaccagcggcaaaggctttcgcagaacggaaacggcgtacagcccgttgagcaggtggctcaaaagcccctgatggggtgcgtcctctgtggtgacggcctccgtcagctccgccagataaaaccccagcgccatcgcgtccagatccgcccgcaagccgttgaacagttccagagtggccccctcgttggcgtagtaccagtcgccctttttgtaaagcgtccactcggagtaggccaacggctgggcgcaggcggcgaatttgcaccccttgcggcagacgccccgggcgatgacagagagcttgccccgctccgctgtcaggagggttaggatcttatcggcgtcccttgtctccgtctcccggaggactacgccctttgtcacaatgtacggcgacgacgccatcaattcaccacctatgtacggaggccccgcctccgaaagaaaatcagcgtccggcagacccggcgcggtaaagcagataggccaacggatctccggtatccgaaaacaacgtccaaagcgaaggttctttcatcgtacagccctccctgatggatagtctgtgtcgaaaagtcccgcttatagctggaaaatgcttcgtacagacccaattatagcaaccggacagctttttttcaagcggaggttgctgcatgcgctcctccgcttcatccgtgccgaaactgccgcaaggcatggcacgaatgaaaaacagccgcaagccatcagaacatggcttgcggctgtttgcgcctattacttgctttgttgtcaaaaagcgaattacttcagtgcctcataggcggtcagagcttcccggatcgccgccttgtcgctgtccgtcacggagcaagggtgcgatcccacagggagccacctgttcctttagcggcgttcccaaaagagtgttcccgctttctgagagttttcgaatggcagccccgccaaagcggtatttactgcccgacctgtgcgttatactgcgcggcaaagttggaggcaggagcgccgaacagatagctgttgaccgttctatcagctttttcgagacggaacataacatttccctctccctttaacgcagtcagcacctcatcggtgtaagcctcatcgacgaaaactctgtcatcgccgcaatacatagtacctgttatcttgtggtctgcaccatcgggcgttctcatggtgatgttatattcatcccaatagcgctcagagctgtttttgacctgtctgctgccatattcatagaggaatatcataacattatcgtccagatccaccattacattcgcatacaattttgaatttgttgttgcgctgttgctaaaagtacttacgagatattcgtcttccgtaatataccattcatctgttggctgattgaagtcatccacagaatagtcgatgcgccaatcgccgaatgactgtccgcatctttcgcaggtaccgctttcggtcgtgtggcccagagcgggaacggtttcctgtgccaccagaacctcgccgcactcggagcagcgcttgccctctgtcagcccggtcttcgtgcaggtgggctccactgccggcataacttcctccacatgggtatgcttgtcggtgcttccgctgttggtatttccgctgttggtatttccgccattggtatttccggcgttcccgcctccgcaagccaccagaggcagcgtcattgccaccgcaagcaaaattgttgtcaactttttcatcttctgtctccctttcgttgtctttatatttgcagtgcgttttccgcacaggcaaatccttcccagcgcccggtcaaaacaaggttttttcctgctccgcaaacagcttgtcattgatctcccccaggggcagctgatggaccacgccatagctgataatggcgtcccgtctggtgcggggatacagttgggcgtagcccccctgcgtcagcatccgctgggtctcatccagcgtgatgccaagaccgacgcagatgcacagcagccgatccctggaaggattccgccgccccgcaaacacctgatgcagatagacctcgctgatgccggaccggagggccagctccgctttggtcagatccttcgtttcgtaaagttgcgtcagccccgccaagcggtataaaaacgttcttcgtctgatggaggcattttaaagatgaaagagtccaaaatcacctcggaaaagcaaaatctctgcccgctttgcagagttcccctcccggatggcgcatccttctgtccccactgcgcccgcagtatcaagccctggacacagcaaaaggcccccaagccactgcaaaagaagttcctgcacattgccgcactggtgacagcgctggccgtgatcgccagctgcacctgacaagctgtactgtttccggctggaaaaccggcgtgctggcctacggcaccacctgggtcaacgccatggactgccgcttcgaggacaatcaggtgggattccgcttcaacgccgagggtaccgtcatcacccacacccagtatgcgaacaacgagttcttccacaacggcaccgccgttctgctgaagagcgtacccgccgaaagccccctgtccttccccggcagcgtgttcgaggacaacgataccgacattgacaaccgctgcggacgggaagtgaacatttcgcagacgaccttccgctgacagctatttgaaaagaggacccatccgtattggatgggtcctcttttgcgcgacgggaatcgcctgtgcatactgccgctgatttctttgccgattcgatcttctgtcattatctcgtcccattcagcgtcagcttagctttctccattgtgatgacaagaatgggaatcaggatgatctgtacaaggatgccgggaagcgcattggtcactgcgcccgcaagaaaaagagagcggtcaaacacggtatgctgcaagcccgccatcataaactgtacaccgccccacaccaggcggcctacgatcatagcggcgatcaacgtgacatacacagaccaatttctgcgggggaaaatgcggtataagatcccggaaaccgcgccataggcggccagttcaaacgccatggccactgccgtataagccgtaggcatcccaaagagaagggaccgcagcagcggggaaacaaatcccaccgccagtccccacggccagccgcagacaaagccgcacagcaatgctggaatgtgcattgggcagagcatggatccgatctcagggatctgtcccgtcagaaacggcaggaccaatgcaatggcaagatacagcgccgagtaggtaagctttctgatctgcacagaagaacgtgcatcgttccgggtcataggcatgcagtatctcccatctccgtcagcagttggcgaatatgctccatcgcgtcatccatgatggcagaagatttctggctgacgcctgccacataggtgtcgcagagattcatggggatcagcacccggtaggccgcgctggcagcaacggcattggccattgccggagagatctctcccatcagcgcgtcggcaagggctatccccatagggccaacgatgatccgggcagtccggctggcaacaatgaccgggttttcaccggtcgccacccggtccgcaccggcacgcatcatgctctctgacgcggcgctgttggtcccgacggccatgacctccacctgcgggaaggattttttgatgctttccaccagccgttttccaagctttccgccctgaccgtcaatcacaagaatcgtcatatcaaaaccattcctttcatcccacataaataaatgtaccggacgcaggcgcgccgtatgcttcctgagtaagtgcacggagcgcctctcccccatctgtatcactgaacaggctcggatacatggccttggcaagcaaaaccgccgcgccggtccgtctggcctgaccggaaagcagctcctcggagagcaaaatgacccggccattccggacggcatccagcccggaccagccctcccgtgctttcaacgcaccgcaaaccgtttccgcctgtcgggtggacgacactccgctgccaaggacggagcgctccacgaccttgacgatcacaccgggatctttacgctggatccagccgtcatccacaatcagtgcgtcattttgcagctttgcggacacgtcatacgccccggcattcaagatgatctgatgctcgtcagatgatttatggacagtgtggtagtcctccgccgtctcccagtaaatatagaagcgctggcactcaaagagtccgctcaaacggtcctccagcagtgtttgatagtagagcagcgcagtttctgccgtttggccgctttcatccgcgccggtgttttctgcctggtcagcgggaacggtttccgttgcggtcagctcaccggtggtcgcatcctttgcgccggtagctcccccattggcatcatgctccggtgtttttccgccgtccccctgctgcgtgagggttttgtccgcaccgggaacgatctcagcgtctgcgtcctccgcatacgtctttcggtcggaatccgggtccgttgcggtcggggcatccgcatccggtctgacatcctcttctgccgcaggatcgtcttccgcgtcctcaatctgttcggcctgtcccagttggtcctccgccgcctcgccgttctcatcggggatcggatccacaggcacggtggtccgggtacggcaacccgtcagggtcagcagcagcaccacagtcaacaataaaagctttgcgtttttcattcttgcttcctctcaggcgtggagacactccacatacttcaagcgaaattttgttctccggtctgcattgtcatacagcagccgctccgtttcggttaaaagactttgcagttcggcccgctgttcctcccccatggcatgggtactgtatgcagactcctcaaaaagtgcagcggcatgacggaactgcgcggcgtattccggagaaacggtttgggccagcgcagcgtcccattgggagaaggggcgattcccaacgccttttccacagtgatccagataggcagtcagatgcagaaacatggcgcggatcgcttccccgcagtcaggggagttaaacgccgcccgccgttccattgccttgcgccgccgggcgtcaaacaggacgaacggtaggaagggcagcgtcagcagggccaaaatcaggatcgtcagcacggcgatttttagatagtcgatgcgcttgggacggctgatttcctgttcctgttcataaatatgctgatagtcctgcgtattctgcgtatctccggacgtctctccggcggtttccgtatccagccggttttcctcacgggcggtctggggcggttcctgctgcggcgtatagtctgcgtcggaaacaagctgttcggcagcatccagccgatcccgcacatgctcagaggcttcttccacccccatgcgaacaccaggagccaagagctgtaccgtcagaaaaacggccatgaccgccagcagaaataccagtctgccccgcagggtatccacaggcagggccaacagcgccagcagcgcaaaaatcagcacattgacagccgccggaggagtcagtccgaaccagatctccccgccggccagggccaacgccgccagaagcggaacgatcttgctgccgcgcaggtatgcaagcaggagaacaccggccgctgccgtcaccagcaggcctaatgccagaaccgggctggccgcgtccgaaacctcaaaataatcgtaggcataggcattaaccgcctcgctggccgcaaacaccagattgcacaagcacttcaggctttccctggcaggcttgagggccagaagcagcactgccgcaagcagcggcacaccggcaatggggagtgctgttttccacggttttgcccgcttgcttttttgaaaatcaaattgtaacccaaccgtttgatgtttcatgaacattccttaaatttcaagatattccaattcctgcgccatattcttccgtgaaaagggtacaactgtcaccccgccgcagctctgtgcaccgccgtcagacagcagcacggtcacacggttgccagcctgcagcagggaaaggccccagggcaaggacggcgcgcagacaacggtatgcgcatagacatccccggaccatttgcggaagcagtcgcagatgctttccgcatccggtgcggcagcggcagtcaaaatctgctcacgcaccgctgtacagtcctgctgatcctgtactgtgcacagagagagctcctctaattccctgtttttccagccaacagaatgggcgatcccctgttctgtcaaggatcgggacaaggacagcagcgctgtcatggccgcgtccagcgcatccgcggcatcttcccgtaccgtgatggaggtatccaacagcagcagaacctcctccgctaccggaagccccagttcccgcaccatcagggagtctgtcttttgggagagcttccagtggatctgccggatgggatcgccggggacgtatgtacggaatccgaaggtctcactgggatcgtgccccggatgggtggaagaccagcgctcgctgtccgccgtgaccgtttcattttccgcaagggtgatccgcacatcaaacagcggtggctcgacggtcactaagcgagtgctctgaaccgtcagggcacagcggtacaagccaaaccaatcctgcacagccgcgtcgctgagagaaagcatgaccgtaccgcaatgggcggtacgcagcgtacctgccgcgtcaggcgcaaaccgcgaggccgagaacttcaccgccgtttcctccccggtcaggcggctgcggccccgaagcactgccgtcagcaccgctccgggcagaaggccctctgcccgcacggagcattccgcggcatctccctgtttgcagcagtccggcgcagatagatgaaccgttacccgtctggctgaacgcaccgcgcagaggaccgacgcagccggcaggaaaaccgaagcggccaaaatcgtccgggtgccggtattgttctcaaagaaatacagcaaaatggcaaacagcagccatgcgccgtaagcaaatctccgtttccgcatcatgcctgtctgcggtccggaacttccaccgtttccagcagttcgttcagtacctgcgtaaccgttccgccggacagccgtgatttctggttaaggatcacacgatgggcgcagacatcatggaaaatcgcctgcacatcgccgcctgtcacataatcccggccctccagatacgcatgggccttggccatacggtcaaggaacagggtgccgcgggggctgatgcccacctccaccatgggatgctcccgggacgccatggccagacgggtaatatagtccagaatactgtcctttgctgtgacggcccgcacctccgcctgcatccgcagcacatcgtcacgggtgaccacctgcgccacggaaccaatgggatctgtgctctggcggtcccggaggatggacatctgggcctcataatcgggataaccgatggaaagccggacaaggaaccggtccatctgggcatagggcagcagttgggtgcctgcggttcctacattgttctgggtcgcgatcaccgcaaagggcttttgcagcggataagttgtgccgtccaccgtgacctgacgttcttccatcgcttccagcagggcggactgggttttgctggacgtccggttgatctcgtccccaagcagcaggttggtattgctcaccacgccgctcttgtactcaaagcagccgctgtccttgttgtaaatggaaacgcccacaatatcggacggcagcacatccggcgtgaactggatgcggttataggtcaggcccagtgtgcggctcagggccaccgccagcgttgttttgccgacgccggggatatcgtccagcagaacatgtccgtcggccaacagcgccatcaggatcttttctatgacctcacgcttgcccaccacggccttttccacttcaacaatgatcgtttgcaattcacggttcatacgataagtcctcattttctaccatcgcttgacaagggcagacacggttttgacgggcagaaatgtctgcacctgacagggatggattttcgagtgatttttattttttgagatgcaggtgggctggcgcccaccaaggtgaaaagagcaaaaagcgccgaaaagacgcgctgtcaggcgtgtttgcccttgtcgagcgatggtatggttttgattgccgtacaacacagcagtcccaagtggtccgctctgttctaaagcaataaggatgcccgcacatccgtcttgtgacggatgtgcaggtctcctgcggcttgtgcctcgtgatttactttgcgggaacggtcagcgtctgacccacatagatcatagatgcattcttgatctggggattggcagagaatatcttgctccacagcttgccgctgccgtagaccttagatgcgatcttccagagggagtcgccggacacaacggtgtaggttccattctctgtcgtggtcgcggactggccgggcttcgcagactcagccggcgccgcggtggccgttaccgtgatgcggccctgaggggcggcataggcgtcgcccaccacattccccagctcttcgctgatgtacatccacaccacatcccgcacaacggccttggtgatggcagacttctcgttagcctccgcagccgccttgaacatataagaggagtccatgccgttaaagtttgcgttgtgggtaatgaccgcataggtagcgttcggatcgaacgctttgccgtttacatcggtgatcgtcacacggctgacggaattcgccttgaaccagtacttgccgtaagcttctcccttgtcataggcccgatccgcgttgacgctgtaagtcaggcccgcagcctgcataaaggaagcgcaggcatcggcggatgcaccgccgtagggcagcgcctgagaggccgcctccagagcttccagcagttcagcgccgctcatgtagatcacagccaccttgttgggatagggcaggacggatgccagctccgccgcgccgaacttgccggcagcaatgtcggcgcgcagattgccgccattccagagggcaacaatgtgatcggcgtccacctccaccttggtgttgccggcggtcacatcgtcctcgtcaaaatacgcattgatcttgccggacacggcaaaccaccgcagcgcgtcggtccacagatcgcccaaattggtctccgccttacgggccgcgttgtccgcgccggacagcaccacgctgctgtaagcctccagcgtatcatccagttccaactcattgccgtgggcatccacgaacttggatgcggacacggacgtggccatcacgctgagtgcaagccccagcgtcagcacaaggctgataaatctgtttcgttttttcatagtttcctcccaaaataagttatgcaagcatttcccgcagcatcaaacaaaaaaaggcaccaataccctccttgggaggacactgataccttcgtaatatctgtattgcctgagcgtataaaaacatatgcggaaaatgtcagcttgtgccaactttgccagcttgtgctgacggaggaattttatcaaaaaagttttatgttgtcaatacgccatttgccatgctgcaatttccgaaagattccggttgcgcggggtggcaaaatccggtatgatagagaaaatacgaaaaggagagccgccatgatcgaagaaatgctggcatataaccgcgaattcgtccggtccaagggctacgaaaagttccagaccagtaagttccccgacaaaaaaatcgccatcctcacctgtatggacacccgtctggtggagctgctccccgcggcgctgggcatccgcaacggcgatgtgaagctgatcaaaaacgccggcggcatgatcaccggcccctttgacagtgccgtgcgcagtctgctggtgggcatcatcgagttgggcgtggaggaggtcatggtcatcggccacacggactgcggcgtagcccacatcaatgccgacatgatgatccgccacctcattcagcgaggcatctctcaggaccatattgatatgatgcgctactgcggcattgactttgaggcctggctccggggctttgactgcgtggagaactccgtggcggagaccgtggacctgctgcgcaaccatccccttatgcccgccgatgttaccatccgaggctacgtcatcaacaccgagaccggcgagttggccccgcaggagtaaaatccgcagcaggctccgatcccaactgggccgacggtgtatattttcggcctgaaactgtcgataaagtggtaaatcctccgtaccggtaaggaagggtgtgcgcgggaaacccaagaaggggaaacgggcgatgcgccgccagcggcggagaaagcgagcccgtttcgaggaaggccccgatttccgggcgcaaagcgcacggaaaccggctgggccgacggtgtattcctgccccgcgcgggggagaaaaggctttttcgacacgctgaggacagtgctttttaagcactgtcctctttcgccatgtcatttttttatcgtgcaaagaagcggaaagccgtccactgttgcagcgtctctcccttgcgcaggatcggcgacgggaacgctgggcagttcaccgcgttgggaaaatgctgcgtctccagacagacaccgtgggcctgaccgtagaccgcaccgtcctttcccttgcgctccgtcagccaacccgccgtgtagagctgcattccctccatcgaggtggtcatttccagaccgatgccggtggcggggcaccacagctccgccaccgggccttctccgccatccagcgcatagttgtggtcgtatccccgcccgccgttaaaggctttatcgtggagacggctcccaaatgccgcaggtgtccggagatccagcggcgttccctccaccggggccaccgtccccacagggatatttccgctgtccatgggcgtataccggctggcccgcagggtcagcacatggtcttccaccgtgccgctgctgtggccgcccaaattgaagtaggtatggttggtgagattcaccaccgtgctctgctccgccgccgccttgtaggcgatggtgaactgattgtcgatcaggcgataggtgacctccacccggacagcgccgggaaaaccctcctcaccgtcgggagaggtgtaggagaaggtgaccgcgttttcctcgcaggtaaattcccacagtttcttgtggaagccctcgtttccgccgtgaagacagttctccccctcgttggccgtaacacggtaccctctgccgtcgatggtgaaccgtgccccgccgatgcggttggcgcagcggccgatggtcccaccgaagcaggcatccagcgtccggtagctttccagttcgtcatatccaaggcagatgtccgtcagtttgccggttcggtccggcacgcggatagcccggacagccgcgccgtagggcagcagttccacggcacatttgtcactgaacaactcaatgacgggcacctctctgccattcagcatgccaaacggcttcagtcgatacatctcttatccctcatagccgttgggatggccgctgtgccacgcccacgcgtcggaaatgatctgatccagaccaagaacaggcttccagccaagaatctcggcggccttcttgttggaggcgatcaggacagagggatcgccgccccggcggggctccacaacggccttgatctccttgccggtgatccgacgggccgtttcgatgatctcccgcacggaataaccggcgccattgcccagattgaacacgtcactgctgccgccccgctccagatattccagtgccagcagatgagcctccgccaagtccttcacatggatgtagtcccgcacgcaggtgccgtccggcgtggggtagtcctcgccgaagatgccgatgtgatcccgctgacccaaggctgttttcatcaccaacgggatcaggtgggattcggggttgtgatcctcgccgatgcctgcctccgtgtcggagccagcggcgttgaagtagcgcagcgccacatagcggatgttgtaggcgcagtcgcaccacttcagcatattttcaatggccagtttcgtcgcgccgtagggattggtgggttccgtgcggtccccttcctcaataggctgcttctccggctcgccgtaggccgccgccgtggaggaaaatacgatcttgtccacgccgtgagcctgcatggccgacagcagggacaccgcgccctccacgttgttgccgtagtacttcagcgggttggtcacgctctcgcccaccagcgaaaatgccgcgaagttgatgacgccgtcgattttgttttccgtgaagatctgatgcaggaacgcgccgtcccgcagatcgcctacatacatcttccgcgcgcccttgacggcctgccagtgtccggtgcgcagattgtccgccaccacaacttcgtagccccgcttgaccagcagcgctaccatgtggctgccgatatagccggctccgccggccaccagaatggttttcatatacacgtcctccttattttttcacgtctatatccagcttacacgctctgaacaaatcttaagaaggcttccctgccctctggtgtacacttgtaaacgccggcgtgctccaaaaccgtggcgaacaccacgccgacttcccgccgcaggatctcctccgcgtttttctcggtaaacgtatagcgggctttcagctcctcggtccagtccgcgtgctttgccagcgtctcatcggcccgcaggtcctcgccacgggccagtgcccgggccacgccgttcaactcggctttcagccgggcgggaagcactgcaaggcccatgacctcgatgaggccgatgttctccttcttgatgtggtgcagctcctgatgggggtggtacacgcccagcgggtattccgccgtggtgatgttgttccgcagcaccagatccagttcaaacttcccgtcccgcatccgggcgatgggggtgatggtgttgtggggctcaccgtcggtctccgcgaacacaaaggccgcctcgtccgtatagctccgccatgcggtgaggatgcggtctgccagctccacaagacgctgatcgtctccgcagcggagccggatcacggacataggccacttgacgatgcccgcctccacatcctcaaagccccggaaggcgatgggccgctcaatgggggccttctccatggcaaaggtgtagcagccgccctggaaatggtcatggctcagaatggagccgcccacgatgggaagatctgcgttgctgcccacaaagtagtgggggaactgcttaacgaagtccagcagcttgcggaaggtagctttgtcgatcttcataggggtatgatgcccgttcagaacgatgcagtgctcgttatagtagacgtaggggctgtactggaggaaccagtcctcctgattgatggtaatggggatgatccggtggttctgccgggcgggatggttgagccgtcccgcgtagccctcgttctcccggcaaagctggcacttgggataactggcctgcggggccgccttcgccgccgcgatggccttggggtccttctccggtttggagaggttgatggtgatgtccagttccccatagggggtggccgtcttccacttcacatccttggcgatgcgatagcgccggatgtagtccgtatcctgactgaagcgataaaaccagtccgtggcgtccttcgggccagcttgataccgccgccggaactcgctgatgacctgagagggccggggcgtcagccgccccatcagctccgtgtcaaagagatcccggttcgtggtatcatcctcgatccgtccccgggccgccgcgtcatccagcagctccttcaggatgtcctctaaggggcgctcatgcgtttccgccggctcctcccatgcatccatccccatagccttcagcagctcgttcaccgcccaggggcggtcatattcctcgatcagtcccgtgcggagggcgtagcccaccagatccttgatggcttggtaactcatgcatctgttctccttatcccaatctgacgccgcccgccggccggatcatcaccacatggcagcagtcctgacccagcgccgcctccgtcgctttcttgaaggtgtccaacatatccagcggcacaaaggcctgggcggtaccaccgaagccaccgccgtggacacggacagcgccccgcccctccagaatacgctcgcacagggcgatggtcaccatcagttcctgcgccgccgtgcttccggtgggaatgacattctgcaaatacatggcggaggaccgaccagactcccgcaccaatgcaaggaacttgtcgaaatccccctgacggagcgcctctttttccgccagtgcccggcggttttccgcgtagacatggaacgcccggtttaccgcccggtcccctgccgctgctctgaccttgggcagttccgcaaggaacgcttcctccggcacctcacgcagcacctctttgtcaaaaacgcggcagaccgcccgcagctcgttggtgatggcgctgtattcattggtcagatcctcgtggcccgcgccggaatccagaatacacagggcgtagccgtaggcatggagatccacatccagctgctccaccgccgggtgggccgtattctcgaaatcaatagataccacgccgcccacggaggaggccatctgatccatcagaccacagggctttccgaagaacacattctccgcgtactggccgatctgggccagctccaccgccgtgcagcgcccctcccagaaaagctcattgagcatggtccccatcagcacctcataggcagcggaagaactcaaaccgctgcccttggggacggtggaggtcatgtacacatccagtccccgctcccgcagatcacagcccatggcgctcatgcaggacgctacgccccggatcagcgccgctgaggtattgatctcttcctccttcgggtcaagctcgcagagatccacctcgatcatgggatatccctgagacagcacccggatgatcccgctctgcgtaggcgccacggccgccagaatatccagatcaacagaagcggccagtacgcagcccttctgatgatcggtgtggtttcctccgatctctgtacggccgggtgcgctgaacagcgcctccgccggacggtcaaaggtcttataaaactcttccatgacctccatgcagcgggaatgggccttttctgccccctccgcgccatatagccgagtgagtgtttgatcaaatgcagcctgctgcacataggtctccagccctgtatatgtcatacctcgcgcctccttgctttcttcgtacatccaaccctctgcgggcttctattctatgtccgccgttcttatgaaacggcctgatcttctaagctctccgctgtgaccgcctcataccgcagccacacataccgctcatccgtcaattccagatcctgagaaggctctccatccacggatagggaaacggccagctccatcatgctctctgctaatccgacagcgtcattgcggacagtccccttcagcgttccctcccgcagtgcctccaaggctggcggcgtggcgtctacgcctacaatgaagggcatggagcgcttgtccaggccggcctccgcgcaggcgtcaatcgctcccaatgccatgtcgtcattattggcaaagactacctcgatgttctctccgaactcctgcagccattggcgcatactgacgctggcctgaccccgctgccagttggcagcatcgctggccagtttttccgcagagacgcctgcgtttgccagagtggagatgcagaactccgtccggagcagggcatcctgatgccccggctctccctccagcatcacatactggatcacgccgtcgccgttacggtccagcgtgtctctttgggtccgccatgcgtccagtaccagctcaccctgtaaaactccggcatctcccgctggaaggcccacatagtaggcgtgtttccagcggcgcagatcctcctccaccggttcccggttgaaaaagatcaccggcacccccgcagcctgtgccttgtcgacgatcaccgccgccgccgtgcgatccacgatgttgacgcagatcacgtcatatcccctttccaggaagcggtccacctgctcattctggctggtctggctctcttttccatcggtaatatataagttgattttgcagttctgcgcctgttctttctccagggctacccgctgcaattctctggtcacggtctcaataaatgtgtcctcctgctgatacagcgccacgccgatccggagcgttggctcagcttccccgcctgtatggcaggcagagagcgtcatcagcagagacagtgcggcgatcagacaaccgatccttttcatccgtcttctctccttcctgtctcaggtcacagggaacaacagcttctgattatcgctgctgtacatcgtttcctgccggacgatggaaaagcccacagaggagccccccgtccagctttcatgccgggccagctttgccgcagcctccactgccagatacccggcagagaacacgttgaccgccgcaatggccgtcacacgtcccttttccagcgcggcggcgataccggcggtggagccgcagccatagagcagcgggaaagcttcctctccccgtgacagctccgccatttccgtcagcgccgccgcttcaaaggcgatcacggccttcgggcgctcgatccgcaaaatattggcgaaggctgtactgtcggaggtccaccggcaaatgcgcacctgccggcccttttcttccaaaagtgccttagccgcttccatacgctcccgcacgccgttgtccccgggcaggctgtccagcagcagcaccgtgccgccgaagggcacaccgttcagcgccgctttcccaagcgcctcgccaagggcctgatgatccatactgatagaggcatcggctccccacgcagtcatatcgctctccaccgtcacaagggtcgtctttcctgcggcggcggataccgcctcgcccagcgcctcccggtccgccggtatcagcagaatggccggagccgctcccgacacctcatgttccagcaactgcacctgttcaacggcactgtcgtcctccgccggggtcaggaagcgcagctccacgttcagatccttggccgcctgctccatgccctttcgcatggcggaaacattgccgtctccatcccgcagaataacggacatttccaacagggctggctggtgatgcttatcaccgggagcgaaggccagcagccagaacagcacgctcaatccaatcaggggaagcaccagctgcaataatactttccggctcatcgctccccctccttccggtacttccgggcgtcctcttcctccaatacaggcaggcagatccgcaccaccgtcccgttatccggctcgctgcggatagtcaggccgtaagcggccccaaaggtcagctggatacgctggtgaacgttgcggaagccgataccggagccctttgccttcgggacactcacatcccttgtgggcttcaaaagctgctccacgatctcctccgacatacccggcccgttgtcctccacctcgatgaccaccgtttctccctcgcggaaggcccggatgtggatctcgccgtcaccgtcggcatactccatgccgtgatagatagcgttttccagaatcggctggatgatgagcttgatggtatacagcttctccacccccggctccacggaaatgtcggcagagaacttattcttatagcgcattttctggatggtcagatagttccgggcatgctcaatctcgtccccgatgggaatgatgttgctgcccttgctgagagagatccggaaaaaccgggccagcgccgtcagcatgaccacagcctcctgtgtccggccgttctccgtcatccacaccacgctgtccagcgtattgtacaggaaatggggattgatctgggattgcagcacgtccagctcgctgcggcgcttttcctcctcctgacggagaacatcctccatcaggtgccgcatggtggagatcatggattgcacggaatggctcagatgctccacctcataggggccgtccacattgaagtcaacggactccacgcccttttccagctctctcaccgcatgatccagctttttcataggtgcggtgatccactccgaaagccgcaggttcacgaacaccagcaggaagatggagaaggacactataaacagggcaaacagcaaaagctgactgtaattgtcccgcagcgtctccgccggcaccacgcccaccagcttccagccggtgtagcccaccgttttcaccgttacctgccggcgctgggactgaaagatctccgtatgcgtcccgtcggaatacccggcggccgtcaggttgttttcctcctgcaagcccgcatagagaagctgctgacgggggtggtagatgatctctccgtttccgtcgatcaggtagagataaccctgcccgtcgaaaaaggatacatccttgcagatctgctcaatgccgctgaagttcatatccaccagcagcacgccgctttggatcacgccgccccgggtcaactccacatggcggctgagggacaccacccaatgataccgcgcgtcgggatcctcaaacaggtgctgcacatggggcgtggaaaaatgcaggttttcaatgcgctccatggcggcggtgaaccacccctcacggctgggcgtcacgctgtttttcaattctgtcaggggcgtggcggagatcaactcgccgttcccatcaaacaccgccagagacaccagtacatcccggtccttggcgtacagcagcttcaaagcgtcgcgcagctcctgcgccgtgtcactctgctccagatccgcgctcttgatgacccggtagtacaccgtgtcggatacccgcatcatgttccgcagatagctgtccagattccagttcacctgtgccagcacacgctggctgctctccgccgccatctcgttggcggaggaggaaaagcgcagcagcagcgccatccccagaaacagcattccaatcacggccaccgccgtaaaggcgatggacaggatcaactgaatactggcatggtgataacgcgctttccacctcgctttaaagccggaagatttcttatccacgggtggctcctctctccgtccgtcacttaccctcgctgcggtacttcgtcggtgtcacaccgaaatgccgcttgaacacatagctgaaatagttggggtcctcatagccgcaccgctgggcgatgagatacgttttctcctctgtgccgcggatcgcttccgcagccgcctccatccgcaccgtggtaacataggctgtgaagctggtccccgtttcccgtttgaacagcgtggaaaaataggtggaacttaaatgcagatacgcgcacagcttttccaccgacaggtcgctctccgcgtaatgctgccggatatactccttggccgtttccaccgtctgtcccgccgaatccgtctggcggcggcggatcagcgtgcggagccgcagatagcgctccgcgcaccagtcctccaactcctccagactgggcagcgcggagtcctgaatgggtaaggaaaagcccgtgccgaaaacctcctccacgcccacgccggagcgccgggtcattttcatcaggtgcgtcaccagttccataaggaacaggttgtactgtccggcggaggggttcgcctcccggatcttgcccgccagagccgccgccgcgtcccggacctcctgttcgctgcccagcctcaccgccgcagtcaatgtgcgctcgtccgcttcctcgaaggtaagcacctgaccgccgtccggctccaggtctccgatgtagatgacctgtccccgccccaccatggaacggtattccagcgccgttctcgcttcagctgcggaccgcgccatcccggaaagctctttgcagggggcgcccacgcccaccgtcagcgtcaggcccagataggatgccgccaatgtacagacccggtccagaacacggatcagatcatagatggtaaatgattccgtcaggctgacgatcaccgctacccagtcattatacagggagagcttgcagcgatccgccgtcagggtctcctccagcaagttctggatggacagggtcgacagggcgtctctccggtcgctgccgatgtaggccagtcccaccgcccattcctcgccttgcaggtcgatgtccagatgcgccgcccgctcccgctccgttcccggctcaatgcggccgtccagcagattggcgtagaataattcccgcaggatgggcaggttttccatatagcggctgcggagaagttccacgttccgccgttccgcccgctcccggtccagctggtccttcagccgccgcagcacggcggacagttcatcggcgttgatgggcttcaaaatgtactccaccacgttcatctggatggcctgcttggcatactcaaaggcgtcaaagccggaaaagaccacgaaccgggccgccgggagccggtctgtcaaaatgcggcacagctccagcccatccataaacggcatcttgatatccgtcaggatcacgtcaggccgcaaactctccgccagttccaaagcgtcctgaccgttggcggcctcccccaccagagagaatcccagccccagccagtccattttccggctaataccctcgcggatatcctcctcgtcatctaccaacagcacccggtacagttccatggctccgaccttctttcttgtctacggcacctccgccgcccggtcctccggctttgccggatggaaaagcagcgatccgatagcagcctcttttgcggctattataccacgaagtgaagcgaagcgaaacggtatgtccatgtttttcgagttcaaggggtagtccgaacgtgaattgtctggattgcaggaagaacggcggtttttgccgccgtttcgccgcaaaaagttccagataaagcaaagatggctcgcaaaggcgggccatctttgtcgcagatcattttttcacaaggtatttccgcatatccagtgcgcaggcaaacaggatgatagcgcccttgatgaggtattgcagatcctgcggcacacccaccatggtcagacccacgaagatcagccgcagcatgacaacgccgataacgatacctctgatcttaccgatgccgcccacgaaggacacgccgccgatgacgcaggccgcgatggcgtccaactcatagttcaggccggtgttggccgtgttggagccgatacgtgcgccctcgatgaagccggtaaaaccatacatagcgccggccagggcgaaaacgcccaccgtcacgccgaacacattgacgccggaaactctggcggcctcctcgttggagccgagagcgaacatattcttgccgaaggtggtcttgttccacacgaaccacatgaccgccgtcagcacaatggcgaacagcacatagttggggatgggggtgccgccgatgctgaacaggctgcccttgacaaagccggtgtaggacgggtcaaggttggagatagccatgcccttgttgttgccctgctggacatacaaaagcagcacggtgtagaggatcagctgggtgcccagcgtcacgatgaaggggtgcagcttgaatttcgccacgaaaaagccgttgaagcagccgatcgccgcgccgatgagcatggcaagcacaatgaccacgggaatgggcagagtaccgatctgcggccacatcttgttggccatgttagcggcgttctgcagcagagatgcagagatacaggcggtgatgcccacggcacggcctgcggacaggtcggtaccggtcagcacgatacagccgccgatgcccaatgcggcaggcagataggccgccgtctgggagaggatgttgatgagtgatgcgggtttgatgaagttggggttcttgatggcgatgtaaacgaccgcaatggccatgatgatgagcaatgcgttatttaaaaggatatctcccacccgctgggccgtccacggctgccggacacgggcttccttttcctgtacgttcgtttcttgattcacagtgcgctcctccttacacatatttggctgccagcgtcaggatctcctcctggctggtgttccgggcatccacctcgccggccagaacaccgccggacatgaccagaatacggtcacaaatgcccaacagctccggcatttcggaggacaccatgatgacacccttcccctccttggcaaggtcgaggatcagctggtagatctcgtatttcgcgcccacgtcgataccgcgggtcggctcgtccagcagcaggacctcaggcttagtcagaagccagcggccgatgatgaccttctgctggtttccaccggagagcgagcggatctgtgtggattgactgggcgttttgatgtgcatggcctggatcgcccagtcggtatcttctttcattttcttatcgctgaggcagaaaccgcctgccagatagcttttcaggttagaaatgacggtgttttccttgatgtcacggatcccgaagatacccgtggcccggcgttcctccgtcagcagggcgaagccgtttttaatggcttcccggggggtcttgttcttgatctccttaccgtggaggcggatggtgccgctctccttggtcatggcgccgaacagattctccagcacctccgtgcgtccggagccgtccagtccggcgatacccagcacctcacccttgcgcagttggaagctggcgtccttcaggcgggtgtatttgcccgccagatgctccacttccaggatcacctcgccgggcttattgtccttgggcgggaaacggttggtcagctcgcggcccaccatcagcttgatgatctcctccatggtcaggtccttggcgtggcgcgttgccacccactgaccgtcacgcatgatggtgacctcgtcactgatgcggaggatctcgtccatcttgtggctgatgtaaatgatgccgcagccccgctccttcagcatattgatgatgcggaacaggtgctcgacctccgcctccgtcagagaggaggtaggctcatcgaacacgatgatcttcgcgttatagctgaccgccttggcgatctccaccatctgccgctgggaaacgggcagggtggacatgatggccttggggtccacatggacatccagctcctcaaagatctcccaggtgcgcttgcgcatgacagattcgctgaccatgagacatgccaccttgggatagcggcccagccacaggttatccatgacgctgcgggtcagggcctggttcagttcctgatggaccatggccacgccgttttccagcgcctcttttgaacttttgaaatcaacttccttaccgtccagaacgatggtacctgcattcttggcataaatgccgaacagacatttcatcagggtggactttcctgcgccgttctcacccatcagggcgtggacggtgccgggccggacggtaagggaaacgccatccagcgccttgacaccagggaattcctttgtgatattccgcatttccagcaatgccggctgctccatattgcgtttacctcctatctgcgtgattcccgcggcaaatcccttacggcacgttccgtccgtctcggggttcgttccactgcgggttgaaaagcggcccgaaccggaaccgcttgaattgtaaagcggggctgtcgaaccgacagccccgcttatccttactgtttaatggggcgagagaagcgatggtctggcttattcgccggtgtaggtagcgtaaggcacacggatcttggcaacgccctcgtccacgttgaaggaggaggtgttatccatcagctcgccgccgccctgaacactgctgaccaggttcagaatggtggaagccatgccctcggcatcctgcttgatggtgccggtcatcttgccctcgttgatgagctgcttagcagaatcggtagcgtcaacgccgaacacggggatggtcttgccgtcgccggtgttgtagccggcgccctgcagagcagagacagcgccctcggccatgccgtcattgttgcagatgatcagctcgaccatgttgccgttagcctcggaatactcggggaggatggtggccatgtagtcgttagcagcctgagcggaccacttgccgccctgatcgaccaggtacttatcggtagcggaagcgttgtagtaagccagttcgggcttgccagcggcagtcaggacagcgttggcgtcctccacgccgaactgagtacgggcctcagcctcagcgttgccttcctgacccttgaacatcacgtaggagatgacgccgtcgccgttcaggtccacggtgtcatagttctccagcagatactcgccgaccatctggccctgcatgtgaccggcctcgggagcgttggtgccgacgaaggcgcacttctcatagctgttcacaacatcgtcagaaacctcacggttgaagaagatgatggggataccggcggtcttagcggcctcaacagcgttctgagcggcatcgggagaggaagtctcaacgatgttgacgatcagcaggttggcgccgttggagatggcggtgttgatctggtcggtctgctgggcctggttgccagcaccgtcatagttggtgtagttcacgcccatagccttgagctgctcatccatggagctgcggacgctggagatgtacacgtcagagtagtcatagtagaacacgcccacgttcagcgcggcggtctccgtgttctcagtgccagaggtagagggctgctccgtggtcttgctgccgcagccggccaacaggcccagcatcatgacagcagacaggagaattgcaagtgtctttttcatcttagttcctcctcaagatcattgatcatccgttcaaggcggtcaggccgccttgccgttatgatgctattgtatcggctcccttttgaaaaagcgatagaaaaaacttcgctgatataggaaaaaactcatggacttcttggtattttcatagaattttcaacgtaatcgattgcggcaattgtcgaaaatcccaatcaacatatttcgacacgcacgttccaaaatccgcaggcttatgcaccacgcccgcaaatcaagaaacagccgccttcattaagaaaacggctgcttaacatattgaaaaagctctttctgcccgctgcggaaagctcaccgctctattgacaggctctcaggtattgtcccggctgataggttcccggaccagcagccgcagcagcgccttgccgttgaagggaaccagtggatagagatatcctttcccaaccagcggctttgtggtgcacagcaggatgaagatccccaccacgcccagacaaaacccccagacgtcaaaggccgccgtcaccagcagcagcgccacccgcagcagcttgaaggcgtagcccagttcatagctgggctgggcgaaccccgccacggacacgaaggccatatacaccagcacctccggccccagccacccggcctgcaccgcaaaatcccccaggaccaaggctcccagcatggaaaaggaattggaaaggctgtccggtgtgttcagggacgccagcttcaatacgtcgatgagaaattccaccaccagaagctgactcagcaggctcaaagacaccggctccggggaagacaggaagttcagccaccccggcaaacggttcggttcgctgaccatgagataccacgccggggtaataaataaagaaaggagaaataccgttacccgcaggacccggagataggtgcccaccaagggcggaaagtaatagtcattggattcctgtgtgaaatcgaaaaaaccggtgggcaaaatcatcacagagggggaattgtccaccatcaggacgatgctcccctccatgatgctggccgccgccgcgtcgggccgctctgtatagcgcactttcggaaacggattgtaccattgtttaggccgaatggcctctgccagactttcctgggccatggagagggagcggacatccagtcccagcagcttgccccggagcttccgcagcaggtcctgatccaccttgtcatccagatagcagaggaccgcgtcattatgggtgcgggaaccaaccttgtgcccctccatagtgaggtgcgggtcccggatgcggcggcgcagcagcgccatattgggcaccactgcctctacaaagccgtcgtggctgccccggagcaccttgccgtccggcggctcgtgtacgctccggctggggtagcccttggcgtccatcagcgccacccccgccagtccctccaccgccagcagggattttcccaaaaatacggaggtcacggcgtcggatatgtcaaaggtgacgttggattctgaaaaggtaatataccgatccagaaagtcctgcatttcggtgagacccaccacgttttccggcttcagtgtcagccagaaagcccccatccgctcaaggatgctgtcactgccaaagccgtccaccacccacagccgggcccgccgtccgccgatcaggtaatcccggctcaccatgtcgcagctgcggcccacgcctaaaaggccgtccagcacccggatgttttcccggtaatcattcgagattttttccatgcgatccctccgtttctggaggtagtatgtgccgggaatcaaattttatggcaaaaaggaacagacccacaaaggtctgttccttttacattttataatgttatgccttcttcggacggacggcccggaaaatcaggccaataaccagccccaggatcgcggggcagatccagcctaggccgatggtggcaaagggcagcgccttgcccacagtgtcgaccaaaccattcacatggagcaccgcacggagatgatccggcagcgtccgcagcagatcgtagaaagccgccaccagagtcaggccggtgacccagacgtacaccgcccggtcatggtcaaagaagtggcccagcagcgccagcaggatcagggtgatggccagaggatacaggaacatcagcaccggcacagcgtaggtgataatggcggtcaggcccacgttggccagcaggaaggaaatgcccgtgaacacgaacacccaattccggtaggacaggcccttggggaacatccccacgaaggtctccgcgcagctggtgataaggcccactgccgttttcaggcaggccagcgtcaccgtggcggccaacaccaacaagcccgccttgcccagatagtgctgggcgatctgtgccagcgccgtgccgccgttgggagcggcttccagcgcgccccggctccagacgcccatcagcgtcaccagcagatagatcacgcccatcagcaggcagctaagaataccggagcggacggtggtcatggccacggattccgccttttccacacccaaaccctggatcacctgcactaccacgataccgaaggcaaggcttgccagggcgtccatggtgttatagccctccagaaagccggtgaagaagggttgtgcggcataagcgccctgaggctccaccgcgccgatgctggtggtgggatgcaggatcgtcacgaataccatgatcgccaggaacaccaggaagcagggcgtcaggaccttgcctacataagtaaggatcttgcccggccgcagagaaaggaccaacgtcacagcgaaaaacagcagagagaacagcagcaggtagagccagctcttgtcatcgtggggcaggatctgctccaagcccacggtgaaggaagtcgttgcgcaccggggaatggcgaaaaacggcccgatggtcagataaagggcgcaggtaaaaaagaacgcatagggacggcccaccttatggctgaggtcaaaaaggccgttgctacggctgatgcccagagcggccacgcccagcagaggcagacccacgccggtgatcagaaagccaagaacggccgcccacatgttccggccagccacctgtcccatataaaccgggaaaatcaggtttcctgcgccgaagaacatgccgaacagcatactggccacatagatgtattctttaaaactcagtttttgcttcatggatcgatttctcctcctcgtgtttcttccctcagaacactgtaacccctaaaacagctctgccggttgggaagctgctttgccgccttccgttcgacagcaatcgcttcattatagcatctgaatagctgaaaggcaactgaaaacacatttttcaacagaccgcttgcgcttctgctgttcgtatgctattatcagttagatctatctaaccagcgtaaaggagtatcctatgcgtttttccgcttctgctttcgcgcccgcctgcgcatcccccaacccctgcgaggccgatcctctgcgcctctatccggacgcctccggcggtgaagccgctgtgacccggtaccgggtattccccggtatggagctggactaccgggatgttcatgcccgtgcctgccgggaactgcgggatggttccggggaacggctggagatccatcactgtctggaagggcgggtggaataccggcagaacggccgctatttctatctgtctccgggagatctggcggtagcccgcacctcttccctgcctcctgacagccgcttccccaccggtcattaccacggaatcaccgtcaccattgatcccgctgccgcgccggagtgcctttcctgtattctcagcgatgtggaagtgcggccggccaccctgatggaaaagctgtgccccggcaggacggttttcaccgcccggtcctcccggcgggtaaagcacgtgttttctgagttgtacgccgtcccggaggacatccgcaagggatatttaaaggtaaagcttctggaactcctcctgtttctcagcaccctgtccccggaggacgggcagacccctcacggctgcaccagcgcgcaggtcactctggcggagcaggtcaagacctgcctgttggcggaaccagaccggaccttgaccctcaaaaccttatcccagcagttcaacgtctccgaggcgcagatcaagagcagcttcgccagggtctacggcatgtctccggcagcctacgcccgctcgcagcggatgcacggcgcggcagcgctactacgggaaaccgaccggacggtgctggacatcgcctgtcagttcggctatgacaatgccagcaaatttgccagggccttccgggatgtgatcggcgtttctccccgggagtaccgggccggtgcggaatatgacagctgcgcgccccgattgggcgaaaaaccggtttccctctcggatgctgacgtggaaaggcggatttgaccataatcatacaggagcggaagtctgacatggacttccgcttcttctgttcaggattattttgccacattcactgttttggagccgtacccgacgttttggagcggatacggctccaagcttttgataagatacagtcacaggggtcaagcttcactttttctccccccagcagttaaggttatctaaccgcaatcatcaccgcacaggcggacgcttctcacaccggcgtgccgcttgtgccgtgagaaccgccgttagcagtccgagcaagcaaggaggtcacggtatgtctgaggaaaatctggtgcggcaatgcgcaccgactctggccgggatcaaaaccggcaccatcttccccgcgccgttcacctctctggcagagctgacggcggagatcagggagttgaatcgaattctggtcccaaagggcctgcggctgctgcctctgcgctatcaggaccacaccgcgctgctgtacctctaccgtcccgctgagctgcgggtggacctgaaggaccagttggcggaagcactgctggcagatgccgggtattccggcaaaagcagtgagcagtgcgtggcctatctggccaagcgcttccgctccgggggcgaatttccccacgaggtagggctgtttctcagctatccgcctcaggatgtgcggggcttcatcgaaaatcacgccgtcaattacaagtgcgccggtctctggaaggtttacggtgacgaggcgctggcccggcggctgtttgagaagttccgcaaatgcaccgatatctactgcgccctctggcgtgccggttccggcattgaccagttggccgtcgcagtctgatataccaacggtcaatgaccgatcccgcaagaaaggagatttttacgatgaagaaaaccgcagtgatttattggagcggcaccggcaacaccaagcagatggcggaggccgttctggagggcatgaagagtgccggagccgacgccgttttgttagaggccgcacaggtggacgcttccaccttcagcggcgtggatgccgtggccttcggatgccccgctatgggctctgaggtgctggaggaaatggagtttgagcctatgttctccgcctgcaagagccacttaagcggcaagaaggtggcgctgttcggctcctacggctggggcgacggcgaatggatgcggtcctgggaaaaggactgtgatgacgccggaatcaacttggtctgtgagagcgtcatctgtcaggaaacccctgacggcgatacactggaagcctgccgcgccatgggcaagctgctggcagaataagccccttcaacacacctctatttttatatctttccttatttcctaatctttcctgaaaccttatcttcctatctttatctttcctatctttcctttttccccgccggagatccgcaggtctccgctgcactccggaccggatggggccggtccggagtgcaaatgccattttgtcttaatcgaaaaacaggccgggactgctgacagcgtcccggtctgttcccgctctgttgtctcatatttactatgccggttcaaagtatagctgatatttgcacaaaacagtttttgctgaccctgccgattttctgcggtttttccaaaaataattttccccgttgacaggggcggacaacagtgctacgctatgcccatcgaaaacgaaaccggaacaccggggacggaaaggagacgcaccaacatgatcgtaactcgctttggtatgatgatgtgcatgatggacatggggatgatgaccatgcccaagcctttgtgcgcctccgcgaaaaacctctcctgtgtgtaacagttatgctgttcagaagggcggaaagcggcgacgctttccgccctctttattttcgcagcaacgaaagaaggatattatgatcaagctggaacatatcagcaagacctttggagataccggcgatggagtccacgccgttaaggacgtctccctcgagatcggagacggtgagatcttcggcattatcggcttctccggtgcgggaaagtccacgctggtccgctgcatcaaccttttagagcggcctaccagcggcagcatcaccgtcaacggtcagaagctgacgtggatggaaaagcaggcggacggcaagtcctgtatgcgtaccgtctccccccaagagctgcggcaggcccggaaaaagatcagcatgatcttccagggcttcaacctgctgatgcagcggacctgtctgaaaaatgtctgcttccccatggagctttccggtgtacccaaggcccaggctgagaaaaaggcgctggaactgctggatctggtgggtctgaagaaaaaggcaagtgcctatcccgcccagctctccggcggccagaagcagcgggtggccatcgcccgggcgctggctacggacccgaaggtgcttctctgcgatgaggccacctccgctctggaccccaccaccaccaattccatcctcgcgcttttgaaggagctgaaccaaaaactgggggtcacggtggtcatcatcacccaccagatgagcgttatcgaggagatctgcacccgcgtcgccattttggacggcggcgaagtggccgaggaaggccgggtggaggacatcttcgcccatcccgccaccgacgcggcccgccgtctggtgtatcccggcggcgtcagcgctaagcagtaccccgcaggcacccgggccgtccgggtctccttcaacggcggcacggtctacgatccccttatcgcctcgctggcgatcgagtgcggcgtcaaagtcaacattctgggcgctgacacccggaatatcgacggcaaggccttcggcaccatgctcctgcttttgccggacgatccaaacgaggccgccaaggccctgagctatatccgttcccaacccaatatcaccgcagaggaggtggagtatcatgcttgaggtcatttctgcattttggtcggaatacggcggcatcctgctcaccggcacccgggatacgctggtgatggtgctgatctccaccctgttcgcctatctgctgggactgcctctgggcgttgccctcaccgttacccagccccacggcatccgccccagcaaaaccgtgaatcagatcttaggctggatcgtcaacatcggccgctccgtgccctttatcatcctgatggtggccatcatgcccttcaccaagctggtggtaggtaccaagatcggcgtcaagggcgccatcgtgcctctggtggtctccgccgcccccttcatcgcccgcatggtggaaacctctctggcagaggtagacgccggcgtggtggaggccgctcagtccatgggcgcgtccacctgccagatcatccggaaggtctatctgccggaggccaagccttctctggtattaggcggagccatttccatcgtgaccattttgggctacaccgccattgccggtaccgtaggcgccggcggtctgggcgatatcgccgtgcggtacggtcaccagcggttcatcaccgaggtgatgtgggtaacggtggtcatcctgatcatcatggtgcagattgtccaatccctgttcggctggctgtccaagaagatcgacaaacggctggataccggcgcaggcaaactcaccgccttcgacctgctctcccgtctggcccacaccaagtaagtcccccgcatttcatttgttttcatcgcctgtccccctatgtgcacaagggtattccggcaagcgcttgaaatataaaattcatcaattctgatattcattggaggaaaagaacatgaaaaacaagatttttgccactctgctggccctgacgctggccctgtccctcaccgcctgcggcagcaagtccgatgactctgccaaggccgacaccaccgatgacgcgcagaccgagcagcccgccgagccccaggagaccgtcactctgaacgtagctgcctctcccaccccccacgccgagatcctgaagcagtgcgtacccattctggccgagcagggcatcgacctgcagatccacgagtacagcgactatgtggtgcccaataccgctgtggaggacggcgatgaggacgccaactacttccagcacgtcccttatctggatgacttcaacaccacccgcggcactcatctggtgagcgtcaccggcgtccacatcgagcccatgggcatctacgccggcaagtccgactctctggacaacctgcctgacggcgcatccgtggccgtccccaatgatgccaccaacgaaggacgtgccctcctgctgctggaagctcagggtctcatcaagctggctgacgactccaacctctcctctacccccaaggacatcgtggagaatcccaagaacctgaccttcaccgaggtggaagccgctaccatccccagcatcgccagcgaggtggatctcgccgttatcaactccaactatgcgctgggtgctggcctgaaccccgttgaggacgctctggctctggaatcctccgactctccctatgtgaacgtgctggtctgcaaggagggcaatgagaacaacgccgccatccaggctctggccgaggccctgcactccgacgccgtgaagaactacatcgccgaaaactttgacggtgccgtcatcgccgttgactaaatcttccagcc

SEQ ID NO: 12159 - DNA, 14584 bp, Unknown
  gut microbiota DNA sequence
gatgtcctgatttactctggagcgggctacgaggctcgaactcgctacctccaccttggcaaggtggcgctctaccagatgagctaagcccgcaaatggtgcccagagccggaatcgaaccagcgacacgaggattttcagtcctctgctctaccaactgagctatctgggcaaaaatggcgacccggaacgggctcgaaccgtcgacctctagcgtgacaggctagcgttctaaccaactgaactaccgggccatttttgtggtgggaacaactggactcgaaccagtgaccccctgcttgtaaggcaggtgctctaaccagctgagctatgctcccaggtttccgtcatccgtcatcgtcagacggcaaaagctattatatgtgaaagcaggtcaaatgtcaacccaatttttcaaattttttatttttatttttttcagaccgtctgccccctgctgcacagggggcagacggtctgtttggtcaggcttcggaggccttttccagcagctcccggatttcctccggggtgaaccgctgacggctgtcacagaactgacaggtcagctcgatgccgttggggtcctccgccagctccgtaagctgcttgcggcccagactcaccagcgccgcagccattcgctcccggctgcaatagcagcggtactccacggggaccgtttccaggatctccagctcaaaatccttcatgactcgccgcagcaggctctccgggtcatcgttttccatcagcagattggtaacgggtcccgccgccatgattcccttttccagacggtcgatgatgccctccggcgcaccgggcaaaagctggatgagatagccgccggcgcggagtacgctccggtcccggtccaccagcacgcccaagccgcaagccgtgggaatctgctcagactccacgaaatagctggccagatcctccgcaatctcgccgcccagcagttccacgctgcccacatagggctccttcagattcaggtccttgatgaccgtcagcgtcccgccgtggcccacagcgccgcccacatccagcttgccgtcctcccggatgggcaggtcgatctggggattctgaacgctgccccggacgttgccctcgttgtccgccaccaccagcagcgtccccagagggccatcgcccttgatgcggagggtcacgctggaaccgtctccctttagctcattgcccatcatggaaccggccgccagcaggcggcccaaggccgccgttgccaccggagaggtctggtggatctgccgggcacgctccgtcagtgcccgggtggacaccgccgccgcctttacaaagccatcctttgagatggcgcgaaccagttgatcgctcatgattttcattactcctttgtcagttcacgggcttccggcagcggacgatccaccggtcctccgtatccttaggcgcccgggccgtcaggtcgccggtgatcttgacggcctcaaagcccgcgtccgtcaaaaacgccgtcagttccgccgcgctccacgcccgctccctgtgctcctcgcagtcccggtcccatgtaccgtctgcccgcagctggaacaggtccacctgataggtgcagatacttgtcttttccgagaaaaatgttcgccagacgcagtagctttcctcggtctcgtccgtatagagctgtccgtccatccgccgcagcttgtatggtgtgttgacatcaaagaaaaagctgccgccgggcttcagcgcgcgaaatacccgccggaaggtctcccgaatatccttttcccgggtcagatagttcatggaatccagcgtggacaccacggcatccaccggctccggcagacgaagccggggcatggactgctgtacaaacagcggcggctgttccaaagccgccgccttgctcatagcctgagtcagcatttcctccgacaggtccgtagccgtgaccgcatagcccttggccgccagcagacaggcaatggtcccggtgccgcaggccaagtccaaaacggtatgcaccgggatcctacttttccgaaacagcttttccagatagtccgcacggcggcggtacacgccgtccgccatcaggccgtcatagctggcggccagtgcgtcatagctgctcatttcgcctcttccccggccttttccgccttcagacgggcaaagacccgctcatacgcgccggtaccgtagctcaaagaccggttcacccggctgatggtagcggaggacgcgccggtctgctccagaatgtcgctgtagatcataccgtcattcagcagagaggccacttcaaaccgctgctccatggagcgcagttcggaaaccgtacagaggtcctgaaaaaaatcatagcactcctgaggatccttcaactgcaaaatcgcctgatacagcttatcacttttttccttttttccaattctgatcataaaggaggcacctttccttccataatttcatattttccgcacaaattgcaggattcactttcagcatttacattttaacacagtagtttgagaaaaggaagccctccaaatgttaaattttaatttcagctgccgaacccttcccagccgggccgcataggatgcgacagtgtcaggaaaggaggcagcgctgtggaagcagtcacatcaggactgaacaccgagattttttccgctgagcgggaatggactgtggagggacttccggtgcttaccgcgcaggtgtccctccctgagcccgtgggctcggaaaaccggaccacccggcgtatccggcggtactaccacgcccagtgccgggcctttctccggtactgtgaccgctggctgtttcccatggcagcgcgagcctgccgggaagcgctggcggacagccgcccccttccccagttccaagcggagctgtcctttcgggtcacctacaacgagggcggcttctggagtctgtatacccaaatccgggagccagccgccgatggacacattctgctgcgacgctggggcgatacctgggacctgcggcggggctatccggtttcgcttccgagcttttttccgcaccggcggggctggaagcggcgcctgctgactttggccgctcaggagatccagcgtcaggagactgccgggtacgcccggtatctggacggctggcgaaggcggctgcggcagcagttcaaccccatacggttttacctcaccccggaaggccttgccttcttctaccccatgtacgccatcgccccggcggcggagggtatccctgtctttaccgtcccctacgaagcggtgggcccatacgtgcccgcttcagaagcagagccatcctcgtctgctccgcagacataacagacagcgtccccgcttccgcagggacgctgtttattatcttattgttcgcttattcgccgaagttgtccttcaccaggtccaccagtgcgccgacagcttccttctcgtctgtgccgtccgcgatcagggtaatggtagtacccttcacgatgcccagagacagaacgcccagcaggctcttggcgttaacgcggcgatcatccttttccacccagataccactcttaaactcattggccttctgaataaagaaggttgcgggtctggcgtgcagacctacctcgttattaacggtgatttcctgtgtatacatgatacagctctccttttctataccaagtaattcctcatcttaaatcaaagaggtgtgctccaccagttttctgattgttattttacctgttttttcacgttccgtcaacggcgtttttcacaaacatttgaattgaaatgtggaacgccccccaacaatacaggcaggattcccaaaagcgatcctccgtccgaaaaagcgtggtttgctcttttcatcatattccgccagagcggaaagcgggaccagagtgcacaaagcgccgggtctgcggagcatcttccatacgttcggacgccgccaaggcgcttttccagaaaatacaaacggaattttgcgtgaaaaccagacctttgcggcatactacgccatgggtatcgcaaactcccagcaaaggaggaacgcacatgaaatctcgcgcttccctgtttttggcggtcttgctgctggcactgtccctcaccgcctgcggcaaggagccggccaagaacgatcgaaatgacgccgggtccggtcagaacagcgcctacgacgccgtttcggacccaaaccgggacaatgttcccaacaatgacgccatcattgggcgggatgaccacaccgtcaccgccccggacaccaatcccgcccccaaccccgccaacgagcctgccggagaccttcccggcgcgtctatggaccggatgctccgcaacggccgtgtccatgaccgggacggcgacctgctagacggcgaaaattccgtcacccccggcgcagaccgttggtaaagccgttattccacttccgccctgacatgcggcgtaccgcccgaaccgccggtacgccgctttccatcattctgtccatcaggcggcacggggcttttcaccaggacagacttctgctataattaagataaaagttccgctccgtcctgactgggggagtgatcgcaggaggtcccgccatgtcccagaaattttccatgacgcccattgcccatatccacagtgatttcgccgaaaaattcggcgtgccccggcaaagcgggctggtggaggagctggaggctgacattgttttcgaaccggcctatcagaacccggacgccctccggggcttggaggacttctcccacatctggctcatctgggtctttgaccgggccatccgggatacctggtcccctacggtccgcccgccccggctggggggcaacacccggatgggtgtctttgccacccgctcccccttccggccaaaccccattgctctgtcctgcgtgaaacttgcgggcatccgccagacggcagacggccccgtgctccgggtccggggtgcggatctggtaaacggcactcccattctggacatcaagccttacatcccttacgccgacagccatcccgacgcactgggaggcttcgccgccgtaccggcaggggaaaccctgtctgtttccatccccccagccctgttagcgcaggtgcccgcagagcggcaggaggctttgcggggcgttctggctcaggacccccggccccactaccagaaggacccggagcgggtctacggcttctcctttgccggttttgaagtccgtttcaccgtggacggggaccagctcaccgtccgggatatccgtccggctgaataaaatatttgctgaaactccggcggtccgcattgctgcggactgctgttttttgggaggattccgcttccttatgtgcacaggataagaagggactgcgcaaaggttcaacgagtggttttttatttttcgtgtaaaaacccattgacaaagtaggtttgttggtatatggtttaaacacactaagtttgtaggtgattgcatgactacttttatgtgcactcctgatatccgatgttgatggccctcttcctcgctggcacatcaaacaaaatcatgttcaaggagtgcttttttatgatctatcctgccatatccggtattgcctccccttcgccgtcatctgcgaaacaggaggtaccggcccatgattaactacgcccatctgaaatcccagatgatccagcttttggatcttctgcggtccattctctaccccaatgtgttcgacgccatggaggaagcccactccaaagaagaactggaagcggccgcccggcgtcagcttcgggagatcctggagcgaatctatcgggaaccccctcaatatgacgatgtgatcgacactctgttttccaagcttcccgccatccgggacacgctggacaccgacgtgcaggctgcctacgagggcgatcccgccgccacctgccgggaggaagtcatgctggcctacccagcctttgaagccatcagcattttccgcatcgcccatgagctgtatctcatgaaggtccccatgctgccccggatgatgacggaatatgcccattccctcaccggtattgacattcaccccgacgccaccgtggggccctatttcttcattgaccacggcaccggcgtggtcattggcgagaccaccgtcatcggcgagcacgtaaagctgtaccaaggcgtgaccctgggtgccaagagcttcgccgtcaaggcggacggcaccctggtgaagggcaacaagcgccaccccaacatcggcaacaacgtggtcatctacgccggagccaccatcctgggcggcgacacctacatcggcgacaactgcgtcatcggcggcaacgtgtggctgacccactccgtggaacccggcaaacgggtccttaccgcccgggagcagacggaatttgtgaccacagatatctgataatttttacatattatacacagcaccacaaaggaggaacccgctatggtatacgcggataatgctgcaacaacaaaaatgagccgcacggccatcgacgccatgctgccctacatggagactcattacggcaacccctccagcctttaccggctgggccaggaggccgccgaagccttacagagcgcccgggagaccgtggccgcctgtctgggctgcacaccccgggagatcacctttacctccggcggcagcgaggccgacaatcaggctttgatctccgccgcccgcatcggtgagcgcaagggcaagaagcacatcatctccaccgcctttgagcatcacgccattctccacaccctgaaaaagctggaaaaggaaggctttgaggtcgagctgctgccggtgggccccatcggcaccgtcaccgcccagcaggtagcggacgccatccgccccgacacctgcctggtcaccaccatgtacgccaacaacgagatcggctccatcctgcccattgcggagatcggcgctgtctgccaggaaaaaggcgtcctgttccataccgacgccgtgcaggccgccggtcatctccacatcaatgtcaacgagcagaacatcgacatgctgtccctctccggccataagttccacggtcccaagggcaccggtgtgctgtatgcccggcagggcatccccctgaccaacatcatcgagggcggcgcgcaggagcggggcaagcgggccggtacggaaaacgtccccggcattatgggcttggccgctgcgctgaaggaggcctgcgatcacatcgacgaaaacgccgccaaggactccgcgctgcgggaccagctcatcgccggtctctctcagattccccacagcgccctgaatggcgatcccgtccatcggctccccggcaacgtgaacttctgctttgagggcatcgagggtgaaagcctgctgttgctgttggatcaggctgggatctgtgcatcctccggcagcgcctgcacatccggttctctggaccccagtcatgtgctgctggccatcggccgcccccacgaggtcgcccacggctccctgcgactgagcctgtgcgaatggaacactcaggaggatgtggatcacattctcaaggaggtcccccggatcgtggcgtacctgcggagcatttctcccgtgtggaaggatcttgccagcggcaagaagcagttcatgctgtaatgtttccgttcttctcaacaacgcgaatatttactttttataacccaaggaggctttcaatatggcactttatacagaaaccgtcatggaccatttcacccatccccggaatgtgggcgagatccccgacgccgacggcgtaggcgaggtaggcaacgccaagtgcggcgacatcatgaaaatgtacctcaagatcaaggatgaccgtatcgaggacgtgaagttcgagaccttcggctgcggcagcgccatcgcgtcctcctccatggccacggagctcatcaagggcaagaccattgaggaggccctggccgtcaccaacaagcaggtggtggatgcactgggcggtctgcccgcttataagctgcactgctccgtactggcggaggaatccatcaaggcggctgtcaaaaactattacgaccgtaacaacatcccttatgaccacagtaagttccccgactgcgagcactgcgagggcggctgtcccatggtttgatgggtaaggtactgatcgcaatgagcggcggcgttgattccagcgtcgccgcttaccttttgaagcacagcggctgggactgcgtcggcgctaccatgaccctttaccgcaacgaggacatcggtatttcccgtagccgcacctgctgctctttggaggatgtggaggatgcccgcagcgtggcgtttcgtctgcggattccctactacgtttttaacttctccgatgagttccgctgtcaggtgatggaccgctttgcggatgcctacggacaggggcagacgcccaatccctgcatcgactgcaaccgctacctgaaattccggcatctctatgaccgggcggtccttctgggctgcgacgccatcgccaccggccactatgttcggatcgagcgggaaaacggtcggtatctgctgaaaaaggcacttgacgcaagcaaggaccagagctatgtactctatatgctgactcaggagcagttggcccacacccaatttccattgggtgccctccgtaaggcggagacccggcagctggcggacagtctgggcttttttaacgccagaaagccggacagtcaggatatctgtttcgtcccggatggcgactatgccgctttcatccgtcggcacaccggaaaagcggacgcccccggtgatttcgtagacgaatccggtcggatattgggacgtcacaagggcatcgcccactataccatcggccagcggaaaggaatgggtatcccttccaatcgaccgctgtacgtaaaagtcattgattcaaagagcaatcaggtggtcctcagcggaaatgacgctctattctcccagcagctcactggtgagaatttcaactggatcacttgggaagcgccgccccgccagttccggtgcagtgccaggatccgctaccgccagacggagcagccctgtgaagtgacggtggaggaggacggctccgtgcaggtgctgttcgaccgtccccagcgagccatcactccgggacaggcggtggtactctatgacggagacaccgttctgggcggcggtacgattttatagcccatggccgcagcgtaaaaaaccagcggaaaggacaagcctttccgctggtttttcagtttctatcaggtttccgctgtttcatcggcggaggccatacgcttccgggcatggtcatagatggccttgaaggtctggtcgctgatgtcatgctccattttgcaggcatcctcctccgcggtctccggatccacgcccaagctcaccagaaaacgagtcaaagtctgatggcgctggagcattttggatgcgatctgcataccggcatccgtcaatgtgatgaggccatccttatccatctcaatatatccgttttcccgcagacgcttggtggcgtaagtcacgctgggcttcgtcacccccaagtgctccgctacgtccacagagcgcacatatccatgcttggtctgcatcatcagcatggtttccagataatcctcagatgctttcaggatctgcacggccatcaccggtcctttcttcctatcacgattcagggcatcgccgtccgcccaaaagccttggtgaaagcgacagcccgcatgaagctgttttgggcattttaccatattttcttcacaaatgcaaggtgtcttctcccctgagattttgacaatatttttaaaaatcccggttgacagaagagattagagatgttaaactaagctgtaattagaggaggctaacgccttacaaagcgtgacggctgcactccgactattctttttccataatagttagttcaatttaactaacagattcggagggatcgttatgatgccgcttgcactggcaaatatcggtgaagaatacatgatccgcagggtcagcggaaatcccgaggtaaaaaagcacctggaggacctggggttcaccgccggcgggtccatcacggtggtgtccgctctgggaggcaacatcatcgtcaaggtgaaggagtcccgggtggccatcagcgaggagatggcccgcaagatcatgatctgattcatttgaatttgaaatctgatagaaacagtaggaggaaataagtatgaaaacgctgcgtgacgtcaaaatcggtgagaccgtaaaggtcgtcaagcttcacggagaggggcccatcaagcgccgcattatggacatgggtatcaccaagggcgtggagatctatgtccgtaaggtcgcccctctgggcgatcccatggaggtcaccgtccggggctatgagctgagcctgcggaaggccgacaccgaaatgatcgaggtcgagtaaacacaaaaatttttcaaatatggtttgagtacccaaaccaaaaggagcatgtatggaaaagcagatcaaaattgccttggcaggcaacccgaactgcggtaagacgaccctgttcaacgccctgaccggttccaaccagttcgtgggcaactggcccggcgtcaccgtggagaaaaaggaaggcaagctgaaaaagcatgacaatgtagtcatcatggaccttcccggcatctattccctgtccccctacactctggaagaggtggtggcccgtaactatctggtgggagaacggcccgacgccattctgaacatcattgacggcaccaacctggagcgcaacctctacctcaccacccagcttaccgagctgggtatcccggtggtcatcgccatcaacatgatggacgtagtccgcaagaacggtgaccagatcaatgtagcggagctgtcccgggagctgggcgtgcggatcattgagatctccgcgctgaagggggacggcgtcatggaagccgctgaagccgctgtgaaggccgccgagggcaccaaaaccgttcccatgcacaccttctccggccctgtggagcacgccatcgcccacattgaggaggccgcggtgcacaacctgccggaggagcagcagcgctggtacgccatcaagatcttcgagcgggatgacaaggtgctggaaaaactcagcatccccgccgatgtcatgtcccatatcgacgccgacatccaggccgccgaaaaggagttggacgatgatgccgagagcatcatcaccaacgagcggtacgtctacattgcagagcttatcaagagctgctacaagaagcacaatcaggggcagctctccgcctccgataagatcgaccgcatcgtcaccaaccgctggctgggcctgcctattttcgccgtggtcatgtatctggtgtactacatcgccatggtgaccgtgggctccgccgctaccgactgggccaatgatggcctgttcggtgacggctggcacctcttcggtatgggcaccagcgaatataccgaggtcgctgacaattacaccgccgcctccgaggccatcagcgcctactatgagctggacactgaatctgatgacttcgatcccgacaccgctctggccgatatgaaggcggttcagcccgactccgcatccactaccatcgaagtggaggatgaagagaccctggccatgaatgacatgaccgtttactatgacgccatccccgctgacgctgataaggagaccaccgtcggcatgagctatctggacgctgtcacctactttgaggagaatggctttgacgagcccgatcctgccgactacggcgtgtgggtccccggcgtgcctgtactgattggcaatgctctggaagccgccggtgctgccgactggctcaacggcctgattctggacggcattgtggccggcgtcggcgcggtgctgggcttcgtaccccagatgctggtgctgttcctgatgctggcgtttctggaggcctgcggttacatggcccgtatcgccttcgttctggaccgcatcttccgcaagtttggcctgtccggtaagtccttcatccccatgctcatcggtaccggctgcggcatccccggcatcatggcctcccgtaccattgaaaatgagcgtgaccgccgtatgacgatcatgaccaccaccttcatcccctgcggcgctaaggtgccctttatcgccatggtggcaggcgctatcttcggcggcgctgcttgggtggctacctccgcctacttcgtgggcatggctgccatcatcatctccggcatcatgctgaagaaaaccaagatgtttgccggcgatcccgcacccttcgtcatggagctgcccgcctaccactggcccaccgtgggcaacgtgctgcgcagcatgtgggagcggggctggtccttcatcaagaaggctggcaccatcattctgctgtccaccatcgctgtgtggttcaccacctacttcggctgggctgaggacggcttccggatgctctccgaggaagagatcgactgctccatcctcgcccacatcggcagcctgatcgcctggatcttcgcacctctcggctggggcaactggaaggccgctgtggcctccatcaccggtctggtggccaaggaaaacatcgttggtacgctgggtattctctacggcggcggtgatgagactgtctatcaggctctgggagctgtctttacccagatcagcggctactccttcctggtgtttaacctgctgtgcgccccctgctttgccgccatcggcgccatcaagcgggagatgaacaacgccaagtggacctggttcgccattggctatcagtgcggcttcgcttatctgtgtgccctgatggtcaaccagttcggcaaggccttcaccggtagcctgaacgtcatcggtctggtggctgccatcgccgctctggcctttatcatctacatgctggttcgtccttacaaggaagctaccaagctttccactaaggtctgatttttccctcaccctccattctatatcttccatcttctatttctttcaaaggagtgattttccatgctgacctggttgagtgccaatctttctaccctcctcatttctctagtcttatttgccgttgtcatttccattgtccggtatctcatccggcagaaaaagcagggtaagcacacctgcggatgcagcggcggctgcgccggttgttccggcgactgtcactgcgggcgataaacactcccaaagagaacaggcgcgtggggcatcccacgcgcctgttcttctctttgctaacttgtttacaatttgaattcctgctccacaaaaggatcagattttgacgatcttcccggttttccacgcctccgtggtggcgtagcccacccgtgtggcatagatgccgtccgccacgccggtatccggcttccgcccttctcggacgcagcggacaaattcctccatttccgtgaggtatgcttccgcaaaccgctccgggaaagactccacgcactcagtccgggcgccgttcacatcgtagaccatagcccggttcttctccggcacggcagaaatgcggatcgtgccctccgtgcctacgatctccgtttcgatatggtagccgtagggggcggtgcggcccacatggaccatgcccatagcgccgtttttgaatttgtagacggcgacgccggtctcatcgtccccggcgtcctgaaaggctgggtgcttaaaggtgcagcccatagcgtagacctccgcagcctcgctccccaggaaccagcgcatcagatctatgtcgtgaatggcagaatccagaaagatcccgccggaggtcccgctgtaccggatggccccctccaccacggcttccgggtcgatgccggtggatttcaccagatagggcgtaccgatggcccccgcagtgattttttccttggcataggcgtaggacttgtcatagcgccgcataaagcccagcatacacaccaattccgggtgccgggccacggccgcctccgcctgaaggcattgttccatcgtaacgcccagaggcttttcggaaaacacgtgcttccccgcgtccagcgccgcctcgatctgccagcagtgctccccggagggggacacgatggccaccgcgtccagttccggatcggcgaccatctccctgaaatcgccgtacaccttttcaagtcccaattcctgacgggcatacgcctgactgtccgcgccgggcacacaggccgccgtcaggaccgcgccggggatcttgtgtgcaaggttggcagcatggacccggcccagccgtcccagaccggcaatgccaacacgcagttccgtcataagcagtctctttccattcaacttgatcggttcaaaatcataaccaccggccgtgccggtggtttgcactagcccccttggggcatgacctgggctgagcctataggctcgtcgaaaagtctgccaaccgcgcagttctcccgggctgcccctaaaggggcttttgtttatttgcctcctcttaccggctca

SEQ ID NO: 12160 - DNA, 6306 bp, Unknown
  gut microbiota DNA sequence
tgtcctttgacagagatgcgatcccgcagaggcaaagaacaaggaggaatctctatgaaaaccatcattaccatcggacggcaattcggcagcggcggcaaggaggtcggtatccgggtcgcgaaggagctgagtattcccttctatgataaggagctgctgcaggaggctgcgaagaagagtggcctgtgccagaagatctttgaaaattttgacgagcggcccaagagcctgctatacgccatcgccatggatgcttaccctcttggcttttccggcgctaccggtgaatctctggagcagcaggtacatctggcgattttcaagaccatccgccacatcgcggaggaaggtccctgcgttatcatcggccgcagcgccgattatgctctggcggagaaccccaatctgctgagcctgttcatcagcgccccgctggaggaccggatcgcccgcgtggccaagcgccagaaggtgacgccggaggaggccaagagcctgattcagaaaaccgacaagcgccgggcatcctactgcgaatactatgcctccaagaagtggggcgcggtggacgcatacgatttctgcctgaacagcagtgcactgggccttggcggtacggtggagctgattcaggccatggttgctcacaaggagcatcccatccccagccccacggagatcgaccccacccagaccgaggcataagcgcttttcagaacggccccaaggggccgttcagcgtgtcgaaaaaatcttttctccccgcatggagcaggaatacaccgtcggcccagccggtttccgtgcgctttgcgcccgaaaatcgggggccttcctcgaaacaggctcgttttatccgccaccggcggcacttcgcctgtttcccctccttggggttcccgcgcacacccttcacccgcaaggggtatgcagcatccgtaaagcggcaaagccgctaacggctgccctaccttaccgtcgcggagaatttactactttatcgacagtctcaacggccccaaaggggccgttcttttttgcgcgtttgcggcgaaacagttcgacaagtacacctgtctgcatggttttccgcctcatgttcatctatcgaaaaacggcatatctctattccgccggggcttgacaatccatggaaaagtattataatatcgaattgttcaaaattgtactattagaaaggaggcggtctcatgctgcctgccgtgcggttttatacctattccaagcgctttgaggaggcgtacaccgcggccatgcgccccttgacggaggaactggatatggcccagcccgccgtggacattctcttgtttttggccaacaatcccggtatggataccgcccgtgatatctgtacctaccgccatctgaagcccgccattgtctctttccatgtggaaaagctggcaggggaggggtatctggagcgccagccggtgccgggagaccggcggaaatgccgtctggtgtgtacggaaaaggccgggccggtgatccggcggggccgcgctgtacaggagaccttttcgcggcagctgacggagggactgaccgaggaggaactggagacctgcttccgctgctttgcggtattcggagaaaatatggaccgactgagcggcagccggaaaacgacaaaaggagacgcaaaatgaatcaggataaaacctttttaggcacggagcccatcggcaagctcctgcggcagctggccgtccccacggtcatcgcccagctggtaaatatgctctacaacatcgtggaccgtatctacatcggtcacattcccggtgacggcgatctggccctcaccggcgtaggcgtatgcctgccgctgattttaattgtctccgccttcgcggcactggtggcctccggcggtgcgccccgtgcctctatttacatgggcaagcaggaccacgacaccgctgagaaaattctgggcggctgcttcgccctgcaattagcggtctctgctgtactgacggcggtgctgctgctttggagccgggatctgctgttggccttcggcgccagcgagaacaccatcggctacgccgccagctatatgcagatctacgctgtgggtaccgtgttcgtgcagctgaccctgggcctgaacgcctttatcaccgcacagggctttgccaagatcggaatgcggacggtgctcatcggcgcggtggccaacatcgttctggaccccatttttatttacggactgcacatgggcgtccggggcgcggcgctggccaccattctctcccaaggtctgtcctgtatctgggtgctgcggttcctcaccggccccaaaaccctgctgcggctgaaaaaggaaaacgtccgtttccgccctgccctgattttgccctgcgtagcactggggacggctaccttcatcatgcaggccagcgagagcgtcatctctgtgtgtttcaattcctcactgctgaaatacggcgacgacatcgccgttggcgccatgaccatcctctccagcgtcatgcagtttgccatgctgcccttgcagggcatcgcccagggcgcccagcccatcaccagctataattacggcgcacggaatacccagcgggtgcggcagaccttccggctgctgctgaaggtgtgtctgtgctattccgtggcgctgtgggcggtgatccaactgtgccccggcgcgtttgcccggattttcacccctaacgcggcgctggtggcctttacggtgcccgccctgcggatctattgcggggcgctgttcctctttggcatccagatcgcctgtcagatgaccttcgtttccattggcgccgccggctgctccatcattgtggcagtgctgcggaagttcgtcctgctgctgcccttgatctatctgatgccccggctgctggcggatcagaccatggcggtttacaccgccgagccggtggcggatgccatcgccgtgacctgcaccgccatcctgtttgccgtccaattccgcaaagccttgcggaagctggacgcggaagattaaaaacaccgccccggtttgtgatatgctccctctatgagcaattgatttgtcaagtgtttttgtgtgaaaaatattgtttttatatatccccctgcgctgaaataaaaacgctcaatcaccatcataagtgattgagcgttttgcgcgcgaacttaatgacattgtcttgacgggatgcggttcaaaaaccggggcggtgctttttatggttcaattacggcttcgatttggggaagatttcctgaaagcgagcttggctgtaagcaaaaatatccgcttcaaagcggcgataatccgctaaaagctgctctgcctcaggcgtcagggatgcaccgccgccgtgacggccgccgatggtggagtccagcagccggaagccaaagccctcctccgcctcatgtatgatgcgccatgccttggaataggccatctccatggaggcggcagcggcccgcagggaccggtgctcccggacccgctccagcagctccgccacgccgggaccgaaaaagcgctgtccattttgcagaaagcggggtgtcagcttcaattccatggtatacctcccgtcggcttgataaaatcattgtatcatattccgccggaattgcaaacgggaaaagaacgtggtatgattggactgtcaaaaatcaggccatagagccggtaaggagaacactatgctgctgaaaaacgagaacgccagtattcgactggattttgtaagctacgaatttccggaaactgaatacggaatggatgaatacgataagaactggctgcagctgcgctgcacctgggtggatgaggacggctatacccataaggactccaacgcctgcctgctggctcaggagctggcggggatgaacgccggattgaaggtgctggccgccgggatcaaggaccgctatgacagcgacttcatttcgtcggatctcagcctgtttgcctgggcagagggagagctgttccgggtgtatatctccttttatctgcccaacacaatggatggggacgatacggcggaactgaactgcacccttaccggaccagaattgaaagcgctcattgaggatctggatcaggaatgcgcccggttcccggagcggaaataatcgctctgaaccgcaattcctgacagcgaacggtaaaatatccatacaggatcaacagaacgaaggaggacgccgttatgaaaaagctgacagtcattttcctgtgcctgctccttgcgtccgttaccctcggctgcgggaaaaagaacgggatcagggcggcctacgctggaaatataaacacctattgcgaaatgaaggacggtacctggtcctgcaatgaccggtcctatgaataccgccttgaacgcaggggacggctgccaaacgcggaatgtgattccgtgtttgtgtacctcagcaatctgccggacatctcccttgagcaggccgcgaaggcatcggggcttagcagcgacacagcggattattttgccgccgaggacgccgttttagtggagctgcggacggaataagtctgtgctttttggagtccaaacagaaaaagctgcggaaaccgaccggataatgttcatagggacacaagttgacaccatatcttgcaagggggcggacagcgtttgctgtccgcttcttgcgtattttctctgttttttattatgcgggaagctggaatacctcgctcaggggcggcgcaatgcgcggctgcgcctcgccctgctccatcgcgctgtccaccgtgccgatgtcgcggtacacgatgcggatgctctggtgggagctgcgggagtatttctccgtccgctcgcctacctcgatccgctggatgaacaaacgcagcagctccggcgtcagctcgtcgatggcggtgtactgcttcgccttctcaacgaatgtgttcacgttggcggaggcggctttcagcttttccagccgggcctccttttcggggatctgttcctccaacgctttctgctcgccggtgtaatcgcctgccagcatccggtactgctcatcggtcacccgccccagcacgttgtcctcatagagccgcttgaacagcttggacagttcctctctgcgccgccgcatggtatccagatctttttggatcgtgttcatctcacgccgcagctccagcgtattcttgctgctgatgtaggcggcgaactgcttttccttcatccgtgcgaagtgcgtcacccggcgcaagtcctccagcacaacggctttcagctcaaactcccggatgtggtgcggcgtacagacggtcttgccctttttgccgtaggtgtagcatttgaagttgtactccgcctttttcatcgtgctggctctgtgcagcaccagcggcttgccgcaatccgcgcagaacaccagtccagagaagatgttcggctcgtccatgtgcttggggacacgctttttgtgctgacgcacctcctgcacgatgtcccactgctcctgcgtgacaagggcttcgtgggtgttcttcaccacgaaccgctcactttcagggcgctccacacgctgcttgtttttgtaggagatcgtagtggtgcgaagcccaaccgagtgtccgaggtaaacctcattgttcagaatgctggtgacgctgttggaagaccacaggcagggtctggtcgtgtccagtccccgatggcttttcccggtcttgcggtagtaggcgttggacgggttcaccacctgctctttagtgaggatggtggcgatccgcttggggccgtttccagcggcgcagagggagaagatgcgcttcaccacaggcgcggtgtcctcgtcgggaaccagcgtgttggcgtcaccatcacttttccgatagccgtagggcggtctgccgcccagccgctctccctgctccgctttcattttcatgaccgcgcggaccttgcggctggtatccttggcgtgaagctcgttggcccagttgcggatggggttgaagtcattgctgctctccactgtggaatctacgccatcgttgacagcgatgaagcggacattcttctggggaaaatatatctccatgtagtagccaacctgaaggtattcacgccccaagcgggaggcgtcctttacgatgaggttcgccacctgtcctgcttcgatcatctccacgatctttttccatgaaggccgctcgaagttcgtaccagagtagccgtcatccgcaaggaagatggtgttctcgaagcccttttcttttgcgtatttctccagcag

SEQ ID NO: 12161 - DNA, 518 bp, Unknown
  gut microbiota DNA sequence
tactgcttcgccttctcaacgaatgtgttcacgttggcggaggcggctttcagcttttccagccgggcctcctttttggggatctgttcctccaacgctttctgttcgatggtgtaatcgcccgccagcatccggtactgctcatcggtcacccgccccagcacgttgtcctcatagagccgcttgaacagcttggacagttcctctctgcgccgccgcatggtatccagatctttttggatcgtgttcatctcacgccgcagctccagcgtattcttgctgctgatgtaggcggcgaactgcttttccttcatccgcgcgaagtgcgtcacccggcgtaagtcctccagcacaacggctttcagttcaaactcccggatgtgatgcggcgtgcaaacggtcttgccctttttgccgtaggtgtagcacttgaagttgtactccgcccgcttcatcgtgctggctctgtgcagcaccagcggcttgccgcaatccgcgcagaacaccagtccagagaa

SEQ ID NO: 12162 - DNA, 42304 bp, Unknown
  gut microbiota DNA sequence
gtcccgctgcgcgagctggaacgtggtggagagcatgtctaccaggggaagaacgatcaaataagtcagcaaaacaatggcaaccagcacgatcacgttataggggttggttacgactgccttgacctgattcttgaaacgcctggatttcgaataagactgatctaatggtttcatcgtggacaggatccctctctttcctcttgcgtggaggtgcggcttgctatcgcaaacgttttcagtcctcctggtttttatgatatatttttcataagaaaaagtcaagaatttaatatatatttggcatattataatagaacaagtgtatttattttatgcaccttgcatagttaagccaacgcaacaccaacgcaacgccaacgcaaactattgcgcaaacgctttccattttgtcgcaggctttttcatcgatgcagaaatacgatgatcgcggggcaaacaaatgacccgatcgaaattttacattgcacctctctgagatctgccctataattgggtatcccctacccttccggtgaagaaattgccggatcaaagcgcgcaatgctcacttttatcgggatatccgcgcgtattctgcaccccccgctttcttccgcggcatgatcccggttataacacccaaaaaaacacgaggagtacaaggccatgaaaaatgtaaacgcatataccgggccgcagcggttcgctcatcgcggcttagtccaggctgcgcctgaaaacacgctgggcgctttccagggagctgtggacggcggatacgaggggatcgaaattgatgtccaaatgaccagagatggcgagatcgtcattgcccacgacagcaatttcacccggatgacgctcggccatccagacggcggatcaaatcgccggatcagagatctgacctgggatgagatccagaaaatcgaattgccttacgcaaatcacctgctgagcgaagcaccgccggagcattccgagatccaattgctggcaacgctgccaaagcttgtcatgggtcaggttgaggggcgggattacgaaacggcccttgcggaggatgggcgcatggctcatctgatgcgcttttccgattttgacgcatggctcaccgctcagagcagaagcatcacggtcgaagttgaagtcaaagcccccggccttgctggaccgatactggaattgctcagtcgatctcccaataccggcagctacatcctcttttccggagatccggtctacgtggaagaaatgcaggcggcggttcgcaaaaacggaaagccaaccggtttgcggatgggggctaatattcgccgcttaacggaggaaaccaagcggatgatcccgaacatggatctgtttgaagtggggctcaacgcagatgcgtttacctgcgaggatgttcgctggctgggagagcatgggatccatgtgttctcgaatctgggagattatcccgattggtgggaaaaaatggttacacgcggcgtgttggggtttaagaccaactacgcggcggcgtacaccaactggtggaattcccggcactgagcttcaagcctgcccgattgctattgatttgtcgcaggacgctgaccatgccgggatgaccacacagctgacagtattttatggcctccgaatgtgcggcaggctgtgcctgaccgagctgctataccttggcagcagtctctcttttttcttccctcgcaggcagatttttctcggtttttcacgggtgtgatcctgcgctttttgcggaaatcgcagacgcaaattttgtttgacaccatttggaatcgtgctatgataagagtgaaagcaccccctgcatacgcactttataaaaccggatcatggagggtaatgatatgaattttgaagcgatcaaggctgcggcccaaaattatcaggcggacatgacccgcttcctgcgggagatgatctcccaccccagcgaaagctgcgaggagcgggaggtggcccactgcatcaaggctgagatggagcatctgggctatgacaaggtggagatcgacggtctcggcaacgtcatcggctggatgggcgacggcgagaagatcattgccatcgactcccacatcgacacggtaggcatcggcaacctctccaactgggaggccgacccctacgagggctatgagaccgaggacgtgatctacggccggggcggctccgaccaggagggcggcatggcctccgccgtttacggcgccaagatcatgaaggatctggggctgatccctgaaggctataagatcatggtggtcggctccgtgcaggaggaggactgcgacggtatgtgctggcagtacatcgtcaacaaggtcttcaacggtcccgaggacgcccggagcaagatcgagttcgtaatctccactgagcctaccgacggcggcatctaccggggtcaccggggccgcatggagatccgcgtggatgtgaagggcatctcctgccacggctccgctccggagcggggagacaacgccatctacaaaatggccgatatcctccagaacatccgcgctctcaacgaaaacggcgacggcccctccaatgagatcaagggcctggtaaagatgctgaacccggcgttcaacccggagcacgccgaggacgctcagttcctgggccggggcacctgcaccgtgtcccagatcttctatacctctccctcccgctgcgctgtggcggatagctgcgccatttccgtggatcgccgcatgaccgccggcgaaacctgggattcctgcctgaaggagatcgaggctctgcccgccgtccagaagtatcaggacgatgtaaaggtcagtatgtacatgtatgaccggccctcctggaccggcgaggtctacgagaccgagtgcttcttccccacctggatcaacaaggagagcgccgctcacgtgcaggcgctggccgacgcccacaaggccctctggggcgaggcgcgcatcggccacgctgacgccgaccccaagtacgacgccatgcacctgcggaaccgccccctcatcgacaagtggaccttctcaaccaactgcgtgtccattcagggccggtacgggattccctgcgtgggcttcggccccggcgcggaatcgcaggctcatgcgcccaacgagatcacctggaagcaggacctcgtgacctgcgccgccctgtacgccgccgtgcccggcctgtacaaaacggaggagaaaaccgaggacgccacggaattccgtcagtccctgaccgacaatgacatccagtaactatgttcatgaataggagatggaattatgtctaaaacgatcgaattggcccgccgtttagagcgtttgcacatcaacaatatgtataagtccgacttttattggacttgggacaagactgatgaggaattggaggccatcttcaccgtagccgatgcgctgcgggatctccgggagcggaatcagtccacccggatctttgattccggtctgggtatctccatcttccgggacaactccacccgcacccgcttctcctttgcctccgcctgtaatctgctgggtctggaggttcaggatctggacgaaaagaagtctcagatcgcccacggcgagaccgttcgggaaaccgccaacatggtgtccttcatggcggacgtcatcggcatccgagacgatatgttcatcggtgagggtcacaaatatcagaaaacctttatggatgccctggatgaaggctaccgggacggcattctggagcagcggcccacgctggtgaacctccagtgcgatgtggaccaccctacccagtgtatggcggatatgctccacatgatccaccagttcggcggcgtggagaatctgaagggcaagaagatcgctatgacctgggcatattctccctcctacggcaagcccctgtccgtcccgcagggcgtcatcggcctgatgacccgcttcggtatggatgtggtgctggctcaccccgagggctatgacgtcatgcctgaggtagaggagattgccaagaagaatgccgctgccaccggcggcagctacaagaaggtcgccaccatggaggaggccttcgacggcgcggatatcgtctatcccaagagctgggcgcccttcgccgctatggaacagcgtaccaagctgtacgccgccggcgatcaggcgggcatcgacgcgctggagcagaagctgctggcccagaatgcccagttcaagagctggacctgctctgaggaaatgatgaagcgcaccaaggatggcaaggccctgtatctccactgcctgcccgctgacatcaccggtgtctcctgcaaggagggtgaggtggacgcctccgtgttcgaccggtatctggtacccctctacaaggaggccagcttcaagccctatatcatcgccgccatgatcctcatgagtcaggtaaaggaccctgtctcctgtctgcgggcgttggatggtgccaatgacagccgcaagcggttctaagtctatattttctgttggcccctcataaaagcaacaatagcggggatactgattgcatcagtatccccgctatgattatccattgtcagaaattgtcaggaatgaggagcaacagtatgggtaaacgaatcgtcatcgccctgggcggcaacgcgctgggcaaaaatctgccggaacagatgctggcggtaaaggagacctccaaggccattgcggatctggtagaagccgggcacacggtggtggtggcccacggcaacggcccccaggtgggcatgatccagaatgccttcgccgcctactgcaggcaggagccgtccgccgatgtgacgcccctgtccatgtgcgtggccatgagtcagggctatatcggctacgatctgcaaaatgccctgaaggaggagcttttgaatcgtggccttcagcagggcgtcgccacggtgctgacgcaggtggtagtggatggaaacgatccggcctttcagcaccccaccaagcccatcggcgcctttatgtccaaagaagaagccgagaaaatggcccgcgaaaagggctggcatgtggcggaggacgcaggccggggctggcggcaggtggtggcctctcccagacccttagccgtagtggaattgaccaccatccgggcgctggcggagacagataacgtggtcatcgcctgcggcggcggtgggattcccgtcatcgccacggaccatcaccatctcaagggcgccgccgcagtcattgacaaggatctcgcctcggagctgctggcggagcatctggatgccgatatgctcatcatcctcaccgccgtggaaaaggtggctgtgaacttcaacaagccgaaccagaaatggctggataccctgacgccggaggaagcccgcacttatataggcgaggggcagtttgctcccggctccatgcttccaaaggtggaagccgccgtcaaatttgcggaatccaagcccggccgcaccgccctcattaccctgttggaaaaagcccgggacggcatcgacggtaaaaccggcacccgtatcacctgctgaacttccccgcccctccacagccgaacacgcaaaaaagagacgcccgcaggcgtctctttcgtttccgtttttagttcaggatcagcaagatcaaggtcagcaccaggaacacagcaccaaaccacttggtagcgcgggccagcttagcgtcgatggtcttggccttgttcttggccaggaaagaatcagccacgccgccgatggcaccggacaggccctggctcttgccggactggaacagcacgatcaggatgatagcaaggccgcaaagcagctgcaaaatagtaacaacggtcttcatagtggacaacctccgaacattcattcgcgcacaggcgcagaaaatcatcttacagaagtttataataccatagctttgtccctatttcaagtccattttacaaaaaatatctgtcaaagtctcacgttatttatagaacaaatgtttgcatttcagaaaaagatatggtatactgactgtgagatacattgctccggcgcagctgccggaagctgccaatagaatggaggtcatttcatgctttctgccatgcagcagaggatctatgattacattgccgcctgcatccagacgcaggggtatcccccgtctgtccgggagattggcgaggccgttggcctgcggtccccctccaccgtccacttccatctgaaaaagctggcggatgccggtgtcattgagatcggtgccggaaaaggacgggccatcaccctgacccatcccgccgcgccgtccgtcccggagccggaggaaccggcggaccgggtgcccatcgtgggcaatgtggcagccggcagtcccattctggctcaggagtgcatcgaggactacctcaccttccacaccgggcatcccggggatgttcacttcgccctgcgggtccggggtgaatccatgctgaacgcgggaattctccccggtgatctggtggtggtgcggcagcagcagacctgtaatcagggggagatcgtggtggccatgatcgatgacgaggccaccgtcaagcggttttcccggaaaaacggccacatctggctattgccggaaaatgacgattacgagcctatcgacggcacctacgctcagatcctgggcaaagtggtagccgtggtgcggcagtactgagctacacccgcccggaccggtacatagcccccgctttgggctggatgccgttcagctccagaagctcttccaccgtaacaaaccaatacccctccgcctccagcgcgtccacgatctgaagcgccgcctccacggaggaggggtagatgtcatgcagcagaatgatgtcgccgggctgtacgtcctttaaaacagagcggaccaccatcgccgtatcccggctttcccagtcccgagggtccacgctccagtggaccataggcaccgtaacgccggtgcggaccgccggatcaatgaggccgtagggcggtcgcagccagcagctatccgtgtccaggagtttacagactgcgttttgcgctgcctgaatgtcccggagctgtgccgccggggccgtaccgtccaggcggatatggctccacgtatgggtccccacctgatgcccctccgcctgcatccgcagcaccagatcctcgttccccgccagccgctcccccactaagaagaaggtggcgctggccccccgctcccggaggccgtccagcagccgggtggtagtaccccgccggggtccgtcatcaaaggtgatggctacatagttcggctcctccggcagttccgccggggctgaggccggtacccccgtcacctccgccgccgactctaaaaaaatcagcaaaatcagataaacaaaaattgacagcagcttttgcatccccatcgctctttctttccgtattcagggatagtttgcgcacggggcggaaaaataccgctgtcaaaatcatggaacgcagacaaaaaaggacagccttgttcactcaaggtcagtttgttccggtttcgtgcaaggtcaaagaaacaccgcctcacgaaacataaggcggtgtctttttactcgtttttcaggatatttctgtattttttgtcgataaaaaacgtaaacacaatggatggcatggccagcgcaagcaaaatgatacagagcaaacctgtcccgatattcgcagccgtatgcaccgctatccgatcgaacaacagccacgggacacccagcatcagccacgatgcgcccagcaaacgaacataggttttcgtccagtcatgccctctgtattcacttcggatgacctgaaaacccaatataccggcgattccgtatatgacccaaaaggcactcattatcaaaatcacattcacagagacacgccccttccaattccggttctccggcatttctcacccaaacgggtggaaacccgtcaccacatcagcaaaagtccgactaaagaactgaggatattcagcccgatgatggccgcaaaaatccagaagatcagcttgcccaccgcaggctgcgctttcccgctttgtcttccgctctgccgggatgcggttctctgcacagacggctgtggcgccgcagccgccgtccggcgggtgcccttggaaaggcccatgcgcttgcgttcccggttctcctcatgcagctcctcatggacgaaggacccagcatggccccgctcattgatcccgtccacccggatcaccgcgccgttggcgtcgatggtggtggacttgggcggctggttgaacgcaccgcacttcggacagaaatcatcggtatcataatcgtaggtcttaccgcactcatagcatcgcactttgcgcataacgccacccgccctttcatatctctgcctgtatgataccacagtcccgcccgtttgagaagaattttttgaagtcgataggacgcgaagtaagaccgggtattcattttaggattgccccgcgtcacatattcaagctgtcggacgctcccccaagaggcggatctgccgcccgtcggtgcagacgatcccctgctccttcaaatgccgcagctcccgcatcatggcgctgcggtccgtggcgatgtagtccgccagaacactcagggagaagggcagcgtgaacacatcctccccgctcttctccgtctgctggcggaaatagcacagcagcttttcccgaatggaccgccgggacaggacgtccacccgctcgctgagagaacgggtcttattgctgagcaggttcatcatattgtagaccaacgtactgtggtgggtgcaggcattctcgcagcgtttgaatatgcaggaattgtcgatgaacagaatgtcgcaggcggtgcgggccaccacctccaggctgtccgccgcgaagcccgcaaaggccagatggcggccaaacacgccgccgggtcccatgtcctccagcaccgtcgccacgcccgcctcgtcgatccggatcagggacacctgcccccgctccacaatgcctactgcgtccgtccgggaggctgtaaaatcatagacctgttcctccggcacataagaccgctgggccgcctgaaagcaggtcagcatccggcggtattcctcatagctgatgtcgtggaacagcggactggttttcaattcctgggctgtcagcatcgcagcgcctccttgttgcatttatcactattttttatcatagcaggtccttgccgaaaagaaaaggactatttttttaaatttcatacattgttcaagaaatcgacaatggattcctgtatactgtatatagagaaaaggaacggttccgccgctgtcggcgttcgtaaatggaaaggagcactcagcgtgaacattgcctattttctgcttcccaaaagccggatcgcctatctgtacgatgactttaccttccgccaaggtcttgaaaagatgcgtaaccggggctataccgccatccccgtcatcacccgggacggccggtatgtgggcactgtcagcgagggagatttcctctggcgattgttggacaccgacgatccctccatgaaaaaggcggaggagctgcgggtccgggacatcatcggcagcaaatacccggcggtccgcatcaccgtgaccatggacgcgctgctggaaagcgccatgaatcagaacttcattcccgtcatcgacgatctggataatttcatcggcatcgtcacccggcgggacatcatcagttacttagccaaggaaaacgaaaatagctttgcgccccctgtttccaaaatcggataaacaaacccccgcccaaaattgggcgggggtttcatcgtgccgaaaaagccgtttgtccactgacatccccggagtaccatgtattccggggatggtttcattcaatgctccatcagttcaccggggtcggctttttccgccggatcggcggcgcagggagcggatcaacaggaggatcaaggccaaaatcagcagtacgatccccagcaccacccacgtgatcccgttccaaccggccaaaagctgtcccggtgcgaagctgtcggacacctgcttgcagccgttggcggggtcggcgtagcggtcagggaggccatcctccccgaactgctccagatatgccgccagcgcgtaccattccttcaattcatttccgttttcgtcatagagaatgcaatcggcaaaatctgtcaccggggcgccgtcggcctgcttcggctccagggacagcagccccatggatttgcttttcaccgtgcccagcatttgggcggagtacatccccgtcaccacccggtagagggcgttatcgtcgatctcataggcatttcccgtgccgctttcatcgaaggtcacatccgtcagcgccgcatcgtagacccggttgaagaacatccgcttggtgttgaaggcgtacttggctccggacatatagagctgggccgcaggcatgatgggcgtcacggaggcgtccacctccatggcagccttcagttccttgccggtgaggtacaccgccaccagtgggaagccggaggtgccatcctcccccacgcccatagacagcacgtcaaaggccatggcgacggtcagatctcctgcgggcaggttggcccggagaacgccgtcggccgtcaccgagaccgtatgggggctgtcggcataagcggcgttcagggtgcgatccgcccacaaaaaggcgtcggacaccagcgttccaaggccattgttctcctgcacggcggacgctggcgtgttcagatcgtagtctgaatgagtcagcacctcgtcataggtcaggccgtaccgggccagatacgtctcccccaccatatccttccactgttccacgagcccggcgatctccggattctccgccaccgtttcgtcaatggggatcaggcggtaatccagcaaccgcttttctccgccatcgtcccacgaaaaggtcaaactgcctaaattctggcagtaggggccgctggaaacgatataggtatcgttcaccaccagtggctctgccagcgtggagtgggtgtggccggagacgatcacgtcaatgccgtccacagccttggccagctcctcatcttcggaggacgccagcgaatccccggtgccgctgtgggacaggcagacgatgatctccgccccctccccctttagggtttccacacagcgcttggccgcttcggcggcgtccgtccgggtgaagccggaggtgggggcgcactcatcggaatccacccccatcaagccgaacagaccgtaggtcacgccgccccgttccagcgtcatgcagtccgtcacgccatagtcctccatagcggaccggatgaatgcccggtcggggttatcatcggcaggggcataattggcctctaacagcgtcggcagtacaggggtaacagggccgaaccgctctctgtaagcgtccatattctcaagcggccgggcatccaccagcagtagtcccaccgccgcctgttgagcagccttagcggaattcagcatttccgcgaagccaacgcccttgtggtcaaactcgtggttgccgatggtcacggcgtcgtaacccatggctcccatggtccgcagctccgccgcctgcgtggtgtaaagggtctggatcagggagccgatggaaaagtctccgccatccaccagcagggcgtccggattcatcgcccgttccccgtcgatgacggttttcagccgggcgtagccaccgctctcccctccctccgccgtgggctgggggaggaaatgggagtggagatcgtgggtgaacaggatggtcgtgacgttcgtctcctgagtacaaccttcggccacggcaccgacagggagcgcacacagcgccgccaacagcagcgccagaaaaaatgcagaaaagcgacggaatttcatacagttcctcctgatttacaataaaggaagagagtccgtaaggactctcttgaggctgtcgataaagaggtagattctccgcaacggaaaggaagggtgtgcgcgggaaacccaagaagggtgtcctgcgccattgaaatccttagttttcagaacttttataaagttctgaaaactggctcagcggggagaaaagactttttcgacacgctgaagagagtccgtaaggactctcttctgatttccgattgccagccttacagcccacattatactggccgacccccggcctgtcaacaaacctgcttacaggtccagtcccgtgaggtccgcgaaagtctcccggcggaccgcctcgtaaatacggtccggggtcagcatcaccacggcaggacgaggcaggcggttataattggaagccatggagtagttgtaagcaccggtggtgcacaccgccagaatgtccccccggcaggtgtctcccggcagctccacgccgggctggatgatatccccgctctcgcagcagcggcccaccacatcgaaccgctccatcgaaccggacttatgggcgtgatagacggtgtagcgggactggtagagcgcgtagcggggattgtccgtcatgccgccgtccaccgccgcgtactgcttatagccgggaatgcgcttcacggagccaacggtgtacagcgtcatgcccgcatccgccacaatgctgcggcccggttccatcaggaaccggggcatgggcaggcccagccgttccgtttcctccttcagataggccgccagctccgccagacgggcgggaatgtcaatggcctcatcctcctgagtgtaacgaacaccgtaaccgccgccaaggttcagatctgaaagcgtcacgccggtctcgtcccggatctgcgccagaaacggcaccataatatccagcgtccgctggtacacatcctctccgaacacctgcgagcctacatggcagtgcaggccccggaggtccagatggggcagcgtcagagccagcttcaccagttccatggcctgtccggtctccaccgccgcaccgaatttggagtccacctttccggtgctgacggcctcgtaggtgtgggggtcaatgcccggcgtcacccgcagaaggatcttctgggtgacgttggcctctgccgccgtcttttccagcgctaaaagctcctcccggttgtccgccacaaaaaagccgatgccctgactgacgccataggcaagatccgcatcagtcttgcagttgccgtggaagtagatccgctccgccgggaagccggcgctgagagcggtgtacagttccccggaggataccacgtccacgcccataccttcctccgccatgatgcggtacatctgcttaaaggacgccgccttgctggcgtacagtggcagagagccggggccgaaatggtcacggaacgcctgcagatacatccggcagttggcccggatccgcgcctcgtccatcaggtagaggggggtgccgtactccttggccagttgggtcacgtcatatccggcgaaggtcaggactccctccggcgtccgatcgatgttgttggaaagcatttggactcctccttagtgggaaaccggcgttgcccggcagtccacatttttatggtttaaatagtaacacattttttcttgataaggaagcggccttctgttcaattttcgacggattttgaccggcttttccgtgattttaccgcttatgcggctcattttttccacaaagccttagtggggggacattcctgccgtgtttgtcttttccacgtggaatacgttggatagtgcttcagcactttaggctattcctcgattccgtgcaaaaaccaaggccgcccataggacggccttggttttctgtatatgcgttaatccatgggagcaccgcacttgggacagaacttactgtcagactccgcgccgcacaccgggcaaatcttcatgcccggctccgccgcagatacttcactgtgctccaccttgatggcgttcttctgctcctccagctccgcgatgcgggccttggaagcggcaacggcatccgccagttcctgaacgccctccggcagttctccctcatactcgttgatgaaccactcaccgatcaggcggcagttcttctcgatctcccgctgctcaccggcgatggccacggagatcttggtcttttccgtggtctcccgggccttatccgcggcgacagccgccacgtccttagccttgtcagccgccacagcggccacatccttcgccttacggcccaattcctcaaaaaacgccatcgtaaacgctcctttcacggccggtctatccagccgaatgattcatggccttagtatacttcccttttttcaaaaacgcaacagcgttcacacattgttttcaatccaactccgggagcgctccaccgcccgatgccagcgggccagatccgccagacacgcttcctcctcccgctggggacggaacacgcactggctgcggcgcagagctgccaactcgtcaaagccgttccacacgccaacggccagtcccgccagcgccgccgcgccgaaggcggtggtctccacctgagcgggccggtccaccggcagccgcagcagatccgcctgaatctgcatgagaatatcgctgacggacgcgccgccgtccacccgcagttccgtcaagggacagggggcgtcggcattcatcacccgcaccagatcggcggtctgataggcgatgcactccagcactgcccgggcgatatgggccttggtgctgccccgtgtcaggcctacgatggtgccccgggcgtacatatcccaatagggcgcgcccagaccggtaaaggcaggcaccaccacaacgccgccgctgtccggcacgctctccgccagccgatcacactccggggcgctctggatcagccccagctcgtcccggagccactggatggtgctgcctgcgttgaacacgctgccctccaaggcgtagacggttttccccgccacctgccagcccacgctggtcacaaggccgctgcgggaccgcaccggcgtatcgcccacgttcatcagggtaaagcaaccggtcccgtaggtgttcttcgcctgaccgggagtaaagcaggcctgtccgaacagggcggactgctgatcgcccgcgctgccgcacaccgggatgcccgccagatcctccaatcccggcaagccggaagccagatggccgtagacctcgctgttggacttcggctccggcagcaggtccatggggatgtccagcgcggcacagagcgccgggtcccattgcagggtatggatattgaacagcatggtacggctggcgttggaatagtccgtcacatgggccttcccgccggtcaggttccagataagccagctgtccaccgtcccggcgcacagttctccccgctccgcccgctggcggacgccgggaatgttgtccatgatccacttcagcttcgtaccagaaaaataggcgtcgatcagcaagccggttttttccgtcaccgtttctccaaggccatcggccttcagccggtcgcagatctccgccgtacggcggcactgccacacaatggcattgtacaccggctgtcctgtccggcggtcccacaggatcgccgtctcccgctggttggtgataccgacgccggcaatggccttggggtcgatatgggcagcgtccaccgcctcggacagcgcccggactgtggtggaccaaatctccatggggtcgtgctccacccatcccggctgggggaagatctgccggaagggatattgggcctttgatacgatctctccccggctgttgaacagaatggcccgggaggtggtggtcccttgatccagtgcggcaatataggtctccattgggattcctcctctggtatttttcaaaaaagcgtgttacactatgataaactgcattttatcatacacaggaggaaatttccatggtgaaacgtgaatttacctttccgtccgccgacggcaaaaccgccattcacgccgtggagtggctgccggagggcgcgccccgggccgtcctgcaaatcgcccacggcgtttcggaatacgtgctgcggtacgaggacttcgccgggtatctgacagagcgtggctttgccgtggtgggcaacgaccatttgggccacggcctgtcagtctctgacggtgcgccccggctgtacttcggtcccaagggcagctggaactgggtggtggaggacatggagagccttcggaagctgacccaccggcacttccccaacctgccctatttcctgctggggcactccatgggttccttcctgacccggacttatctcatccgctatcccggcacggtggacggcgctattatcatgggcaccggctacatgagcgccgcatcaacggcggccagtttggccgtcatcaacgccgaatgtctgcgaaacggcgagtccaggcccagcgccgtggccacaaaagcctccttcggcatttacaatcgccgcttcgcccccaaccgcacaagcatggattggctgtccctgaacccggacaacgtagacgcttatctgaaggacccgctgtgtcagggcaacgcctcggcggggctgttccgggagatgctctccggcatccgctttgtctgcaaggaggacaacatccgcaaaatgaaccaccatacccccatcctcttcatctccggggccatggatatggtgggcgactgctccaagggcgtggagcgggccgccgccgcgttccaaaaggccgggatgcgggacgtgacggtgaagctctacccggagctgcgccatgaggtcttgaaggaggattgccgggagcaggtctacgacgacatcgaccgctggctggagggtaagctggcgggcgtccgctgaggcgcttcccattctgttttgtacgagactgtcgataaagcagtaagttttccgcaacggtaaggaagggtgtgcgcgggaaacccaaaaagggtgtcctgcgccattgaaatcctaagttttcagaacttttataaagttctgaaaacttgctcagcggggagaaaagacttttcgacacgctgaacccggactgcttttcgcagtccgggttttcatcttcctcttgacaatatcgatattcgatagtatgctgtaaatagaaatatcgaatatcgatagtaaggaggcgggactgtggcccgggagaaatttcaaacactgacggagcagatgttctatgtgctgctgaccctccgggaggaatgctgcggcgccgacatgatggcccgcatctccaatctcacccagggccgggtgacggtaggccccggcaccctctacaacctgctggacagctttcaggccgccggctggatcatggagacgaaaaccgagggccgcaggcgaagctatctcatcacccccgccggggagcaggcattggccgaggaataccagcggctgcaaattctctcggaggattaccgcagctacatgggccggagaggagagatcgaatcatgaagctttttgacagacagaaaaaacaggagatcaatctctacgcctactatgaccacgccgggatcgtccgccatctggaggacatggcccgtcagggctggcagctggaaaaggccgggtccgtgttctggacctaccggcggtgcaagccgacagaactgcgctatgccgtggtgtacttttctaaggccagccagttcgacccggagccgccggcggagcagcgggagttctgggagctgtgcaaagccaccggctgggagctggtgaccaaccgctatcagatgcagatcttccgcaatcccgcgccggacgccatccctattgagacggaccctgtggtgcaggtggaaaatgtccgcgccgccatgaagaagggctctgcccgggccaactggtgcctgctaatctgttccctgcttcagctctggctgcaattccgctccgcctacaccatccgggattttttgacgcagggcttcgccctgtcggccgttctcatctggctgatgctgggcatcaaggccgtcgtggagctgatcggctactaccactggtgccgaaaggcccggaccgccgccgaggaagagggcgtcctgctctcgccccggacccgcaaatggtggcagatcttgcaaattttggggttccttgttacggtcacccttgctctgtcgctcccgctgctgaattcttctcccagtccgtccaccctgatcatccttgcggcaagtcttgcttatgccctgctgttggcgctgatcgtcaacggcagccgtcagcttatgaagaaaaaaggcttctccgccgaagcaaatatggggtttaacatcctgatcgccgtgatcggctcccttgtccttatgggcggtcttgtctggacgggctttcgcattgccaaggccccctcgctccagggccatatcaacgcggagacccgcacttctcccgcttatcccgccggtgacacggagcacacctacaccgtctatcacgatcccctgcccctgacggtggaggacctggtcggagaaacagtctacaaggactattcctgttaccgggagattcaaggttcgcccctgctgacggaatatacttacaagcaggaagtgcccttcgtgttcagcatctccgagcaggacggcccggaattgctctatgagatctatgaggtaaagctgaactgcctttacgagccggtgaagcagtccttcttcacggacacggtttacaatatccccggtaggttcaaattcgcggtttcccaaagctggacgccggtggacgccgccccctggggcgctttggacgcttatcggttcatccgggaggacaacacgcccatagggaatttcctgctctgctacgccgaccgcttcgtggagatccggtttgacccctggtatgacggagccgcgcccactgaaaagcaaatggcgctggtgggaacggtattgggcagcgggccgctgtcctgacgaaagttccatacaaaaaaccactacccggagcgatctgctccgggtagtggttttcgttacacttattgattgtccagcttttccagggcagacttggcggccatctgctcggattccttcttgctgtggccgctgccctcgccgatggcagcgccgttgagctgcacctcagtgacgaaggtcttggcgtggtcggggccttcctcccgcaccatgcagtaggtcagctcctgaccggccttccgctggatgtgctcctggagcagggtcttgtagtcccggcggcgttcctccaccacctcttccctctccacgtccagcagaacccggtggatcagctccgacgcggcggtaatgccgccgtccagatacacggcggcgaacacagcctcggttgcatccgccagaatggaggcccgatggcggccgccgccggcctcctcacccttgcccagcttcagatagctgcccaaattcagcttctgggccacctcgtgaaggctctgctcgcacaccagcgctgcccggatccgggtcagatccccctccggcaggtccgggtgccgggcgaagagatactccgccgtcacaaagcccagcacgctgtcgcccaaaaactccagccgttcgttgctgccaagcccctgggagcgatgctcattcgcgtaggagctgtgattcagcgcctcccgcagcagttcttggttccggaaggtataatttaattttttctccagttcctgcatccctgttcacctcataaggaagccccgcgcatggcggggccactcttttttacttcagcttggaagcgacaaaattcaccgcgtcgcccacggtcttgagtccggccagctcgtcctcgttggcctcacccatatcaaattcctcttccatggccatgaccagctccaccaggtccacggaatcagcgcccagatcctcctcgaaagaagtatccatggtcacctccgcaggctccattgcaaactgctcggacaccagatcccgcatcgtctgaaagatttcatcaactgacataccaaattcactcctatgagacattcaaaaattcatttgctttttagcatgaagcaatcatacggcaatcccatagccctgtcaagggggcaacccttttttatccgttcttttccaccttcatcacgtcgatatgggcctccacgtccgcgatgatcccgctctgggcgtattccaccgcccggaacacggcgttgcggatggcccgggcatcagaggagccgtgggccttcagcaccggcttgctgatgccaaggaagggcgttccgcctacctcgctggggtccagcagctttttcacgttgcccaggctgtccttgaccagcagggcgcccagtttgctcttcgtgctggataaaaacgccttcttcatctcgcccagcagcagcttagcggcgccctccacggttttcagcaggatattgccggaatagccgtccgccacgatgacgtccgccccgcccagcagggcggtgttggcctcgatgttgccgatgaagttcagacggccctcccggcccgcttcctctaacagggcgtaggtctcatggcggagggtatcgcccttggacggctcggcaccgatgttcagcaggcccacccggggcttctccacccccatgagccgctgggcgtaaaaattgcccagatacgcaaattgcagcagatattccggcgtacagtcggcgttggcgccgcagtcgcagagcagagcgcggcccgtagcggtggggagtacaggccccatggccgcccggcgaaccccccggatccgcttcaccagcagggtggcccccgccagcagcgcgccggtggagccggcggagacgaaggcgtctccctccccgtttttcagcatggtcaggcccacggtcagggaggaatccttcttgcgcttgaaagcggtggcggggtcgtcgcacatctccaccacctccgtggcgttcacgatctccacgccctccggcaggggaccggtcaggcaggcccggatgtcctcctcacggcccaccagaacgatgtccgcgccgcactgggcatgagcctccaaagcgccctgtaccaccgcctgaggggcgttgtcgccgcccatggcgtccaaaatgatcttcattggcaggttcctcctttcagggggacggccgccgtccagtttcccggccggcgggtttattcttctgtgttgcgggcggtcaggctaaaatatctgcctttttctcctccaggatggccagcgcccgctgggagatttcggcgtttttatttctcttgcccttgacgaaatggtcaagaggcgggatgatgccgaagttgatgttcataggctggaactgggtcacagactcgttggaaatgtacagtgccagcgcgccgatggccatttcccgtgggaaatccaccggaggctgtcccttcaggcggcgagccgtttcaatgcccaccaaaaagccgctggcggcagactccacatatccctccacgccggtcatctgcccggcaaaggcgatgcgtggttcctttttcagccggtaataccggtccagcagccggggggaatccaggaaggtgttccggtgcatgacgccgtagcgcaggaattccgcgttgtgcagagcggggatcatggaaaacacccgccgctgctccgggaatttcagatgggtttggaagcccaccaggttatagacgctgccctcggcgttgtcccgccgcaactgcaccacggcgtagggccaccggcctgtccggggatcgtccagaccccgggatttcagggggccgtacagcagcgtgtcatggccccggcgggccatgacctccaccggcatacatccctcgaacaccatgctgtcctcaaagccgtggacctccgcctcctgggcggtggtcaattccttccagaaggcgtcatattcctcctgattcatggggcagtttacataatcgtccgtgcccttatcataccgggaacccatccaggcgtgttccatatccacgctctcagcagacaccagcggcgccgccgcatcaaagaagtggaggtcgctgtgctcccccagcagcccttgcagcgtttccgccagcgcgtcggaggtcagggggccggaggcgataatgacctccccctccgggatctccgtcacctcgccggggatcacggtgatgttgggatggctgcggaccttctccgtcaccagcctggcaaagccgtggcggtccactgccagtgcgccgccggcctccacccgggtggcatcggcgcattgcaggatcaagctgtccagccgccgcagctcctccttcaaaaggcccacggcgttttccagacccgcgccccggagggagttggagcagcacagctccgcaaagtattccgttgtgtgggcgggggtcattttctccggtttcatctcgtgaagctccacctggatcccccgctgggccagctgccaggcacattcgctgccggcaaggcccgcgccgatgactgttacgttcatgctcaaaatcctttatctccgggccggaaaggggtcattccgccgccttttcggcctttttcgttgtctttttagtagtagtttttttcgtcgtggtcttggccaccgctttctttaccgcagcctttttagcggcgggtttcttttccgcgtcgccgtcctccgcctttttcgcggtctttttcacggtggttttctttgcggcggtcttggttgcggtctttttggcagcggtcttcttggcgggcttttcctcagcaggtgcgtcgctctcgccgggggcctcctccgcgttggcggatgcctccacctgcttcttgggatagccccgcttgtcctccggcaggaagttggcgcactccggattgatgcagtagggccgcttgtagcccttgcccgcccgcttgaacatggtcttgccgcagacgggacaatcatccttcaccggcacgtcccacgtcatgaaatcacaggtcgcgccgccggctacccggttgttggtgtgctcacagcagtagtaggtgtactgcttgccggatttccggctggtgccggtgcgcttgaacagccgcccgccgcacttggggcagcggcccggcatctccaccaccagaggcatggtgaaattgcactccgggaagccggggcaggccaaaaaccgcccgaaccggccggacttcaccaccagattccgcccacagacggggcagatctcctcggagacctcgtcaggcaccttgatatagacgccctccagatccttctccgcctttttgaggttttcctcaaaatcgccgtagaaatcccggagcacggacttccagttcaccgtgccctcttccacatcgtccagctttttctccatgttggcggtgaatttcaggtcggcgatgtcgctgaagcgttcctccatcagctgcgtgacgacccggcccagattggtgatgtggaggtacttgccctccttcaccacatactcacggtccaaaatggtggacaccgtgggggcataggtagagggacggccgatgccctgttcctccatggcccggatcagcgtggcgtcggtatagtgggccggaggctgggtgaagtgctgatcccggccaaagcccttgaggtccagcgtctccccttccgtcagcggcggcagggtaggttccttttcctccttatcttcgtccttgccctcctcgtacacggcggtgtagccggaaaacttcaggctggaggagctggtgcggaagctgtgtcccgcagcatcgatctccacggagacgctgtcatacacggcgttggccatctggcaggccacaaagcggctccacaccagtcggtacagacggtactgctcgccggtgaggtcctttttcagcatctccggcgtccagttcacgttgctgggtcggatggcctcgtgggcgtcctgagcgctggccttggccttatagtggttggctcccttggcgggatagtactgctgaccgtagcggcccacgataaattccttagcggcggcaatggcctcttcgctgatgcggagagagtcggtacgcatataggtgatcagacccacggtgccctcgccctcaatatccacgccctcgtaaagctgctgggcaatggccatggtgcggcggggggtcatggacagcttgcggctggcctcctgctgcatggtggaggtggtaaaggggggagagggagaacggttcttatccgtccgcttcacggacttgacggtaaagacagcattcttcgtctcctctaccacggcttccacctcggcggcggatttcagctctgccttcttgccgttcttcccgtgataccgggcggagaagggcagctttttcacgtcattgccggtgaggttggcgtccagcgtccagtattcctccggcttgaaattctcgatctcccgctcccggtcatccaccattcgggtggcaacagactggacccgtcctgcggacaggccccgcttgatcttcttccacagcaggggactgagctgatagcccaccagccggtccagaatacgccgggcctgctgagcatccaccagattctggtcaatgtcccggggatgctgaatgctctgacggaccacgttcttcgtgatctcattgaaggtgacccgctttgttttcttgtccggcagatccagcaggcttttcaggtgccagctgatggcctcgccctcgcggtccgggtcggttgcgaggtacacggtatccgccgccttggcggattttttcaggtcggaaatgatggcttccttccccttgatgggcttgtagaccggctcgaagtcattgtctacatccacgctgagtttgcttttctgcaagtcccggagatggcccatgcaggcctttacctcatagtccttgcccagatattttccaatggttttggccttcgcaggagactccacgatgaccaagctctgttttgccatagttacctccggcggctttgttcaaaagccgcgttttcatattctgatcgtgctcgggagcgcgtttattctgtaagggtcacggcgcgggtatagtgcttgcccgcgtgctggaccacatattggtcgatctcaaggaccgtcagggcggagagcacccggcgggtggggatgtccaccagctcggtgaggtcatccacctgcatgggctccgtatcggaaagcgcttttaaaatggcgatctggtcatccgtcagctccacatcgccgcgggacaggctgagggcaggggccacaggcttcggctccggcaccgtccgggcctgatagcccagagtctccggctcctcccgggcctcttttaaatctaaggcaaagcggccctcgtattcccgcaaaatgtcggacgcatccgttaccagccccgcgccgtcccggatcaggcggttgcagcccacgctggtaggcgcgtcgatggggccggggaccgcaaatacatcccggccctgctccaaggccgtcatagcggtgatgagcgcgccgctccgttccggcgcttccaccaccagagccgctaaggacagaccggaaagaatacggttccgcaccgggaaatgccccggcgccggctccgtccccggtgggtattccgaaaacagaacgcctgatgccgctacatcttcatagagataccgactctcataaggataatggacgtccaagccgttacccgccacgcctatggtcacgccgccggccctgagagcgccccgtgtggctgcggcgtcgatgccctttgccagaccgctcaccaccacggctccgccggaggccagaccaaagcccagcttttccgcgcaggcaacgccgtagggcgtacagtcgcgggtgcccaccaccgctacgctgagcagatcgtccagcagcggcagcttacctttgtaatagagcaaagccggtggatcgtagatgtttttcagccgtccgggataggcggcgtcggaaaaggtcagaagctgaatatccagccgctgacagtcggcaagaattttgtcagccggggcgagatcatggttttccagcagcttcagctgaccggggtcggccccctccgtcagcatcagctcgtcaggatcggcgtagaaaatgctctccggatcgccgaaacggcgcagcagcgccagcttggtctgatttcgcaggcccttcagttccgacagccatacccaatatttcagcatatcccccgtcctccccgctcagtcattccgggcggcctcccacagcaggaccgtggctgccgctgccgcgttcaacgattcgcagtgctcgctcataggaattttgattgtccggtcgcagagggccaacacgccctccgtcagtccccggccctcgctgccgatggcaatggcgcagcggttgtaatccaccgcacgggcgtccagggtatcctcccgcagcgccgcgccgtaaagaggaatgccgctctttttcagcagagcggacagctcctccgcccccaccgtccacaccgggcagcggaacaccgctcccatggtggcccggagggtcttggggttatagagatccgcgcagccgttcaccagaaacatcccatcggcatggaaggcgtccgccgtgcggaggatggtgcccacattgccggggtcctgcaaggtgtccagcaccacatagcggcggcccgccagcgttgccggcagcggctccgtgtggatggcgcaggtaaacagcgtcccctggggggtctccataggcgaaacggacttcattacatccgccggaacctccacctgccgcacacccaagggcagttccggcaggtctacccccgccgtagccacaacggtgcggacctccgccccccacagcagcgcttccttcaacaacttgggactgtcgcagaggaattctccccgctggcggcggtaggacgcagaggccgccagcttccggagatgggtgcacagcggattctgtctgctggtgatgatctccataggtcggcggctcctttctcattctctggtcgtttgattggatgcatttgccggcaacagggtccggcttccaaatttgccgtatccgttcccggttttgggcgaatggcaggcaatttgccctaccgcacggaaaaacaggcgtttttccctgtctgtcggggtaaatctaaacgcttactatattaaatgtatccaccagaattgtcaagggaagtttgtttgaaggccgatacaggcacggttctcattttttcatgggaaatcggctatttttttatggtacttcacattgacagcacttatggagaatgataccatcagaatggcaaattgatcggacaggagcgaaaccgaaatgacattggatcaattaaagatcggtgcctccggcaccattacctctgtgggcggagacggccctctgcgctgccgcctgctggatatgggactgattccccgcacgcgggtcaccttacagaagatcgcccccatgggagaccccattgagatccgggtccggggctacgagctgaccctccgggtggaagaagccgaaaaaattgaagtgaaggaggacgcgtgatggtttttgcgttggtaggcaatcagaactgcggcaagaccacgctgttcaactccctcaccggctccaatcagcacgtgggcaacttccccggcgttaccgtggatcagaaaatgggcgagatccgggatgaaaagggctgctccgttgtggacctgccgggtatctattccctgcggccctatacccaggaggagatcgtttctcgggacttcatcatcaatcagaagcctgacggcatcatcaatatcgtggacgccaccaacatcgagcggaacctgtacctgacccttcagcttttagagctgcgggtgcccatggtgctggccctgaacatgatggacgaggtccgggccaacggcggctccatcgacgtgcggaaaatgagccaggcgctggggatccccgtgatccccatcacggcggccaagggcgagggcgtcagcgagctggtagatcaggcgttgactgtggcccgcggaaagatcctgcccaaggtgacggacttctgttcggacgactctgccgtacaccgctgtattcacgccgtggtgcacctcatcgcggaccacgctgaccgcataggcgttcccgcccggttctgcgccgccaagctcatcgagggcggcgacgatctggcggaccagctgaagctggatgaaaacgaaaaggaactgctggagcactgtatcgtccagatggagacggagaccggtctggaccgcaacgccgcactggcggatatgcggtacagctttattgaaaatgtggtgagcacctccgtggtgaagtgccatgagagccgggaacacgcccgctccatgaagttcgaccggatcctcaccggccggtacactgccatccccacctttttggcagtgatgctgctgaccttctacctgaccttcaacgtcattggccagcggctatccgactggatggacgtggggatcgacgccctgaccgccctggcagaccgggcgctgacggcctacggcatcaatccggtggtccacagcctcatcatcgacggcatttttgccggcgtaggcagtgtactggtattcctccccatcattgtgaccctgttcttcttcctgtccattctggaggacaccggctatatggcccgtgtagcctttgtgatggacaagcctctacgaaaaattggtctgtccggccgcagcatcgtgcccatgctcatcggcttcggctgctccgtgcccgctatcatggccacccgcaccgtgtcctctgaccgggaccggaaaatgaccattctgctgacgccctatatgagctgctctgccaagatctccatttacgccttcttcaccgccgccttctgccccaagtatcaggcgctggtgatgatctccctgtatctgctgggcattatgatcggcattgcggcggccctcattatgaatcagacggccttccggggcaagcccgtgcccttcgtcatggagcttcccaactaccgccttcccagccttaaaagcgtggctctgctgctgtgggaaaaggccagagactttttggagcgggcctttaccgtgatttttctggccaccatcatcatctggttcctccagagctttgatacccggctgaacgtggtcactgacagcgctgacagtttgctggccctcatcggtcagtggatcgcgccggtgttcgcccccctgggctttgcggactggcgctgcgccacctccctgatctccggcttcatcgccaaggaatccgtggtcagcacactggagatcctgctgggcggcgccgctctctccactctgttcgccagccgggccgccatcagctttctggtattcaccctgctctatactccctgtattgcggcggtggccaccatccgccgggagttcaactccaccctgaaaaccgtgggcgtggtgctgatgcagtgctgcgtggcgtggatcgtggcctttatggtctatacgctggtggggattctgtgatgaacactttggattggctgctgctggcactggtggcccttgccgccgtcgccgcgatccgccgctggcgggaaaagggcagctgcggctgctccggagactgccggcactgtgccggcggctgtccgaaaaaggagtcctgaaaatcgtccccgccggtaattttcttctcaggtataacgaaacccccgcttgcgagacaaggctctgtctcacaagcgggggtatttttcattccttgacgcggtgtttacttcgttcccatcagggcacggaagcgccgggtcgatgcgttccgcacgcagctccagacctcccgggtggcgcagatcttgtccgcgcaggtcaccacaacgctctccttgtacttgggcggcgtggggttcaggggaaacatatgccggtggatgatattcgcttccagcggattcaaaccgaaatcccgctgggcgttctccatggccttgcgggcgtggtagaacccgtggagtttgtggtcccggttgtgttcccgccagttgtagagaaaatagtcatggagcagtgctccccgcaccagactccgccaatccacgtcccagccccatttctgagccagacggatgctgcaaagcgtcaccgccacggaatgatcgtagcaggtggtgctgccgtgctgggggatcgtgcgctcctgatccatggtaggcgaacgcagaatatcaccgccgtattcccatagcatttcttctgcagtcatatccgctcacctcttttctgtccctgattatagggacaaaaccagagaaaatccagtagaaaatgcaacagagctttcctgcccgtcttcacatttctttgtgcggtttgccgtttttgttggaaacgtcctgctaatttttagctttttggatgaaacagcaaatttccacttgacattttccctcgggcggcgtatgcttgcgccaagttcaaaaccaaaaccgatgacacggagtaagtacacgaaagggcatttcccccagcgagctgccggtagtgaaagggcagcggaaaggcgttcgtggaatggaccgtggagggcgggccgaacagggcagtttagtaggcaccgacgggcttttcccccgttaccaaggaaagacgtgtgatggcacgtcgccgagcggacgattttcgtcaatttgggtggcaccgcagaagtttcaggcttttgtcccaaaggaacctatcaacaggttcgtttgtggatgaaggtctttttttgatgccttctccacaaaggaccgtttacgagctatgaaaggagaacgcaccatggcagccgaaatcaacaacattccctacaaaatttatctctccgaagatgagatgcccaaggcatggtacaatgtccgggctgacatgaaggtcaagcccgctcccctgctgaatcccggcaccggaaagcccatgggctttgaggacctgcgccctgtgttctgcgacgaactgatccgccaggagctggacaatgatgaccgggagatccccattccccaggagatcctggatttctacaagatgtaccgtccctctcccctggtacgggcctactgcctggaaaaggccctgggcacccccgccaagatctactacaagtttgagggcaacaacacttccggctcccacaagctcaacagcgccatcgcccaggcctattacgccaagcagcagggcctcaagggcgttaccaccgagaccggtgccggccagtggggcacggccctgtccatggcttgcgcatacctgggtctggactgcaaggtctacatggtaaaggtcagctacgagcaaaagcccttccgccgggaagtcatgcggacctacggcgcctctgtcactccctctccctctgagaccaccgccatcggccggaaaattctgcaggagcaccccggcaccaccggctccctgggctgcgctatttccgaggccgtggaggtcgccacctccacccccggctaccgctacgtgctgggcagcgtcctcaaccaggtactgctgcaccagagtgtcatcggcttggagaccaaggcggcgctggataagtacaacattgtgcccgacatcatcatcggctgcgccggaggcggcagcaacctgggcggtctgatctcccccttcatgggtgaaaagctccggggtgagaaggactaccggttcatcgccgtggagcccgcctcctgccccagtttcacccggggcaagtttgcctatgacttctgcgacaccggcatggtgtgccccctggccaaaatgtacactttgggcagcaacttcattccctctcccaaccacgccggcggcctgcggtatcacggcatgagcagcatcctctcccagctgtaccatgacggctacatggaggccgtgtccgtggagcagaccaaggtctttgaggctgccgagcagttcgcccggatcgagggcatcctccctgctcccgagtccagccacgccatccgggtagccatcgacgaggccatgaagtgcaaggagaccggcgaggaaaagaccatcgtcttcggcctcaccggcaccggctactttgacatggtggcctatgagaagttccacaacggcgagatgacggattacatccccactgacgccgagctggaggccagctttgccaccctgccccaggtccccggccaggactaaagtcccctccaactcttaccctctcaacacacaatcgcccagccgcgccggatttccacgcaccgcctttacccgcaaggggtatgcagcatccataaagcagcacagccgttaacggctgccctaccttaccgttgtgaaaatcttaccgcttttatcgacagtttcaagcaaaaaccatccccgcaggcagttgcctgcggggatggtctgtttttcattaagagttgctgcaaagaacccatcctatgtccgatccggaaaagttcactgttcctgggcagtctcggacagctttttcagttcttcctcctccagcacccggtaggccaccttgcccaccagggtcttgggcagctccgcccgaaattcgatgtcatagggcaaggcgtatttcgccacatttttgcggatgtaggtcatgaggacatcctttgtctcctcattggcggaaacgccgggcttcagcatgacgaacgcctttaccttctgcattttcagcttatccggcacgccgatgacgcagctcatctgcaccagctcatgagcgtcgaaaatattctccatctgagaggggtacacattgtagccgctggtgacgatcatgcgcttgagccgctgccggaagtacacaaagccgtcagggtccatatagccaaggtcgccggtgtggacccaggcaaggccgtcctcatgggtctggagggtctgcgccgtttcctccgggtggtggagatagcccatcatcaccgtaggcccagacaggcagatctcgccctcggtgccgtagggaacctccttttgcgtcccgtgctccacgatcttatagtaggtgtccgggaaggggatgccgatggagccttctcgggagatgtggtacggcgtcaggcaggaggcggtaacgcactccgtcaggccgtagccctcccgcacctgaatggtggcatggtgatcaaagaggaactggtcgaaccgctttttcagctctacggacagactgtcacctccggaataaacacccttcaggcagctcaggtccgcgtttttcattttgggcagccgcagcagcgcctcgtacagcgtggggacgccggcaatcaggttgcagcggtatttcaacagcagcttggcatagctgtccggggtgaaccggggcaccaggatgcagcagccgccgctgaccagcatggagtggatggacacgcccagaccgaagccatggaacatgggcatcaccgccagcattttgtcaccggggcggaacatggggttggtggcgatgatctgttttcccagcgcgttgaagttcagattcgtaagctggatgcccttggtgacgccggtggtgccgccggaatagaggatcaccgcctcatccccggctctccgctctgcccggtatgtccaatggtagccgcggccccggcgcaggaattcgttccagcgcagcaccggcgcgtccttgggaattttggcctgcttgcggccctcggtgagcatatagcccacccgcaccggcttggaaagggcgtccggaatggaggccagaatgatgttgtccagtgtcacattctgacggatggcttcaaatttatggtaaaactgatccagcgtcacagcaaagatggagccggattcctttaagtaaaactcgatctccttctcgctggagaggggatggatcatattggccgtggcccccaccagattgatggcgtagaacatgatcaccgcctgggggcagttgggcatagccatggtgatccggtcgccgggacgaacgccggtggccttcaatgcccgggcgcagaggtcgatttccgccgccatagcgcggtaggtggttttccggcccatgaacacataggcagtgtggttgggataggttcccgcgcagcgctccacggcctcatacatggtgcagtccgggtaatccagatggggcggcaccacgccgtaaacattcagccacggcgctttcacatgggattcctctgcgatttttgtctgttcagcagtcaaggtcgatggcctccttcaagggtctgtccagcagctccgggtggctcatcaggtgctgcacaattttcagggaacggccgaaatagaagccgtccgccacccgttcgtccaaggtgatccccagttccaccacgtcccgcacctgacgggtgccgtcagcggcgatcttctccgccttgtgcatggtgccaatggcgatcatgatggaattggtgccgtaattgttcaaatggtgatacacgctggggcattggatactccccaggttggtgaggaacacgctggcaaagttggggtcatcctccttcagcacagcaggcaccttcccatagaaatccagagttttcagcccccagaagaaaagcatcaggaaccagcggggcatgatcttcaggatatccatggcaccgttggcaccgccgctcttctccgttcgggccttgtggaccttccccaccacctgacgggtcacagcggtcagggtccaatcctccggggctgtggccaccaccagtttttcctcactgtggtcctcaaaccgctttttcgccacaaagccaagggtgatctcgtggcgctggtaataccgccgtccggaaatgtaacggttcagatccggccgcaggtatacggttttggcaacggccatgaggatacagtggaacagggtggtcttgtattcgtcctctccccggttcttttcctcgatatagcgcagggcctccgtcacgtcaaattccatattgacgtagacctcggcgtcggtgcgcttattcatcagatggggcatgatggcgtgaagcccgtccagatcccggatccagcaggcatccggccggtcaccccatcgttttgttcgtttttccataattcgctccctttttgccatgcaaaagcatagcaaaataagaaatgtgcctttcccgcgcccctgcggggcaaccggaatgctgcgcgaaaacttcatgcactggcatttgtgcattttgtagcgcactgcttatacacgaaatttcatgcggtttcctgccatttgccggaaaatccaagcaaacgggataccgtgcacagtatagcacaccgcatcccgtttgtcagcaattttataggttcttacagataccggtccagcttctgccagagggcttcgcccttctgcttcagttctgtgcggaaggcccgccggccttctctgtgttcttccaagcgctcctgaaattcctcccggaactcatcccggcgctcctggatgccttcccggtgctcatcccagccctcacggtaccgctctgccaggccatcgcccagatcccggagctttgccagcgcgtccatcatgctgccctgagcattcaaaacaccgtccatgggcctatggtgatcgtcataccggcccatgcggtagttctccatcacaatgccatagcgctctctggcccgctttaccgcatcgccccaggagagatacagccggtccccggcctgacagcccacctgagccatacattccggttgcttgcagatctcctgcaattttgcggccatggacccggcattttcatcaatgaggaagccgtccaccccatcggtcacgccctccgccgcgcagctgccgtcgatcagcactgccgcaaggtcgcaggccgccgcctcccgcaccaccagcccgttggtgtcatagctggagggaaacaggaacagatccgcccggcagtaccaggcccgcagcgtctcccgctgggagatagccccggtaaagatgcacttgctgcccaagggctttgcatactcctgcacctccgccgcgtcagcgccgctgccgatgaacaccatgcggaaatcctgacccccggcctgaagcagcttcagtgcgtccagaatgatccgcagtcccttgtaccacatcatgcggcccacaaacaggaacaccggtacgccctccggcagatcgtagtccgttgtggcggcggtgatcgcctcctcgctgacccggccccggggcatatccacgccgttttccatcacttgatagtctccctgatagccgatggaccggaggttttcccccgcgccgtggctcaccacccacacctcgtcgcaggcggagatattggaggccagtacatacagcgcgctctcctgcagcagccgaccccggaggagcttggctacgtccacatcaaacttcgtgtggtatgtaaacaccagcggcgcatccaccacatcccggatggatcgggccaaaatcgtggacatcacaggacaatggctgtggagcaggtccactttttgctccttcagctgccgcagggtctccggggaaaagggatagcccgccagatagccgaacagccgccgtgtgtccacgctgggatagcgggccaccgggaaggggaaccggctgtcatcggcgtccggatgctccggcgtcaccacgatggcccgatcccccagctttgtcagctcccgggcgtagttgacaacggtattggccacgccgtcgatcagcggcgggaaggaatcatttaaaagtgaaatgctgtatggttccggcatagtatgtcctccgttctatctatcagcttcattgcgtgtcccctaacagtttcagagcggaaaccgccgggacgcgacacacttcatcaaaatgacagcagtcctaaatgctccagcaggattttacagccaagcagcactaagatcacaccgccggtgatctccgcccgctgcctgtaccgggcgccgaaccagcaccccaccgccacgccggccacggagatgcagaaggttgtcacgccgatcaggctgacagccgagaggatcggcgtttccagaaaggcgaaggtcacgcctaccgccagtgcgtcgatgctggtggcaatggccatgagaaaaagctttttatggtccggtcctccgccggcagcagtgtcctccgcctcgtcctcctcgccggagagggcctcccggatcatgttgccgccgataagcagcagcaaaataaaggcgacccagtggtcatactgctggatataacccgaaaattgagaaccaagcacccagcccagaaggggcatcaatgcctgaaagccgccgaaatacagtcccaccgtcaaggcatggccccatttgattctcgtcatggacaggccctgacagatcgccacggcaaaggcgtccatcgacaaccctacgccgatgagaaacagctcaagaaaacccatactgatgtaagcctcctacaggatcaccggaacttctctgcgaattttaaggctgtccggcgtcacatcacagtcataggccagcacccgaaccccgtgggccgccgcctcccgcagggcttctccaaaggcgggatgggttgcgtcattgggtgcgacgctgtgaatatctcttatttgtaccacaaagaacaggactgcgtcaaggccggtttccgccgcccgctgcagctcccggatgtgcttgacgccccgctccgtgggggcgtccgggaacaaggcgtttccgttttcctccagtgtgacgcccttcacctccaccagatgaagccgctcctttgtctctatgcaaaagtccagccgggacccgccgtaagcatactccgggcggatggcggtgacgtccggcaggaaacctccggccgccgcccactccgcaaataccttattgggagcctgcgcgtccatattgataaggctgctacccttttccaccgcaatcagatcgtatgcggtttttcggttgggattcgttcccttttccagatagaccgtgcagcccggcaccagcagttcccggcaccggcccgtattcttcacatggacggtctccacgctgccgtccagttccacatgggcgataaagcggttggggcggtcgatgaatttcgccgcccggacattctgatagtgcattgctgtctccttcgtatcattcgccatccgcaggcgcggctgacagcagggggctatacatcataatggcatcgttggtgcagaggtactgctcctccaaaagcgcaccggacgggccatacacctcccgccaaagctggttgtgccggatatagccgccccaggatgcctgatcgatccgggcgtccttttctatgacccggaattgcagcgctggcggctctgtcgagcgccacgtcccctccagatgggtctcccccacccgcaggcacagctgatacggccggtccgtgtcattgcggatcatgagatcccggtggggataggcgcaggtggccccgctgccgaagggctgggtacggttggcgtccgggaacacgtcatgggagtggcggtagcgctccgtcaccgtcaggggcgtgtggagggtcatccagaaaatcagattggacagctggcacagcccaccgccaatatccccgccgatctgtcccagaaacagcaccatgccctccttgtagcccttccgggcggtgggttttccgatgcgtttccagtagctgaaggtctcgccgggatacaggatcagaccgtccagccgctttacggccagcctcaggttcgttaccttattctcctgccagaccatttcctctccccggaggtggcgcataagcggcgtggcatgggagaactggacgcaggggagccgttcttctttccggatctttgcccaacggtacttgggcgagcaccacagcagatagcgctttcctgtgtaatatgcctttcccagccgcaggcgcagccagctgcgtcggatgggcggacgcagatccatcttcgtatccacgacgtctccccctttcatttttcttagtatgccacaggatctgccgtaaatctacatcaaaacggtaacatttcccaacttgtcagcgtttttttgtcacctttttgcaaaagattggtcaaatatgacgtccggcatccgggggaatctgccatttcccggaacttatctgaaaaaagcggcaaaaatttcaatcaacctcgtctcaagtatgaaatcagccgcttttcgttcacaaattgttttctggacacgctttccacgccgtgctaaaattgctgttatccatagaatacataccaattcagaagcggaatttctgtcggtttccgctccaagagaaagaaggaacgatccatgaatgaggtccattccccgaaaaagcctctgatcttctactacatggtggccatgctgctggtgatgctgttcaacttcatcgccatgccctggctgtcccagtatcagatccaggaggtggactacaacacctttgtggacatgacggaaaagggcgagatcggccgggcggaaattcaggaggccgacaaccggatcctgttcaccagcaaggatgaaaaaaccatctacaagaccgctatgatctccacggacagccaacttgtccagcgactgctggacgccggtgtttctaccagcggcgaggagatcgagcagacctccctgctcatgaatattctgagctgggtggcccccattctgatcttcatcgccctggggcagttcatgtcccggaagctgatgcagaaaatgggcggcggcaattccatgatgttcaatatgggcaagtccaatgccaaggtgtatgtgaagtccgccgagggaattcgctttgacgacgtggccggtgaggacgaggccaaggagaatctgacggagatcgtcaattatctccatgaccccagtaagtatcaggagatcggtgcttccatgcccaagggcgtcctgctggttggccctccgggtaccggcaagaccatgcttgctaaggccgtggccggtgaagccaacgtgcccttcttctccatgtccggctccgaattcgtagagatgttcgtgggcatgggcgcttccaaggtccgtgaccttttcaagcaggccaaggagaaggctccctgcatcgtatttatcgacgagatcgacgccatcggcaaaaaacgtgacggtcagatcggcggaaacgacgaacgggagcagactttgaaccagcttctgacggagatggacggcttcgagggcaataccggcgtcatcattctggcagccaccaaccgtccggagtctctggaccccgccctgacccgtcccggacggtttgaccgtcgggtgccggtggaactgccggacctgaagggccgggaggaaattctgaaggtccacgccaagaagatcaaggtggccgaggatgttgatttcaacaaggtcgcccgcatggcctccggcgcgtccggtgcggagcttgccaacattgtgaacgaggccgctctgcgggccgtccgggatgggcggaaattcgccacccaagcggatctggaagagagcattgaggtggtcatcgccggttatcagaaaaagaacgccattatgacggaccacgaaaagcggatcgtggcttatcacgagattggccacgcgctggtggcagcaaagcagaccaattccgcccccgtgcagaagatcaccattgttccccggacctccggtgcactgggctacaccatgcaggtggatgagggcaaccacgttctgatgagcaaggaggagattgaaaacaagattgccaccttcaccggcggacgggcggcggaggaagtagccttcggctccgtcaccaccggcgcctccaatgatattgagcaggccaccaagctggcccgtgccatgatcacccggtacggcatgagcgacgatttcgacatggtggcgctggagaccgttaccaatcaatatctgggcggcgacgcctctctggtctgctccgccgagacccagactaagatcgaccagcaggtagtggcgctggtgaagcgggagcaccagaaggcgctggatattctccgggaaaaccggacgaagctggatgagctggccaacttcctctacgaaaaggaaaccatcaccggcgaggaattcatggggattttgaacgggtaagccggggcagctgtttgaagcgacaatcaggccgcttttatgtaattcacccagcagaattggaattttaggaggaaagtgtttatggagaagccttttccaaaaatgatcctgcggattcttcttgtttgcgttctgcttcttgggtttctttatatggatgacgatattggcacatctgctgccaatctggaatcagatattcgcaatttacagaagattccagaggattggatcgttgagggagatgtttccgatacgatggcagcctatatctcctatccccaagatcggagcgatcatactttttctgtctacgtaaatcgtcccggactttccttcggatatttctttcgcggcggcggaagtctttccggagttgaaaggggaatcgcggaattcacggtcgatgggtataacgagcgggctttcatctctatgaatcaaccgaaggcggcgcggttggaaatcgatgatggcaatacggttcaagtcatcgatcttaacagcgatcagccgtttgcgatcgtcttacccgcaaatgctggcgttatccatttttatgacggaaacggaaatcctgtaaattatcaaaagaaccctctttgacaagcaccggttttcaaacaataaaaatctccggttgcggcggtaagatgcaaaaaagagtgccatccgaaggatggcactcttttattgctttaggaagctcttacttcgcggccttggcagccttgatagcctcgatcagcatgggagtgaccttgaacaggtcgccgcagatgccgtagtcagcgatctcgaagatgggagcggtgtcgttcttgttgacggcgatgatgcactcggaatcctgcatgccagccttgtgctggatggcgccggagatacccagagcaacgtacaccttgggatggacggtcttgccggtctgaccaacctgatggtcggcagacagccagccggagtcgatggtggcacgagagccgccaacaacgccgcccaggacctcagccagctcctcagccagcttgatgccgccctc

SEQ ID NO: 12163 - DNA, 41796 bp, Unknown
  gut microbiota DNA sequence
ctcgaaacaagctcgcttgatccgccaccggcggcgcttcgcctatttccctgcgccattgaaatcctaagttttcagaacttttataaagttctaaaaactggctcagcggggagaaaagactttttcgacacgctgggggacgccatctgcaaagatggcgtcccttttgcacgaggtttacataaaccggcacagcaaaatcggcagaaagatagccgggacaaggttcatgaccttgattttggtgacgttcagcatattcaggctcagggccacgatcagcagagagccgacacaggtcatctccgcgattacggcgtcccccagcaggggggacagcagccccgccaaaagggaaatggccccctgatagagaaaaatggccccggcggaaaacgccacgccgactcccaaggaggaggcgaacacgatggagctgatgccgtcgatgatagatttggctttcagagtgtcatagcttccggtaaggccgttttccagagcgcctacgatggccatggcccccacgcagaacagcagggaagcggtgatgaacccgtcggagatgctgggcgcgccgtcctccgtgtggatcagccgggcggtccgggtctggacccaatcccccagggaccgcatccggcggtccagatccagcagctctccgataatggcgcccagagcgatggagaggatggcggtcagggtgttctgccctttgagacatccgctgacgccgatatacagaacgcacagggccatgccctgcatgatgatggtctggagccggccgccgagaccgtcggcagagacctccttggaggaacggcgggtgacggcccggaggacaagccccacagcggacccggccagaatagtcagagaattgatgatcgttccggtcagcatacattacgcctccttttgggcgataaggtcacggactaccttgcttcccatcagcagtccggcagtggcgggaacccaagggttactggcgggaacgctccgccgtcccggcgggggagcctccagctgctgggtaggcgcaggctgttccggggaaaagaccaccgtctggtggaggatgccccggttccgcagctcctttcgcatgacccgggccagcgggcagccgtaggtctctgaaatatccgccagccgcagcagagaggggtcaagcttgttgccggtacccaatgccatgatgagggggacgtccagccgccgggcggtctccgccagatccagcttgcagctcaccagatcaatggcgtccacaatatagtcatacctgcagcctgcagggaagaactgttcccggttgtcggcattgtacagggcctccatgggatgcaggaccgcataggggttgatatcccgcacccgccgggccacggcctctgccttgggaagccccacggtggagtccagcgcctccaactgacggttcagattggagagggccacggtgtcgctgtccaccagcgtcagctcgcccacaccggcccgggccagacactctgtcacgtagctgcctacgccgcccagtccgaacacgatgacgtgggcggcggtcaggcgagcctgcccgtccttgccccacaacatttcatttcgcaaaaaacgctcgtccataaaacgctccgaatttcaaaagtaaagatcaaaaagggccggctgaaaagccggccctttgtttcggaaatagtgggccgatgactgtgttttaacccacaaacttcatgccgaagtcgctctgctgcacatcggcgttttcagacagggcggtgctccactcggaagcggccttctcctgcagatcggaggtgacggatgccgcccaggcaggcagatcgtagcccacgaagtacatcacatgagaaccgtaggtggtgtccacgataccggtgtcaccatccttgcgggaagcgtcgaagcaccagtcattgaactcctccacggcccagcccttggtgacacgggtgtagagaccgccgtcatacttggaaccgtcggcggaattttccagagccagctgggcgaaggaatcctcggtggcctcgccggacttccactgggccagaatttcctcggccttggtgcgggcggcggccttcagctgggtctgctcgtcctcatagccctcgtcgccctgagccttggtgccggtttcgggggtgatgaggatgtgacggatgtccacggtcttgtattcctcgcggccgcggctgtggaacagaccgacgtaatagttggttccaacttccagaatctccgtgtcaccgtccttgcgggcatcgtcaaagagccagttacccacaacgccgtcataataagtggcgtcggtggtgttgtaataggtggccttttcataattgccggcaatggattccagagactttccgctgttgtaagcggccaggatctcttctgcggtggccttggcggcctccttggcagcagcctgctcctcatcggtggcctgaacggtattgccgtcggcatccgtggtggaatcggcagcgccgctgacgaccacatactcccaggcggccttgtcataggtcttgggatctgcctgataggcggcttccagctctgcatcggtgtaggtcaggctgtcggaatagctctgggcgtatgcctgatactgcagcatccgcaggacctgctggttgtagaccttctccgtcatgatagcacccagatttctctggagatatgccttcacggacatgccggtggattccgcagaggtcttcagggaattcagggagtcctcatactgctcctgcacgctggcggggaactgataaccctcttcctgtgcctgcttcagaccccgctggatcatggtcatctgcttgacagtgttgtccatgatataatcatgccaggaggagccttcctccacgcccatcatggaagcggcggtggcgttcaccgtctggctcttcagggaggcgttggtgtccagacccagatagctgatgaaataggagttgctctgcaggaaaccgcggtaaacattctgataatagaaattcacctcggcggcactgtacttttcgccgtcaatggtcagggccgtggcgttgcgggagatcacattggatctccagaggaagctggctgccaccaccagcacgaacagtacggcgatgacgctgtacagaacgttgctgcgcttttcagccttcttttcttccagctccttttctgccttgggatccacatagccggaggccgtctgatcctgccggagctttttttctcttgatgcgctcatttgttgtccatcctctcaagtttaaacattgttgcgcggcacagcgccgcatgatttgtcacatacctcgtcattataaaggattgcgccgcgatatgcaagtaccagatcacgtttgatgccatccggggcaaaactgcgcttattgtatgatacatatctgaaaataaactgaaaaaaggactgcaaagcagtcctttttgtcatataaagctgtcccgcagcggccgtgtagacctcgttataacctgcaccttcaagcacaggtgggttgcttccagaatgctttaccgcttccaacttccaaccgcgaacggcagccgggaggcctgcgatccacaccctgagaggtgcatccctaataacgaaatgtgggttaaaaaaagatctatcacgcaccccgcaggacacgcggaatgacgtattccttaaaagtctgcgtggaaacggaggaattattcctcgtcctcgtcaaacagcagctccatgaactgctcgtagaccgcctccagctcctcgtcggagtccagcgtggagagcagatcctcgccatcctcgtggatgaccttcaggatcaccagaccgttgtcgggatcgtcctcgttttccccctcggtctcggcggggaagaaggcctgatacatctggccgttatactccagagcgtctacaaattccaaaaccagctcttttccgtcctcgtcggtcacggtaataaaggtggggccgaaatcttcactcatctttgtataccctttctcgtgttgtctgtccctccggggaaggattgcccttattgtaacggaagaaaacgatgattgcaagagcgaaaaccgtgaaaaagcagcgaagtacgaaagttatgtgacagaaatttctgaaaaaatttggtaaaatctatggaagcggaaacttttcgccggttgaatccgacattttcgcagttgacaggggatgatataatggacttgataatggtgtattgtgggttggtttcctgaagggaaaccgccttgtggatcacaaaaggaggttccaagttggaggaaagaagaaacacgcatccccagggggcggatcattcccgcaaacggcggaaggtccggcccggtcatgtggcgggcggcgttgtgatgacggtctttaccctggtcctgatcggcgtctgcacaacgctcatgctgctggggattttcatgaagtatgtgaatacatctctgctgccgaccctggaggtccgggcggaggactataccatgtcccagagctccgtggtctattatcaggacaaggagagcggccagtgggtggagttccagaaggtccacgggcaggagaaccgtgtcctgatcgacatcgacgatatgtccccctacctgtggcaggcagcggtgtctattgaggacgagcgttttttcagtcaccacggcgtggactggaagcggaccctgggcgctacgctgctgaccctcaccggcagcaacgacagctacggcggctccaccatcacccagcagatgctgaaaaacatgaccggcgagaatcagaataccatcaaccgcaaggtcaaggagatcttccgggcgctggaatttgaaaagaacaacacgaaaagccagattctggagctgtacctgaatatgatctatttgggcagcggctgcggcggcgtggagacggcagcggaatactacttcggcaagtccgctaaggacctgacggcggcggagagcgcctgtatcatcgccatcaccaacaacccgtctctctacaaccccaaatatgaacggacctacacccggaaggacggcaccaccgtcactccccggcagctgaacaagaagcgccaggagctgatcctggacaagatgtctaaggtcatcaatcccgataccggcaagccctatctgacaaaagaggagtgcgaagccgccaaggcggagcctttgaacttcacagatacctccggagacgccagcgagctggtcaagaccgacggtatcgagatcaacaattggtttgtggagcagctcatcaaggatgtgaccacagatctggctcaggccaagagcatttcttatgaagcggcccagcggctggtgaacaacagcggctatcagatctattgcaccatggacccggatatccagaagatcgcggaggatgtctacgcagatctgagcaatttgaatgtacactctgccaagggccaccagctgcaatccggtatcaccatcatggacccctataccggcaacatcgtgggcatggtgggcgccatgggccccaagactcagaatctggtggacaactatgcggtccagaagcatcaggttggttcttctatcaaaccgttgacggtgtattccgcagcgctggacgccggtgctgtgacaccggccaccacctttgataactaccccgtggagcttatgaacaattctccctggcctaagaactcccccaatacctacaccggctggaccatgatcggcgagggcgtccggcgttccatcaacaccatcgccgttcagaccgtggaggcgctgggtgtggcggagtcctacgcttacgccatggagaagctgggcctcagcctggtgccggaggatatggccgtttccccgctggccatgggcggtctgacctatggcctgagcactgtggagatggcggcggccttctctgcctttgccaacagcggtgtttacaattcgcccaagatgtataccgaggtccgggacagcaacggtgagaccgtgctgaaaaacgagggcgagacccatgtggccatgaaggagaccacggcctacttcatgaaccagatgcttaccagcgtggtgaacgccggtaccggtacctccgccaagttcagcggcatgaccatcgcgggcaagaccggtaccacggataactccaagacccgctatttcgtgggctataccccctattactgcgccgccgtgtggacgggctatcccaagaccaatgagaagatttctgcctccggcaacccggccattaccatgtggaagccggtcatgcagaagatccatgaacatctggagaataagagctttgcaaagcctgccagcggcctggagcaggtgacggtctgcgccgacagcggcctgcgctgcaccgatgcctgtctctccgacatccggggcagccgggcggttcaggtcacggtggcggcaggcacggctcccacggagaactgcaatctccacacctttgtggattactgcaccgagggtaagtgcgttgccaccgataactgtccctcctctgccattaagcaggtgggtgtgctggactttgaacggacggaatacttccgggagggcgtccgcattggctccattactaccgacagtgccaaaaatcccgacagcatgttccatctcattgagatgaagcgggccatcggtctggaacccacgcctacggcaagtggcggagagacctacccggaggtcatcggctgtccggcccatgccggcatgacgccggtggacccggatcaccccggcggtggcgctgatgatcccaatgatcccaactacagcccgtcggtcgacgatcccagcggcggcttcggggacgcgaacctgcctgacgatccaaccggcggcatcgtgatcccgtcggagcctccggccccggaggaccccagcggcggcttcggagacgccggtatgtgggcggccaatctgttcaatcggaactgagacagagcgcgcaagatcatatagctgatacacccccagaccggagactccggtctgggggtgctgcttgaagaaccgatatgcggtgtcgctttgggtttctctttcagatcctctgaaaaacaagaggacggaactgccgggagcacaaagctgaattgggagaaaaaagacccccagaagcattgcttctgggggttgtcagcttatttgcgggggccgccctccagccatttcaggtcatagggctcaaagacaaccttctcataggcggggacgtccatcaccacgccggtccagtcggaatggatctcgccggtctgcttgatgaggatgtcatagagaatatcataggtaacgccgtcagcgggatcggtctccacgatggtggagtagggcagggtcttgtgataggtcagctccatgcccttgtagtcgaagtggaagccgcagcgcatccggcagccgtccagaccggtgtattccgcgatctccttcagatcgtgcaggatcttgtccggctcgtagaggttttcgggagtggtggcagtgtagtcaaagcggaactggatgttggcgccgggaagcttgcggaagcgctcaatgaaggggatcaggttctccttgggataatccttgtagagaacgcagttgatccggaagggtaccggcagccgggtcagcagcgagtcattggactccaccacatagtgctgcatgtggcgggatacattgatgcaggtgatcttgtgcttattccgctccgcgaaggccagaatgtcctcctccgtctgacatttggagacgggcagagtggtgttgatgaacacccggtgggtggtggggatctcatccagcatgatctggagcttttcaatgtcggcaaagggctcgccgccggtaaagacgaaatcgcatttgggggtgatggcatccatccggcggatgctctggacgatcttctccagagagaagccggtcatatccccgtattcttccttattgatacagaaagggcagtggtttttgcagtcgtaggggacaaagatggtgacggtagcgccgccttcccttgttttgtatggatgattcatgatgatcgatcggcctttcctatttatagatggtagatcaaggcgggaaacaacggtccccgccctgagtagacatatattcgtacatacagattattattttaatctatttttaacaaacggtcaagtgaaaaacagaaaaaagaacaaaagactgtgtttttccgtcggcaagggtgtacaggctgttgggataatgctataataaccctgatttccggctgacggagacagactccgccggttcggtctgaagctgttttttcggaaaggagggaatgggatgcaggaactgttttctgcactgtccctgtggctgagtgcccatcctctgattaccggctggtacacggccattgcacggctgctgtttccggtgctttcggcgctgattctggtgcgggccatccggtccctgctgcggatcccccacacgccggaggtctgggcccagttgagcctgcccggcggcggcagtatccccctgacccactgggaaaatattctggggcggggtaaatccgccgatgcgattctgaactatcccagcatctcccggcagcatgcggcgctatgccgtggtgaggacggagcctggacggtgtatgatcttggctccaagggcggcaccgccgtcaacgggacccctgtgacagagcaggccccgttgaagctgggggataccctgaccctgggcggtgtgccgctggtgtttctgccgcagacggtaggagagcgggaggagttggaaaagaagcggcaggcggagcggcccgccgccatgtggccctcttttttgtggctgacggtatttcagattttgaccgccattcagttaatactggcagcgggggagaaggccagcccggtgatccccatctgcttcctgaccctcacggtggtcatgtggctctacgccgccgcgctgcggctgggccgctgcgtgggctttgagctggagaccatcgccttttatctttcaacattatcccttgcggtgacagcttccagtgcaccggggagccttcccaagcagcttttggccatcgttctgggcatgggcctgtttttggcgctgggtctatttctgcgggatctggaacgggtgaaaaagcgccgctggctcatggctgccggggccatcggcctgttggggatcacgctggtgctgggcaaggctaaattcggcgcgaccaactgggtcaccttgggcggtatatccttccagccctcggagatcgccaagatctgctatatttttgcaggctccgccacgctggaacggctgttccgccgccggaatctggcgctgtttatcgtgctcaccggcgtgtgcatcggcctgctggggctgatgagcgacttcggcacggctgccatcttctttgtgaccttcctggtcatcgcctatctccgctccggggacgccgcaactctggccctcatctgcggcggcgcggcctttggagcggggatcatcgtacagttcaagccctatattctgagccgcttcgccgcgtggggccacgcctgggaggcggcctccggctccggctatcagcagacccgcaccatgtcggcggcggcctccggcggactgttcggcatgggtgccggaaacggctggctggagcgtatccctgccggggacacggatctggtgtttggcatgttatgcgaggaatgggggctggttatcgcgctgctggcggtggcctgcatcctgaccttggcatggttcgccgttcgcgcctcccggactggccgatccagcttttataccatcgccgcctgcgcggcaggctctctgctggtgtttcagaccagcctgaatgtgttcggctccgtggatcttctgccactcaccggcgtgaccttccccttcgtgtccaacggcggctccgccatgctgtcggcatggggactgctggcgtatctgaagaccatggacacccgtgcggacgccagctttgccatcggccgggcggcggagcggaagctggacgaggaagccgcccgtatggcggcaccggcagaggatgcctttgaaaaggaggacggtcatgcggaagattgaaaaacgggccgtgatctgcatggcactggcgattttactggcggcggggatgagtgtatttctcatccggtattttgctgagggcggcaagtgggcctcctctgcctttaaccgccatctgtacgattccaacggcgtgctgatctccggcacggtgctggaccgggacggggatgtgctgtcctccgtggaaaacggccaccgcacctactatgaaaacgaaaccgtccgcaaggccaccctccacgcggtgggagacctgtacggcaagatcggcaccggcgttctcaacgccttcgcggacaagctgaccggctttgatctggtgaacggcgcgttcggcgcggagcggggcagcaatttgtacctgaccctggacgcccggtataactacgaggcgtacagggctttgggcggccacgccgggacggtggcggtgtataactacaagaccggtgagatcttgtgcatggtgtcggcgcccagctatgacccgctgaatgtacccaagaatctggaagagaatgaccgttataagggcgcgtacctgaaccggtttctctcctccgcctttgtgccggggtctgtgttcaagactgtgaccctgacggcggcgctggagaacctgccggacgcggagacccggacctggaactgcaccggcagcgtccagatcggggacgagaccatcacctgctccggcgtccacggggagcagacactgaaggaggccttcgcccactcctgcaacgcggccttcgctcagatcgcggaggagctgggggcagataccctgcggcggtatacggagaaggcggggcttaccagcgcctattccgtggacggtctgcccaccgccaagggcacgttcaactgggacggcatcaccgacgggcagctgggctgggccggtgtgggccaatatcacgatcaggtgaacccctgtgcctttctgctgtggatgggggccatcgccaacggcggcaaggcggcggaaccgtatctgatccggaaaacggtgtcctcactgggaatcccgtctctgcctcacatcacccggcacaccgggcggctgatcgacagcagaacggcggccaccgtggcggactttatggccaataacgtgacggagacctacggcaccaagcgctttcccaacatggaactgtgcgccaaatccggcacggcggaggtggggacgggacagacacctcatgcctggttcgcgggctttctgcggaacgaggacgcaccctacgcctttgtggtgctggtggaaaacggcggcggcggaaacgccgtggccggaacggtggccggcaaggtgctgaacgtgatcgtcaacggatactaaagaaaaagaaggaacgaagatatgaaaaaagacatctggctgaaacccggcaaggagctgaacaccggggccatcatcggcggcatcggctttgccatctatatcgccctgtccgcactggaatggcgggggcttgcgctgtttgcggcgcttgccttcggcctggaggcgggatacgccttcctctccgcactggactgccgggaaaaggataaggattccgtcagctacaacatcgtgtggggcactggcgcgttggcgatcctgatgctgctgccggcagtcatgaccatcatcaaagggtgacctgcgcttggagcaaggcgggaaaacggaacagaaaacagcatggatgggtctgcctgtccgcgttgtttttttacttgacaaataccctgtgggggtatatgatgcaaacgaaataggaatgtcggctttgggaaaggtcgacaggaaagcaatttaccgtctcaaaggaggaacccccatgcgggaagaagtatatgacatttccgggatgcactgcgccgcatgcagcgcgtccgtggaaaaagtgacccggcggctgccgggggtagagcgcagcgacgtgaatctggtggcggagcgcatgaccatcgtttatgacgaaacgcaggtgacgccggagcagatcgtcgccaaggtggaaaaggcgggcttcggggccaagctccatcaggaaaagcaggaagcggctccggtccagaccggcgaggacccggaggaggcggagctgcggcgaaaaaagcgggaactgatcatttcggctatcttttcctgtgctttgctgtatgtgtccatggggcagatgctgcccttcggactgcccgccctgccgctgccggatctgttttccatgcacacccaccccatgaacttcgccgttttgcagttgatgctggcgatcccggtgctctactgcgggcggaatttctttatcaacggctttcaagcgctgttccacgggaatcccaacatggattcgctggtggccatcggctctgcctgctcttttgtatacagtgtggtgatgatgtttttgatcaccgacgatgttcacggccatgtgcataatctctactatgaatcctccgccgtggtgctgacgctggtgtcgctggggaagttcatggagagccggaacatgaaaaagaccaagagcgccatcaccgccctcatgcggctgacgccggacactgcccttttagcggacagcggcaaggagatacccacgtcctctgtcaaggccggggacgtgctgctggtaaagcccggcgcccggatcccgctggacggtgtggtgaccaagggcgagagcagcgtcaacgaggccatgctcaccggcgaaagcctgcctgtggaaaaggcggagggcagcgaggtcatcggcggcagcgtcaatgagaacggcgtgctgtatgtgaaggtcacacgggtgggggaggacaccaccctctcccggatcatccgctttgtggaggacgctcagggcaaaaaggcccccatctcccggacggcggacaaggtggcggggattttcgttcccacagtcattgccatcgccgtgctggcggcggtgatctgggccattgctgggaaggactttgcctttgttctgagggtgttcacctctgtgctggtgatcgcctgcccttgcgcgctgggtctggctacgcccacggcgatcatggtgggcaccggtctgggtgcgaaacacggcatcctgatccgctccggtgaaattttagaggtgacccactccgtggataccgtggtgctggacaagaccggcaccgtgacaaagggcgagcctgccgttacggaggtctgtcccgcaggcggcacggcggaggggctgctgaccatcgcggcggcagtggagtccgtgtctcagcaccctctggcggcggccatcgtacaggcggcgcaggagaaaaaactatctaccggcaagcagccggaaaattttgaactgctccctggacggggccttcgggcggtcctctccggccggacggtgctggcgggcaaccgccggttgatggaggaaagcggcgtggacatctccgccctttccgaaaaggctgacgccttggcgggacagggggaaacgcccatgttcttcgccgctgacggggcgctgctgggactgatctccgtggcggatccggtgaaggagaccagcgccgccgccattgccgcactgcacaagcagggacttcgggtggtgctgctcacgggagacagccgcgccgccgcagagcacatcggcgcccttgtaggcgtggacgaggtgatcccggaggtgctgccggaggaaaaagcagtccacgtgcaaaagctggaggcggcaggccgcaaggtgatgatggtgggggacggcatcaacgatgccccggcccttaccgccgccaccgtgggctgtgccatcggcagtggaagcgacattgccatcgaagccgccgacatcgtgctgatgcgctcggatctggaggatgtgccccgggcgctgcggctgtcagccctgaccctgcgggacatcaagcaaaatctgttctgggcattctgctacaataccatcggtatccccatcgccgccggactgctgtacgccttgggcgggccgctgctctcccctatgttcgcgggcgccgctatgtccctgagctccgtgtgcgtggtgggcaacgccctgcgtttgggcaccgtgaagctgtaaaaaggaggaagcaatggcagaggaaacgaaaaactgctgctgttcccagcggcggaaggtccgggagcggacggaggaggaagccctgttgcagcggctcagccgcattgaggggcaggtacggggcgtccgggggatggtggagaattccgcctactgcacggatatcctgacccaggtctccgccatccagtcggcgctgaacgccttcaaccgggaactgctggcccggcacatccgcacctgcgtggtgacggacattcaaaagggtgatctggacgtggtggacgatctggtggccaccattcagaaaatgatgaaataagcatccaatattttaaggaggaatttgaaatgacaacgattaaagtacccgacatgatgtgcgaaaactgtgtaaagcgcatcaccaacgccctcaccgccgcggaactgaccttccgggtggatctggcggcgaagaacgtcaccatcgacggctgcgagaactgcgtcaagaccgccgtcaatgagctggaggatctgggctttaccccggaggtccagggctgagaggcagcgtacacctgaaaaagtgccggtgtccggtttcggataccggtacttttttaacagaaaatcggttacaaattgtaacttttacggatcgaagttggaaaaaacgaaaaaatgaaaatcccgtttttgcgggattgtggtggacataaaatcgtagaatgggcgaaaacttgacaaaagtgggagatggaggtatacttagacccagttttggataaattacaaaagtaacaaaacagtaacggcgctatttggcgctgtcaggaggtcttacatttgcgacatttacacacccccaaaacggtatggctgtgccgctgtctgactctgttgctgctgttgtccgtcaccatggcgggcgctacgggctgggcaaaggctctgtatctgttcagcgacggagagcagtccgcagcgctggatgacagccattccggcatcgaatctctgcttttgaatctggataccggcaagagcggtgaaaacgccgtattgacggagggtaccatggtgactgtccgccggggcggcgagaccatcactgccactgcccggaaggaaacggtgaagcagttcctctcccgtatggatattatccccggttcccgggagatggtgggcatcgagctgatggaaaacagcgtgatgctgacgatctccgatcacctgacggttttcgaacgggtgacggaaaaggcggagcacgaaacggtttaccgggatacaccggacctgcccaagggcgaggaacgggtggcccgaaagggtatggacggccagcacacagccatctatgagcagacctgggtcagcggcgagctggtcaccagccagtatgtagaggaaatttccaccaccagcgtaacggaggtggtggaacggggaacggcggtctcctatgtggagccggatgacaagctggtgaacgtcaccacccagagcgacggctccggttacctgacctttgcctccggcggtaccatgaagttcagcaaggctgtcaccgtcaccgccaccgcctataccgccgggtatgacggcgtagggacccgtaccgccaccggcaccaccgtccataagggcgtggccgccgtggataagcgggtgttccctctgggctccgatctgtacgttgtggccaagggtatggaatacggcctgacccgtgccgaggacaccggcatgaagggtcccaagatcgatctgtatatggagagctatcaggagtgcatccagttcggccgccggacgggcactgtctatctgctggaagattgagcgttaacagcttgaactgagaaaccgacctgtccgcaaaattgcgggcaggccggttttttgtgagcttttggcggcttgccggggaaaaacgcgcgttgacggatgtttcttgggaaaacaatgaaagggagcatgttccaaaaccggaacacgctccctttgcttatttgtatttacttgcggaaatgctgcttacaggctgttggcctgctccaccaccttgcggatggcgtcggcggcgtcgtccggcagggcattgaagccgccctcagcgtccttcaggccctccacgtagttcaggcggtcctgcatacgggcctgcatctgggcgacatagcccttgttggtgaggtcgggcacgaagccgtcccactccatgatctcaatgtcggagaaggggccccagggtttgaattccgcacggccctccaccacggcttccagaatacccagtgtatcctccttctggacctttttgcccatgaagtcgccggtgttgatgatgtagcacgccacgttcttctcagccaccagcttcttgaacttctcgtagtcattcaccagcgggtaggtgcggaaggggttggcgtaaggctccaccaccagagcattggggtccacgccctccttcagccgttcagcagaggaacgcttggtggccagcgtagcgcccatgacagaggccagagacgcgcccttcagcttcacgatgggagggatggtgggatccttcatgatccagaaaatagcgttgacgggggaatcgatcttgtccacccggttgggggaccagagcttggacttgatggcccggccgttgccgttgcggatgtcctcggtgaccagcaccaccttgccgtcctcgtccagcgtggcggagcagttctgcgccgtcagcaggtacttgttgtccggggaatccacgggatagtcggcggtcttgtcgaaataggtgggctccagagcaatggaggcgcaggtatcggagttgataatgaaggcgtcatcgtggagcaccttgatggagggatacttgccgccgtgcttggcgtgggtcagggtggacttgccggagccggacagaccgaacacggcagagacgaacttgtggccgtccgccagcgtgtattccttctgaccgccgtggcagctggcgtagccggtgcggttggcgatggcccaggccagtgtcagggtgcccttcttgtgctcgccgaagtagcgcatacccaggatggcggcgcagttggtctccgtgttgaagtagcacaggcacttggggtcgcagaccttttcctgaccgggtgcgccggtccactggggatcggagaagatgtagatgtcaggctccttgccgtcgcctacgggcttggagttcttgtacatcttcacatattccgtggacatatactggaagttcagcatccagttgtagaggaggttttcctcaccctcagggatcagcagatgggccttcaccatgaactcggggtccagaccgatgaacacctcggcgtgatacatggtcttccagcgggtgtcgtacacggcgtccatgacgatcttatccagggcggcggtgtccacgccgggcttgccggtgatgcggcgggcgggggcgtagcggccggtgatggagccgtcattgaacagcaggaccttggcgtccggttccagaccgaattcctcgccccggtagacgggcatatcggtgaccacggtgccgggagaatttttggccagctcataggcttccttcaaggtgttgaccttgatgacattgttgccgtagaacggagcttcgatgatggaacgggtcttggaaaaacccacctggccgggaccgatctcggctctgggataataggcctttgtggacatatcgggatacctccttgtaatcatggttgataactgtatgatactggaacgcaggggaaaaagcaagttatgaagatgacaagttccggcaaagaggacagttccttttgtgactttttgcggcagggcggcggttatttccgctccgccagcgcgtctgtcagggcagcgaactccgttaacgtcaacgcctctccccggaccgatgcaggcaggccgcaggctgcgatggcgtcggcaatggcggccttgtcccaccccggcagggcagcggacagggaattggacagggtttttcgccgcagcaggaaggctcccttgatgacccggaagaaaaacgcctcatcccggacggccaccggcggctccttccggcggacgcaccgcagaacggtggaagtcaccttgggggcgggcagaaatttctccggggggacatcaaagagacattctgtttccatttcgtattgcagccgcagggggaatgcgccgtcggcgctgcctttggcggaggtgagccgctgggcggcctccttctggatcaggacggtgatggactcaatggcgggaatatccaccagcgcggtcagcacgggcgtggtgatgttgtagggcaggttggcgcagacgatgggccgcaggccagcgaatttttcgccgatcagggccttgagatccagccgggtcacatctccggggacgatctccacattagaatgaggggccatggtctctgccagaatgggcagcagcgcccggtccagttcaatggagaccaccttgccggcccgctgagccagctcggacgtcaaagggccgatgccggggccgatctccagcacgccgcaggtctcgtctgcctgagacgctgccgcaatgtcagcggggatctgggggtcgatgaggaaattctgccccatggatttggaaaaatggaagccgtggcgttccagcagcatccggatcgtcagttcgtcgcagagattcatggctctaccgccttttttagaatttgaatttcagtatagctgattttgaatggaatcacaacaggggagcgccggttggtcacagttcgtggatgaaatccagcacgcagtcccgcagacggaggacctcctccggcatatttttccgcagaggcatccccatgcccaattcccggcctgcccgcggcgtgaccggcagcgtctggacgccctgcgtcctgccgcgcatcatgatctccgtcatcatggagacgcccagtcccttgctgaccatgcgaatcaccgtttcatcgtccacatgacaggggcggatctggggtcggacgcccttgggactgagggcggcgttcacgtcaatgtcgaaccgaccgtagggcatcagaaattcctttccgtcaaattcctcgatggggaaggagtcccgtcccccggtggggtaatcctccgggaggatggcgtacataatgtcgttgtacagcggtgtccagtcgcagttgacatggctttgccttgcggcgaaaatcacatcggtgcggccttcctccagcagctcaaagggctccaattcgtggtccaccatccgtagatccacgtcggtgtccgggcacacccggcggaaccggtacaggatctccggcatccagtgcatggcaaggctggcgtaggctgccacacggatggtctccgcctttttctgcgtgatggcggcgatctggttttccagcttcgccgtggcgctgagataatcccggatggccggcagaagagcctcaccgttctctgtcagggaaatgccgctgtggtcccggcgaatgagggccatgccgatctcccgctccagaccgttgatgaggtgggtcaggccggactgtgtgtaacccaccacctcggaggccttggaaaagctgcccaggttcactgccgtcatcaggatctccagctttttgctgtccatggttccctccttcagctatgtattacgatttgtcatataactattataaccctgcgtttctcttttgcaagggtttcctatatgataagacccataaaggagatgatgttccatgacaacgaagaagctgacgatccggcagaagcttttggtggccgggacgctgttcggcatgtttttcggcgcaggcaatctgatcttcccggtccatctgggacagatggcgggccggaacgccattcccgccatgatcggctttatcattacggcggtggggatccccgttttcggtgtggccgccatcggcatcacccattccgacggtttacagaccctcgccggcaaggtgagcaagggatacggcatcttcttcacctgtctgctgtatctgaccatcgggccgctgttcgccattcccagatgcgccacggtgtcctttaccaccggcgtcgcgcccatgctgggggacagcggggcggaatggctgtatctgctgatcttctccgccgtgtttttcgccttcgtactgtttttctctctgcgccccggcaagatcaccgtctggatcggcaagatcatcaatcctattttcctgatcttctttgccgtgctgatgatcgcggcgctgctggcccccggtgccgccgcgtctgccgtggagccggtggcggcctatcagagtgacgcatttttcccctctctgatcgagggctacggcaccatggacgccatcgccggtctggccttcggcatcgtggtgattgacgtgatccgccgcatgggcgtgaccaatgatgacgccatcgcggaggacgtgctctcttccggcctcctcacgggcctgctgatggcactgatctatgtggtgtccattctggtgggcgcccagtccagagggctgtttgagctgtctgaaaacggcggcgtggccctgacgcagatcgccgggcattacttgggcggcgtgggccagctcattctggcgatcaccatcactttcgcctgcctgaaaacctctatcggtctggtcaccgcctgcgcggagaccttcgacaagatgaccggcgggaagttctcctaccggggctgggccattctgttcacggccttctccttcgctgtctccaatgtgggcctcagcgccatcatcaactattccattccggtgctcatgctgatctatccaccggccattgccttgatcaccttagcgtttatcggcagatttttcgggcatgaccgcattgtgtacatcgccgtgatgatccccacatggatcgccgctttgttcgactttatgaagaccctgccgggttccgcgcagacggccctccatctggacgcgcccattcagttcgccgcagccaatctcccgctgttcgacaagaatctgggctggctgctcccggcggtcatcggctttgccatcggcatgatctggcatctgagccggccgaagaacgcagccgccgcgtgacgggatccctcgctgaatcgcccattgacgaaaactggtttaatgaacgcagagaaaatcaaaagaaaagcggcccggagttttccgggccgctttcgcgatcaatggccgccggcttacttgcggtcgtttttctggttcttctgctcgttgggctccttctgagcgtttttctggttgctctcccggtttttctcctgcatggaatgtgcctcctttcctgtccccacggggggacggtctgcgtacagaagatagtgttgccgccgcggggaaaactattcacaaaaaagaaaaaatttcttgattttcctgttgacaaatcagaaatggtttggtatactatcaaggcaaaacaaagaaggctgatcgcatccgcctcacctccagcatgacgcaaagaggtcaacaacgttgttaccagactgccgcagggcggtttgttgttgcgcggatgccaaaatggtatccgcgttttgtgatttttagaaggaggtgcttcgaccatagctaagcaaatgcatgaactgaatgaggacattctcgacaaggagatccgactcatcggcgctgaaggtcagcagctgggcatcatgagttcccaggaggccctgaagattgcggatgagcagggcttggatcttgtcaagatctcgccccaggccgtcccccccgtttgcaagctcatgaactacggaaagttccgctttgagcagagcaagaaggagaaggaagcccgcaagaatcagcatgtggtagagatcaaggagatccggatgtcaccgggcatcgacgtgggagacttcaacacgaagctcaagaacgcccagaagttcattgccgatggcaaccgggtgaaggtttccgtccgcttccgcggccgcgaaatggcacatacggacatcggccgggatctgctgaaccagtttgctgagcagtgcgccgaggtggccaacatggacaagagcgccaagctggagggccgtatgatgtccatcttcctctctcccaagacgagcaagtaaatttcaagagatttcaatacacggaaggagcaactacaatgccgaaactgaagactcacagcggcgccaagaagcgcttcaatctcaccaagaccggcaaggtcaagcgcgccaaggctttcaagagccacatcctcaccaagaaggacaccaagcgcactcgtcgtctgcgcgcaggcggttatgcggacgtcaccaacatggacgctgtccgcaagatgatcccctacaaataagtaacgagacgtttgaaataggaggctactacaaatggcaagagtcaagggcgcgatgatgacgcgcaagagaagaaataaagttctgaagctggccaagggctattggggttccaagtccaagcacttcaagatggcgaaccaggccgtcatgaagtccctgacctacgcttacaccggccgcaagctgaagaagcgtgacttccgcagcctgtggatcacccgtatctccgctgcctgcaagatgaacggcatgaactactccaccttcatgcacggcctgaaggtcgccggcatcgagatcaaccgcaagatgctctctgagatggctatctccaaccccgctgcattcactcagctgatcgagatcgccaagaaggcttaattacacagttcttcaaacaaaaacctcttcgggaaaccgaagaggtttttttgcgtgttgaaaaataggggagagggctgtctttacagaaaacagtaaaaggacgcgcccatcggcgcgtcctcccgttcttattcctcaacagtttcctcagcgggttccgcgtcctccggaacttccggttcttcccagtccaccatggtgcccacgcagcggttgatgggctggcccagctcgtggaacttggcctcatagtccgtcataacgcccaccgggccgttttcgtggagattccgggtgacctcggacagctcaaagccaaactggggcagctcctccacggagaactcaaacaggggctggttgtcagtcttgaagtggatctgaccgcccattttcagcacctgacggtacagcttcaggaagttgccgtgagtcaggcggcgcttggcatggcgcttgctgggccagggatcgcagaagttgacgtagatccggtccacctcgccgggggcgaagaactgggggagctggtcggcgttggcgtccacgaaaaacacattggtgagaccgtcattcacgcaccgctccatggccaccaccatggcgtccggcaccatctcaatggcgatgaacagcacatccggctccgccgcggcggtgccgtgggtgaagcggcccttgccgcagcccagctctacccgcagctcccgggcctggggcatcagatcccgccagtggccccggtgctcataggggtcccggatcagctgcgcggcgcagcgctccattcggggaaccagattcttctttttccgcattctcattatcaaaaacctccgcaggtcaagaatcaactcattttaacataaaaaagcgacgctgtaaacggaagtctgaaaatgttaatgaattaacgttagatatttaacggaatgcgttttggagcggtcaaaccgttgcgctgcaatgcttctacagaatgtagaatatgcaagaatactgattttacaccaatcttacaccaatataggagagctcaatacagtcagtcagtattctcccttcatatctctataaaaatgatgtcgcggctacaaaattttatgactattaggagtaatatatatgagggaaaacactgtaatatctatcaccaactctaagggtggtgttggtaagactacaacagcactgaatcttgctgctgctcttgcaaacgaaaacaaaaaggtcctgctgatcgacaatgacccgcagggtaatcttgcggcagtgcttggctatacgccgggtgaacagataaatacgctggcgaaactgctgcttgttcaaatcgactcgccggaagacctggaactgcatcttccccgtgccgtgatacatacagagactggcattgacctgatcccagctaataagcggctggcagatgccgctgcccgcttacaggttatgcagctctcgcagtacaacacagcgggggaggcagaaacgctctgcgaagaggtgatggacaagctgttggacgctctccgagagcaatacgactactgcggcaggtcgccgacacacagagcgtatatgatctccctgacatacagggcattgcgccggaggatattggacttgtggaaatgacatgctccgaaattatcggtggggatgatccggagctggaggaactggacgatcccactcggataccgccgggccgaggcatatcgtccaaatcggatagctgttccagaatgaaatgaagatactctttactggatgccattattgttacaccatttttggcattgctcgattcttgcgccgttatcgctttgctccatgtcgtaagcaaaagtatgtaataaaggacaaacgaagtcatcgcattcgccgcaatgctgcaagcctttcttttcacagcatgatttcacgggacagctatccgcccagaagggtttgtccatattcacacaccctttgcagcccatcgattcccgaaagttgcaatcactgcaccgaagcccacatcttgactcgatcatactcagattcctcctgctcagaacagctgtcccggcagctttagcttttccttcttcgggaaggtcgcttcaaactgttcaaatgcttccggattcttctcgcaaacaaaatatccctcagggtctttataagtgccggagatgccgtccaaaaagccgggcgtcagctccttgatgagaaaataatccgcctccggatcatcggcatagcgcacgcccttggtttttgccggaacgaaaccggacttgccgtaaaagtcaatattgccggtgatggcaagcgcacccgcgcccatttcctttgctttttccatggaatagtccagcagttgcttcccgtagccctgccgcttgtatgcgggcacaatgccaaggggaccgaaggtcatgatcggcacctttcttccgtcatcgcagtcgatttccgaccgcacatagatgacctgcccaatcagctcaccgtccagctccatgacgaagtccagctccggcacaaaagccgggtcatcccgatagcggtgcagcacatagtgctccatgcagccggggcggtagacattccagaaggactcgcgggtcagattctcaacggctctgtaatcgtctttcgtttccagacgaatggtaatcttcttttctgacatggtgtttctccttatctcttgtcaataattttgtcaatcagcccataagcgagggcttcttctgccgacatatgtatgagtgcagttcctgaagctccattcccgctgcctcccgcttacttttattcttgtttcattgttcacgccgttaagtatcatcagccgcagacatcgttcaagctgcgctctctgatccatttgtccagaaactgcatctgttcgtcggtatggaaccaatgctcgccaccgggtatgacggtcagatcagcatggtgcagtttggcaaatgcagataccgtttcaatggatgtcaggttgtcatgctcaccgtagagaatacaggtagggacattccagataatcgggtgcttgcgcacatagcaaagatactcccatgacagcgtttctccgaaattcgtggcgatttcccttttctcggcaagctcctgtttggttacattcgaccattgcatcatattgcaaatcaagttttccatatccacaatcggagagatgaaataagcccggtcaaccagtgtttcatccagcgaggacagcgtaaagaaagctccgatgctgttggcaaccaaggtgaggtgctcacaccggcctctctgctcggtaaaaaacgcaagaaactctttctttgattcccaaggtgtttgggaatggtaatcaaacccaattacttcgtccttcggaaatagtgatttatagtgctcggcttcctgcgccgagccgccctttccatgaacatatactattaaatctttcattttatcttcatgaaccctttctcaaaacagcggaatctcgccgtcaaaatgtgctgccttttcccttcagagaatgattcgtgcgatctccatcgtcacgattttcagtacagcgccgcccgacatcatatagaaccatatctcgcgcgcgtgctgcgttttggcaatcggcgtggcaatggcggcaatgataatcagcagcgcaccgacacagccgacgatggtgggaatgctgaccagtggaaacagtcccggtgcgcagcttccgtcaatggcattctgaatcgttttatataacccgtcccgcgccgccgcaaagcagcagaccacaagtccaaaaacaagcagaagcacacttctgcatccccaatactgaataactgcgcggccccaaaccgaccagccgataaagcccagcagggcaaggatcatcaaagttgtcgtcgtagcaacggcatttccaaaatagagtttcattctcactgcacctctcaatactggatcatgatcgttctgcacgcatcacagcagcaggcctccacgctggtacgaccgccgaccttcaacccggtgagttttacaaattcctccgtgtttttggcgttttccaaggcactcggcacttcgtttgcaaagctgaacgcgccatccttactgctgaacagatagccgtttctcatttcttttccgcatttcggacacatcattatcattttctcctattcttattgctgcgcgctgaaccaatcgagaacagcacttagattttccgccttgacccgctcgccgccgcaccgcatcatatccagcatatcgtcctcctccggcgtgcggtctttcttttcggcaagagctttgcctgccgttttgaccatgatctccatcatggggcggtaaacaccgtgcagttttttgacatcaaagttcccttgcagggtgaacagcggaatgtcaacagagatccccgactttttccgcacgctgtccgtttgtgtcccggtttgccccatgccgacaccgcagacggcgcgtacccggtaacgctttgcggcctcggcatagcccttgacagagcctgccatgatccagccaaggtaaataacctccgctccagcaaagacccgcttcttcgcttctgcaagggaatacacaggaagtccggttttctgcgccagcaacttagcataatgctctgtgctgccggtattggtggtgtaaataattgcgttcatagaaacattcctctcaaaaaagtgagacgcagcgcatgatcggctttgcgatcagcactgcgtcttagcgtctggcttctttcgtctcaattgtgaaattctttgcgttgatgatgctttcgtgtctgcactttgggcagaacaaaggaaagtctttcaactcagtttcccgaaatatttgcagccgcgttttcgagccgcaccaagggcataaaacccactgttttttctcttcatgttccttcatatcgtctccctgtcctttctgtaacaggattcgaccttggcaatgaaccgctcaatatgcgcatccagcaaaggagcaacggaatctttatcctgcgcaccgtcgtagacgctgtagaggaggtacattggcccatagaattccagcgccagctgcatggcggcttcgtcagtatctgtcagcttacgaaaaattgccgccatgtactccagaggcccacccgccaagtagtcgtgatggagctgcgccagcttgggatcacggtattgctccagtgtcagcatcttacggaaattagaggaaaacggttccttcgtccaatggtcgaactgcgccatgctgtatgcgcggatcttttgaatcggcgtgttcagatacgcctccgcgaagccgtctggctctgtctccggcatttcatagctttccgcacgttcatagtccatctcattcatgtgttctacaatcctgtccaaaatctcctgtttgctggtatagtgcttatacagggcggcttttgtgaatcctaactgctgggcaatatcattcatagatgtcccaaggtagccgttctgcgcaaacaattccagcgctgtttccaaaattcgttctttcgtatctccagccataatattcctccctgacaggtaaccactcggtaacttctattatagttaccgagtggttacctgtcaagacctggttgaattttttgaatcacaacgcacaacaagcgccagcgaaaggattgaagtgacacagtgagatgtgccgcaccgaaaatcgcagcacagcgccatgttgatctgtccgttgtccttcacctgcccatgggcgctaccaccgtggtcatggcgcagcgggagatgggccgcaggctctcctgcagccgctcggatatgtaaacgatattcaaattccatttcggtttcggcatggtcccgccctccgatgcgcttcaacagatttctttgtctataacggtttcggcttgtatgtaattataccggttttatccgcaagtgtaaactgaatgaaacccacttttcgagcattctattgaaaagagggtgccttcttgctacagcgcggatgctgtgacaaatctgccatttcctcgcccctgcggggcagccggaaatgatgcacaaaaacttcatgcaccggcatttgcgcattttcgtggtgcggtattcatgcatgaagttttatgccttaaatctcttgcaaaatggaaagagtcatgatataacatgaccagaaaaaccaaaacggtcatttggaggatgaacgagcttggcttttaccaactatgaaacagaacagcttcacaaggcgctgctgaaggaaacaagacgctgcgccgtcacattggggatgaagaaaacctcagtggatcaactgacaaaggcggtcggcattgcgaagggctcgttctataaattctacgaatccaaggagatggccttcttcgcagttctgaaaagtatccacaccgagctttacggggtggctgaccaggtgttgcgcagaaatggcggcctgccaacctcggagcgcgcggcagaggcggttctggccgtctgccggaggctgtctgatactggcgacatggttttcattgaacatgacgctaagttgcttttacagagattgccggatgacatcaaaaatgtccattaccacgatgacgagacgcacatccgtctgcttttggagaaatatgaccttatgccgaatcgcggcatctctttggctgcgccacggtacggggactgatcttgaccgtctcccacaaggagcagatcggggaattgtatccgcaggtgctggaagcactggtgtacggcgcttgcagggagctatttgaataagccgaaaggccgcagaactgcggctttttcaaggcatgacggttagacgcctctaatcacgtgaattcacgggcgatggttagaccaatctaaccacgaaagaggatgacagcgatgcaagaacacaagggcctccgggatcggaatgccgggtcatatgcggaatatgtgaagaaggaggagtaaacggtgcaaattttggagtgcggacgggagcatagagaaacgctgctgttttttccctgcacggcagagcccgtatgggcatttgcggacaccattgcggtcctgtcccaaaggtggcatatttttcaggtggtgttcgacggtcaccagccggaatatccgggagactttacttccgtggagcagactgtggacgaggtgacccaatatctgaatgtccacggcatttcccatttggatgctgcctacggctgctctctgggcggtgcgtgtctgacccgtttgctggccttgggggaaatttccgttagccgggcaatcattgacggcggtatgactccctatcgcctgccgtttctggtgcgaaagctgctgctggcgcgggatgtgttgtccttcagaacggtggcaagcaaccgtgaggtgctggaagcggcatttccgccggaacggtttacttcgccggggcatgacagcaggaaagagtataatgcgatggagcggtacctcaaaaccttctcgaaccggacgatccggaacatattctggtctgccaacaattacgctctgccgaaagtgcctgccgaatgcggcacaaaaatcacctattggtacggctgcgatgaaaagaaagaccgtaggtacaatattcggtttatgaagcattattttccgcagattcgagtccacggaattcccaaaatggcccacgcagagttggtcttggtgcacccggagctgttcgatcactatgcggaaaaattcctgaagccggaggaatgaaacggaatcggcgccggatgatccgaacgccgcgaggaatcgctccggctggcttaccattagaaaacgtaaggaggctttacaatgtccttttttgagaatacccgcaagcctgcgggctttggcggaaagctcatggtggtcatgatgaacctgagtcacagccctgtggcgcggtgggggcttcgctttctggagcttgctccggacgataaggtgcttgactgcggctgcggcggcggggcaaatatccgacggctgctgaaaaaatgcccgcagggtgtcgtcaagggcatcgactattcgcccgtcagcgtggagaaaaccaaaaaggtcaacgagaccgccatcgctgatggtcgctgcgccgttctgcaaggcagcgtggcagatatgatgttcgcggataactggtttgatgcggtcacggcctttgaaaccgtgtatttctggccggatctgccgcggtgcttccgtgaggtctggcgggtgctgaagcccggcgggacattttttatctgcaacgagagcaatggcgacacagacaaggacgagaagtggacgaagatcattaacggcatgaccatctatcagggtaccgagctgaaagcatatctggaacaggcgggctttcacgaggtgcagatacacaagaataaagcaggctggctgtgcgtcacggcacgaaaatgaggtgcgatcatgtcgaaaaaaacaacggaattccaacgaaaagcaatgagtcggatgtaccggggcaaggagatcttcaagcctctgaacaccggctggatcgataaaaacgttgcctgcgtgcgggaatgggtagcaaatatcttcttctactgcaaggacaatgctgtcattatgatcgatgccgggtacaactatgaccggctggcggaaaaaatgggctggttgggaatcgacccacagtcggttcagcacattcttatcacccaccaggacaccgaccatgtgggcgcggtggaagcggacagccccggattgttccaaaacgcagcgctgtacatcggggaagttgaaaaccgttatctgaccggagaggtacgccgcaaggtcatctatcatctttataagctgccgcaggtcacgatcaacaacaaaaaagtgctgcttcaggatggggaagtcatcaacattgacggcatcaaaatcgaatgcttcctcgttcccggccacacttggggacatatggtgtatcttgtcgatgaccgttacctgtttaccggcgacaccatctggttcggcgcggacggcggatacagcttcatttccgccttggcagaggataatgaactggcggtgcgatctctgactgcactggaagaaaagctgcggaggcgcgatttacatccgttgttcataaccggacacacaggctggacggacaatatggactttgcttttgcacacaaaaatgagctttgctccccctttcggaaaaaagcccatgatcccaacgccccatacgatgcctatgacgaatcggatgataccgaaaaaagagcaaacagcagatacttagcgggagttggaagatgaaggtttacgagttcggtaaaaaaagcgccccggcgcttttgctgctgcccggaacctgctgccattggaaggcaattttgggcgagtcattccgctgctggaaaagaattttcgagtactctgcgtcagctatgacggctttgatgagacggaaaacacagagtttccgaccatgcctgaggaaacagagaaaatagaagcgtacatcaaggaacattgcagcggtcatatccatggggcttacggctgttctctggggggggtcttttgtgggcctgctggcggcgcggcaaaacatccacatggattatggcattttgggcagctccgatctggatcaatcgccgattgccgccgcaaaattacagacggcgctgctcctgcccctgctctatcccttcatccgggatggaaagttcaaaagccgtatcctgcaaaaaaagcttcaaaaacgcatgggtcagacggaagcctatgtgcaggcgtttatggacatgttgggcggcgggcggccttatgtgaccatggaaagctgcaaaaaccagttttactccgatctcattacaccgctgccggatcagatcaatgtgcccggtacggaaattcatattttttacgccctgaaaatgggcaaaaagtaacgcctccgctacctgcggcattttgaccatcctgtcatccatgaacaggagctgcggcatgaagaactgctggcatgttacccggagcagtgggcggcactggtaaagcaaatcgttatggtagaggacaaaaaggtcatcatcggcagtgcccactttgtctttgaggacgagggctgttgtatcccggagggagagcaggagaaatatgacgcgctgcccgccgcgtattcccacctgtatctctgcatcgacggggagctggcggcggtcatctgtatccacgatcctctgcgccgggaggccaaggacgcggtaaaagcgctgcatgagagcggctttaccaatgtggtgatgatgaccggcgacaaccgccgcacagcggagtccgttgccgccgaggtgggcgtggacgccgtttacgcagaggtcctgccggaggacaaggccgcctttatccgtcaggaaaaggaaaagggccacaccgttatcatggtgggggacggcgtcaacgattctcccgccctctccgaggcggacgcgggcatcgccatctccaccggcgcggccatcgccagagagatcgccgacatcaccgttgcctcggaggatctctttgagctggtgacgctgcgtaagctcagtgaagcgctgatggatcggatccacggcagctaccggtttatcgtggccttcaacctgtcgctgatcaccttgggcgtagcgggggtactgccacccgcaatatccgcgctgctgcacaatacctccacattgggcatcggtttgaaaaatatgaccgatttgttggaagaacatgagggagcgtaattgctccccgtcgaggagtacacacccggcgtttttcaaagaagcacacagcagtttcagtggacgcctggtttcgtagggtactggtaggaataaaaattctatcatcgtgtattccgcaacagcgggttgcttactctatggggaagcgaggactgcgggttccacgcagtgagctgcggcagccgtgcctttctgatgaatctgaatattagggcggaatttttagtggttttcactcctgtcacagaacttgcgtcggttttacaaacacttggtttgcctgccggaaggggaagccttacaataaaagtatccggagaaaagcgaggtgttgtaaatgcttccctgtcaggaacactgcggtcagtattgccaaggctgtcatctggactgcacgtattggacgagcttccgtaaaaatcaggagtcacagcgtcaactgaaaaagcagtatctgagttattacgcggaattgtgcgccgtcaggacacggcaatttcggaaactatcccctttgaagtggtaaaagcggacaccggcaggatctgatcccgccggtgttttttttgagagtccgtcgggttcggaatggcatggctgacgcacttgaccagaattttacataccttttaccggggctgtctatcggttttttccggtctttcctataataaacgaagtatggcaacgtgcatacgggaacagctctgttggatcttaaattctcaactgcgggacacggcaaaggcgagcctgatgcttccggatggctcttattgccgcaagcacagtgccgtgccctttgattctcaggatacatttatgcagcaatatccgcatatccccgcagcggcggccggtgcgccaaaggagcgggtccattggctgaagaacttggccaaaaagctgctttgggcgtgaagtatttcttcgcctgcacgtcgctctccttctacgatggtgtgcggcagtgttaggaaaaccaaaaagtctccgcatagaaccgcagacagaaaaaagaattgtggcctgaagcttgatgatgtaaaataatagaaagtgtttggaaaattgcgggaaatcagagggaaaacaatgaaaaacgatagcagacttcgcaaatatgtgccatcgttgctgctgtttctgttgtttgaagcagtggcggtcacactatggcttatgaaggacaacctgttctacctgctgaatttcagttacatcggcggctgtctggcattgggaacagcgctcttcgccgctgggaaacgctatgcccgccattttgcgcagctggcagttggcagctatatgctgctgtacctcggcgtgatctcccgcgagaatatgcagatcgaggggttctggtactatctgtttctcggcaccttcgaggcggcgactatccactacgccgtggcaaagattttcggcccgctgctgttcgggcgcggctggtgcggctacgcctgctggacagccatggtgctggactttctgccctacaagcggccgcagaagccgcgtagggaaaaactgggcgttctgcgctatgtgatgtttgcactgtctctggcgttggtgtctgggctgttcctgatgaaagttgcgcatctggaacagatcatgttctggctgttcctcgccgggaacgcactctattaccttgcgggcattgctctggcgttcgcctttaaggataaccgcgcgttctgcaagtatctttgtcctgttgcggtttttctcaagcccatgagctacttttctctgctccgcgtccactgcgatgagagcaaatgcgtccactgcggtaagtgcctgcgggcctgccccatggatgtggaggtcaacagggaagcccgcaagcggaaaaatggaacagagtgcatactctgctatgagtgcacgaaggtgtgtcccacaaaggcactgcattgaaatgtgggatattttcagcccaatcgagtgaaaaagtgttgaaatattttctgggtatctgttataataaaaaatctacgcaggccgcagaaaagtatatggaaagagctgctgcgccgtgacggtacgcaaaatcatgaacacggatctgaaagaacccgttcacacataaggagcaaacgcatgaaaacagccattgtaacagacagcaacagcggcattacacaggcagaagcgcagaaaatgaacgttttcgttctgccgatgccggtcatcattgagggacaggcgtattacgaggggatcaacctgctgccggatcagtttttccgcgcattgacggagcgtcaggcggtctccacctcccagccgtcccccggcgatgtgacagccctttgggacaaggtgctggccgaatacgaggaactggtgtacatccccatgtccagcggtctctctgcctcctgcgccacggcgcagatgctggcggaggattacgagggcagggtgtttgtggtggacaatcaccgcatttccatctctcagaaaagctccgcgtgggacgccgtggccctgcgggaggcgggctgcggggcacaggagatccggcgggagctggaggccagcgggctggattccattgtgtatgtgggcgtggagaccttggaatatcttcgccggggcggtcgcgtgaccgccggagccgcggccattggcgcggttttgcagatcaagccccttttgaagatcgagggggagctgctggacgcctgtgccaaggtgcgcggcaccgcaggctgcaagaaaaagctgctggagaccattcgtggcgacgcggagcggctttccgccaagtgggacatcgacatcgccgtggccggcagctatcaggacgccgccgcactggaggactggcgggagatggcggtgaacgcgttcccggagcacggcggcatcttcgccgatccgctttccttcagcgtcagcagccatgtggggccggacgccttcggcatggctgtgagccgccgcctggcccggacgaaggacgggatctgatccgttaaaaaatagggaaaagaaggggacacacgccgtcaggcgtgtgtccccttcttgttgacatcgcggtacctgcggaaccgtgcagcactgatgaatgggggcaaaactctgcaaggacatctcaatttgcttcttgctgttgaactctgttgtatcacatgcaggttacactgtacagcagagaagaaagcggcgatctgcgcttttcataccgcgccagcgctgcaaacgacctgtgccacaggcgagaaggttattctgcattgcgtagctgcgtttttgtgaataaggggtggacagactgcgtccaagcgagaaaatactggtgcttatacacaaaaaacttgagcaaaaaacagcagaaagtagaaaaaatagaagtgtgttgacaacgaaagaagcgcatgatatgttaaaaatgcaatgagggcaatacgccatcattatttttgcaaacgatatgagaacgttctcattttgggcgaggggtatttgaatggttgctacgatcatcgacgttgcgaaaaaatgtggatactcaaaagcaaccgtttcgcgtgcatttgcgtctccggaagcggttagcgagcgagcaaaggcccgaatctacgctgcggcaaatgagctgaattatacgcctaatccaatcgcccgagcaatggctcgccagaaaacggataatatcacgtttgtgatccacgaaaatcagtatcctgccattctgaatccgttctattcgtcggctttggaagcgatcatgcaggaaacgatgaaacggaactatggcctttttgtcactacaaatgaccatgtgcgtctgcccagcggagaagtgagcataaaaaaacacatggatggcgttatcatagccggacaaacagaccgaagttctatcgaaagcttttgcaaacagaacattcccgttgttgtgctgaacaatctgatccagatggaacatttgccttgcatcgctgttgacaactatcatggggcaaaatgtgctgctgaacatttgattcagaagggccatcgacggatcgctttgctggagggacgtttttctccccaaatttaccatgaccgccacaacggatacatggacgcgatcgttagtgccggactcacagtagatcctttgcttatacgggatgtggatgccaatgagctgtgcgcggaaacttgtgcccgtgaaatgctgagttgcccggagcggccgactgcgctgctatgtaccaatgataccattgcggtaggagcgatgaaggctgcgatgcgtatgggactccggattccggaggatgtagcagtgatcggatttgatgacagctatgtcagccgggtcattgaaccggagttgaccacggtgcggatcgattcccttcagatgggcaagttagcggtagaaatgctgtttcgcctgattgacggagaagagctttcggaatggtatattgaaatgccaacagaactgatcgttcgcggaaccacttgagataatcaaaacaaaaaacgaggtgaagaaatgcggatcacatttgtgaatgtcggatatggcgatgccattttgatggaatcagacacgggctatacggcgctcttagatggaggcggcaatctgccgcaagagtttgagggagatccttaccgtgttcgctgcgccgaatatttgcgaacccgacagatccatcatattgatgcgctgctgatttctcacattcatgaggaccatgtctgcggcttgctgccggtgctgaaggatgtaagtgttggcgccatttatgtaccctacccggcagaaccgttcttgaagggcaaacccttagaagcaaaagaaggggcggccagaagcgttcccttgtatacggcggcattgaacagctaccgtgagatcatatcggatgcgaatgccaaacaaattccggtccatgtgctccatcctgatgaccggctggatttggcagaggatctgaaaatcagcgtcttggcaccgaaggaaaagagcatcagcgattacatggctttcatagagtgggcctatgatgaaacagacatggatgtgatcacagagatcctaaccaagttagacgctatgtccaatcacaccagcttcctgttgaggatcgaagcaggggacgaagtttttctgacggcagcagatagctgtcccggtgactgggacgaggtcgatatttctttactcaaaaatgtaaccgttctcaaattgccacatcacggtcaagttgatagtatttcagaacaatttatgggagatatgccgctgcggtatgtgatcacaactgcatcctcggatcgccgctaccggagtgcaaatgctgaggtttatgagcggcttttggccatgtgccccgcaaaccggccgccgcaattccttttcacggacgaacgatcttaccccccatatttccaccagcctgacggttttcaggccatcactcttgtgatcgattctgggagtattactccggaatttatcaaatttaccaccaaacactaattaaggaggaaccacgatgaaaagcaagaaactcttatccctgcttctcgctctggccatggtcatgagcatggctgcttgcggcgcaaagaccaacgagccccccgcgacctccggtactccgtctgagacgggtgcccctgctacggaagaactgaattggcccaccaaggagatcaccttgatccagccttggagcctgggcggcggtcctgacgtgatcacccgtcagatcgcctcttacagcgacaagatcctgggtgtccccatgatcgttgaaaaccataccggcggttccggtaccatcggcatgaacgattttctggaggctgaggacgatggctacacgctgttctgctgcaacggtcctctgttttctctgactcccagctttattgatgtggactataccattgatgacatcagccccatctgcggtatccgtatcacggagtttgtcatcctcagcaacgcatccagcaagattaccaacattcaggagctgaaggattacgctgccgctggccacacggtgaaatatgcaactaccggcggccccggcaatgacagctacaccatgatctccgcactgttcgcccttctggacatcccctgcgaggcagtgccttatgacggcggccaggaagcgatcaacgctctggttggcggccatgtggatattgccatcggttctcccccgacctatcgcgactatgtgatcaacggtcagctgaactgcctgggcacctttatccccgaaggtctggatgtggaaggcattggccacatcgcttccttcaaggagcagggcattgacgtggagttcaccggtatggactatctggccgtccgttcctctgtcgatccccgtatccaggaaaagctgcgcgagtttgttctggaagtgtatgccgatcctgagttccaggcgttcatggctggcatgggcatgaaggcatgggattccgatgctgccgagatcctgagcatgatcgattcccagactgaggctatgagtcagtacatccctctggttcagtaagtgactgaggtgccctgagtccttgggcttggggcacccctttttaactgaggtgtgttattatgaaaatcaagtataaccatgagatcatatcgggcatcgtgtttgcccttatcagctcttttttatggttttctatccctacgcaggtcaagacgatggagaaaaccgctattaccgcacagacgcttcctaaaatcgccatcggcggcatgtttgtttttgccgtctgccttttgctggaaggcatctttatgaaggaaaaagaggaattgaccgtcacgaaggaatcctttcattccgctgcctttaagaaggaactgcgctccattctctattgcctgttccttgttgcctactgctttatggtgaaacctcttggttttgtcatctccaccgtgatcctggttcttgcgatcatggtgtactatggtgccagaaaatggtattactatgcgatcccccttgccatggtaggcatcgtatattatgtattccgagtcgtgcttcacgtctctctgccgtaacggggaaggaggaagatcatggaacaatttttaggcggtttgcaaattctgttgaattggcagaacttcttgattatccccgtcggcctggttatcggcatcgtggtcggagcgatccccggcctgacctctgaccttggcattatcttgtgcattcctctgacctacggcatggacccgaccatggcgatcttgatgctgttggccatttattgcggcggtacctacggcggctcgatcacggcgatcctcatcaatacgcccggtacatccgccaatgcggcaacactgtttgacggctatccgatgaccgtcaaagggcaggcgtttaaggccctgcaaatggccttgtacgcctctacgatcggcggtctgatcagtgcgttttctctgctgtttctggctccgctgatcgcaaagatcaccctgctctttggccctgcggaatattttgcgctggcggtgttcggactgtctgttattgccggtgtgtcgaatgacagcattttcaagggcctgattgctgcctgccttggtttgttcatgaccacgatcggcgtggattctatcagcggtacagcgcggttcctgtttggtcagaagaagctgatggccggtatcgacctcattattgcgctgatcggtatgttcgccatctctgaaattctgaccaaatctaaatatgatcccaaaacggatcataaaatttacgaccccaaggccctgacgaaggataagatcacaaaagaggaatatcggcgctgccgcaagcccattggcattggttctcttgtcggtgtcatcat

SEQ ID NO: 12164 - DNA, 39126 bp, Unknown
  gut microbiota DNA sequence
ccgccactggcggcgcttcacctgtttccccttcttgggttatctccgcgctaagagccgccttgcggcggttgcgctccgaaatgcgcctgcgggcgcagtcccgcgcacacccttcacccgcaaggggtatgcatcatccgtaaagcggcggagccgctaacggctgacctaccttaccgtcgcggaaaatttatcactttatcgacagcctcagtcggcggccaaaagaccaccggctccctttttagtcaaaccgccccggtgcgtcttgacgggcaaaatcctgcatagactgtcccgaaaggggcgatgggatgctggaagcactgaataccctcctgtggggaccggggacgctggcgctgatcttagggaccggggcgtggctgaccctgcggacagggggctttccccagcggaatttagggcgggcactgaccctgtctttagggcgggaggcccggcggaaaggccggggcggcgtgtcccccttcggctccctgatgactgcgctggcctccacggtgggcaccggcaacatcgtgggcgtggcggcggcgctggtatccggcgggccgggggcgctggtatggatggaactggcggcgtttctgggactggcagccaagttcgctgagtgcatgctggcggtgaaataccgccatgtccgccgggacggcacccgttggggggggcctatggcggtgatggagacgcggctggggtccgccggggcggttttgggccgcttctacgccttattcgccctgctgatggcctttgctatgggggcgatggcccagtccggggccttggcggatactttcttcgccgccttcaccctgccccgctggcgggtaggactggtgacggcggtgctggccctggcgattttattgggcggcatccgccgtatcgcggagatctccacggtgctggtaccggtgatggcgctgctgtacctgggcggcggactggcggtgatcctgggaaacctccgccgcctgccggaggcgctgatcctgatgcttcggtgcgcggtggcgccggaggccgctctgggcggggctttggggatcgtcacccgccgggaggccctccgctggggcgttgcccggagcgttttttccaacgaggcggggttaggctccgcctccatcaccgccgcctgcgctgacacggatgagccggtaaagcaggggctcatcagcatgaccggcgtgtttttcgacaccatggtaatctgcaccgttaccggtctcgccatctgctgctccggcacgctgggagcggcggatggcaacggtctccccctcaccggtgcggcactgaccctccgggcctttgaaacagtgctggggccgctggccccgtggctcatcggtgcggcgttggggctgtttgcctttacctccgtgctgggctgtgcagttcaggcagagacaacggcatcatacctgctgggaccggaggcggtacggccctgccgggtgctgtacggactggcggtttttgtcggggcggtgattcctatggccacggtccttcagcttgcggatctcgccaacgcactgatggccttttcgaacctcgtctgtctgctgctgctctccggtgagatcgccggagaatgtggcagaaaggagcggtaaaaatggcagctatcagaaaagtaaagcgggtaagaaaacggcaaggaagaatgttttcagaatcgcaaaggttccgaaaatggctccagtggcgcaaatacgcgtttttgtgccgctggaactgtaaattttctgtgatgacgttgcatttttgtgatttcgtggtatgataaccgtggtataaaatttttgaaaaggactgataccatgacaaaaatcgacatcgtctccggcttcctgggcgccggtaagaccacactcatcaaaaagctgctggcggaagcctacaagggtgaaaagctggtgctgatcgaaaatgaatttggcgagatcaacattgacggcggcttcctgaaggaatccggcattcagatctccgagatgtccgccggctgcatctgctgctctctggtgggcgacttcaacaaggctttgaaggacgtggaggctcagttccaccccgaccgcatcctcattgagccctccggcgtgggcaagctcagcgatgtgatcgtggcggtggagaacaccgtaaaggacgttcccgagatgaagctcaacagctttgtcaccgtggcagacgccaccaaggtgaaggtctatatgaagaacttcggtgagttctacaacaaccagatcgaggccgccggtaccatcatcctctcccggactcagaagatgacgcaggagaagctggaggccgccgtgtccatgctccgggagaaaaacgccgatgccgccatcatcactaccccttgggatgagctgaatggcaaggccatcctctccgccatcgaaaaggtctctctggccgatgaactgctggagaagatgcgggccgaacatgaggccgatgagcacgagcaccatcaccatcatcatgacggcgaggagtgcgacgatcccaactgctcctgccaccaccatgaccatgagcacgaggagcatgagcatgaacatcaccatcatggccatgagcacgagcatgaccatgaccatgacgagtgctgcggccatgagcatgaccatgagcatgaccatgagcatcatcatgaccacggcgagtgcgatgaccccaactgctcctgtcatgaccatcaccatcatcaccacgccgatgaggtgttcatctcctggggtaaggaaacacccaaggtgtatacacaggcggacatcgaccgtattctgacggcgctggattctggtgactacggcgccattctccgggccaagggcatcgtgaacggcaccgacggcgcatggatcgagttcgactatgtgccggaggagcatgagatccgggcgggccatcccgactacaccggccgcctgtgcgtcatcggttccaatctgaaggaggaaaagctggcagagctgttcggcctgtaagcgaaaaaattcatggctgatattcctgtatatctcatcgccgggtttttggacggcggcaaaacggattttatcaacggcattttagaggacggcttcgcccgtgaggacaaaaccctcctgatctgctgtgaagagggcgagctggaatacgagcagaaggcactggacaacgtgacggtggtcacggtggatgaggagaccgctctcacctgttcccagtgcaaggaatgggaaaagcagtacaagcccaagcaggtcctcattgagtacaacggcatgtggtccatggagcggctgtaccgggaggtactgcccgccaactgggtcctctatcaagtgatgacctttgtggacgccaatacctttgagacctatgccaagaacatgggccagatcatgatggaaaagatcaccaacgccgacctgctggtgttcaaccgctgcaccgatgagctgaaggccgcactgcggaagcggaatctgcggatggtgaaccgccgggcggacatctatctggaagatctgaacggcaacagcgaggactacaacgacggtgaggtctgtccatttgatctgaaccagccggtgatcaacattccggacgatgactacggtgtctggtatgtggacgtgatggattaccctgaccgctgggcagggaaaaccgttcacatgaagctgctcatgtgccactccaagaagtatcccggtacccactgccccggacggttcgccatggtctgctgtgaaaatgacgtgcagttcttgggtctggtggccaagggcgtggatctgaataagtacaagaaccgggactgggtggaagtcgaagcccgtatggctttggaaaatcactctgcctacaagggcaagggtccggtaatgcacatcatctccatcaagccctgtgaaaaacccgccaacgaggtcgtgaccttctgatctactgatattcaaaaagcacgtttccttttgacaaggaaacgtgcttttcttcttgcatgcgcttcttatatttgtcaccgtgcaagccattggcaaatcaaccgttatttcagtgccgttgtgccgctcagaattgctgaggagggtctgttgttccggtatcaccgcggttttgattctgcgccaaattgcccgcgctttcaatacgattcgtattttttacttttaaattgacatttcgtattgtaattccgcaagtttttttgggaatcccggttttctctccgcttcgcaaagctcgcaaaatttcgggaatacttgcaaattccgggcaaatccatataatagaggtattctggtatgaaaggactttacgttttgaaagaaaagcggatctataaaagagaactgcccctctgggggagtctgctggccgccgttttgctggcaggctgtatcactttactggccctgtggtgccagccaaacgccctgcggacggtgctggcagggttcaaggcccagcccctgctgattgttttgaacgctctccccatcggacttttgctgctggccttcgccttcctgttccggaatgtcttttacagcggggcactggtgaatttcttcgtctgcgcgctgtcccttgccaaccgggtcaaaatcgaggtccgggatgagccggtgttcccccgggacttctcccttctgcgggaggtaggcagcgccatccagtcctatgacatccgctatccggtgaaggccatcgccgtggtggtgctgaccaccgcactgctcatcggccttggggtcctgtttcccagccgtccggtgtccctcgccgcactgaaggccaagctgacaaaacgggacgccgtggccgtgttccccggccgctgctggccggagcgaatcgtgggcgcggtcctcagcttcggcgttctgactgcgctgatcttcacggtgtacgccagcaataccctctacaattctttccgggtcagcaacgcctactatgtcccctcggtgttcaacgagcttggtttcccctactgtttctgccaccagttcactacctatccggtggacaagccggagggcttttccaagtccgaggccgccggttgggaggccggcgggcagacggggcttggcaaggacgtcagcgtaatccttgtgatgaatgaggcgttttccgatctcaccgaccagcctatgttcaactggacggaggaaaccgatcccctgcccaacctccacgctttgcagaaggacccccacgccctttccggtcacatcgtggtccccggctttgccggaggcaccgccaatacggagttcgacgtgctgacgggaatgcagaccaatgcactgtccgtcaccgccacctccgccatgcgggtggtaaaccggaatctggacagcttgttccgggtgttcggggcggacggctaccgcacctccttctaccatcccggcgacgcctggttctataaccgcgagaacgtctaccgctggctgggggcggagcacgaggtatttgccaaggacatgaagaatctggaatacaagggccgctgggtcacggatgactacatggctggtctgattgaggaagaatttgaaacggcggtcagcgagggccgccccctgttcaactacaccaccaccatccagaaccacatgagctacaccgccgacaagtacggcgagggctatgtgttccccccggtctccaccacggcggacatctccccggagacccgctccatgctggaggtctacaccgaaggcgtccgtgacgccgacgccatgctgggccggctgacggcttacttcgcagagcgggaggagcctgtggtgctggtgttctacggcgaccacctcccctatctgggagacaaccagaagggctatgcggagttggaatctgaggtgtccattccggaaaacgagcgggaggacattctctgctcttacaagaccccctatgtgctctgggccaatgacgccgccgcggacacgctgaactggaacgaggccgtggccgcgctggacctgccggaggacggcgttctctctgcttcctttttaggcagcgtcctgctggacctcaccggccgcgccggggaaagtccgtggttcgactttctctcctccctccggcggatcgcgccggtggtgcagaagaaaacctatatcctggcggacggctccgtactgccgcaacggattctgaacgagcagacggatgaatcgtccatggaattaaaagacgccgtccgcaagtggcgctgctggagctattacaagctgaaatacgtggacgtgggttagacccaccgcgaatatatggaaaaagcggttccggaacttccggaaccgctcttttgtatcagcttttcgcttcgatcttcgctccgcatttgggacaggtgatgacgatcttccccttcccaaccggcaccctgcagatggcgccgcatctgcaggtgaagtacttgtgctccttatccgcccggcgggccttggccccggcggcgttgttccgggccttccagatccagcccataaacttctgattctccgcccggcgcttggtcaggtttttggagaacatccggaacagaataaacaccatcagcacccaaaggagggattcgcagattcgggcggggatccatagccgcagaaggctgaaaatcaactgggccaccagaatcaccaggtagccccgaaggagcgcctgattcatctgatccatgccgttccggccgtacatgaaccgcgccaccgcacatctgaatttatagaacatacgcctgctgcctctttccgtcggctcccgcggaaccgtaactgtttttatcttacatattttagcggataggtcagagaaaggcaacggtttagcagcggagtttacaaaaaagtaatttctttccaagtcattccgtgttaaaatgacatacgatatgaaaatacacaaaggaagtgtttggtttatggcaaagaagcaattcaaagcggagtccaaacggctgctggacctgatgatcaactccatctacacccacaaggagatcttcctgcgggagatcatctccaacgccagcgacgcctgcgacaagctgtgctatcaggctctgacggatgacagcgtgaagctgacccggaaggacttcaagatcgacctgtctgtcaacaaggacgcccggaccatcaccgttacggataacggcatcggtatggacaaggaggatctggagaacaatctgggcgtcatcgcctcctccggttcctacaagttcaagcaggaggtgggagatgacaccaaggacactgacgtgatcggtcagttcggcgtgggcttctactccgccttcatggtctgcgatcaggtgacggtccgcacccggaaattcggcagtgacaccgcctatcagtggcagtcctcaggggccgacggctacaccgtcacggaatgtgataagtccgatgcgggcactgaggtcatcatgcacctgaaggatgataccgaggacgaacattacagcgaatttttggaagaatggaagctccgggagctgatcaaaaagtattccgactacatccgcttccccatccgcatggcggtcacgaaaacgaaaaaggtggcctcctgcatgtccgacaagccggacgaggtaccctatgtggagatggagaccctgaactccatggtccccatctggcagcggaaaaaggccgacgtgaagccggaggaatataacgagttctatcgggagaagttccacgatttcgcagacccccagcgggtcatcaccgtgtccgctgagggtgccgtgacctacaaggccttgctgttcatccccggcaccactcccttcgacttctacaccaaggaatacgaaaagggtctgcagctctattccagcggcgttctcattatggacaagtgtccggatctgctgccagagcacttccggtttgtccggggcgtggtggattccccggatctgagtctgaacatctcccgggagcttttgcagcatgaccgccagctgaaggtcatcgccggaaatctggaaaagaagatcaagagcgaactggccaagatgctcaaggacgagcgtgaggcttatgaaaccttctggaagaacttcggccgccagttgaaatacggcgtggtcagcgagtacggcatccacaaggacctgctgcaagatctgctgctgttctggtcctccacggagaagaagctggtgacgctggatgagtatgtctcccggatgaaggaagatcagaaggtcatctattacgccgccggtgacaccgtggataagatcgacaagctgcctcagctggaggctttgaaggatcagggggtggagatcctctacttcacagaggaagtggacgagttcgtggcccagaccctgcggagctacaaggacaaggagttccgctccgccatggacggtgcatccgacgagtccgctcaggaaaaggctaaggaggaggccgacacccataaggatgtgtttgccttcgtgaaggagacgcttggtgacgcggtggcagaggtgaaaccctccacacggctgaaatcgcaccctgtatgtctcaccgccggcgagggcctgagctttgagatggagaagtatttccagctcatgcagcctgacagcagcatcaaggcccagcggattctggagctgaacacggagcacccggccttcaccgctctggagaacgccgtgaccgccgacccggaaaaggccaagatctacgccaagctgctgtacgatcaggcgctgctgatcgcgggactgccgctggacgatccctccggctacacggatctggtgtgcggattgatgaagtaagtctgataagcaaaaccttgccaccggcgtgtcttgcaagacacgccggtgacagcagggcggaaagatcttttcgccctgctgccaatattttcagagcttttgtaaagttctgaaaatatttaatttaaatggcgcaggacacccttcttgagtttcccgcacacactcttcacccgcaaggggtatgcggcatccgtaaagcggcacagccgctaacggctgccctaccttaccatcgcggaaaatctaccattttatcgaaagactccccccggcgtgtcttacaagacacgccgggggcctttttgctatttctcgctatttcggcagtttagcgcgcaaaaacacctccccgtggaaaatccacgcggaggtgttttgtctgtattcggcgtttctcagccccacagagcggagagggacgggataatttgctttttcctgctcatgatcttggacaggaacacgcagttcttttcctcgccggtgatattgaatgcctgccggatggtctccgtatctccggaatacagcagataggagccttccaccaatacgttcgtgatcatcagcagcacaatgtccagaccgttcttcttacggatggtctccatcgtggcgaggaattcctctttccgggccataagacgatcggaatccagacaggtgatctggctcaccgccagattgtgaccgccaatgtgaaattccttgtagtcggtgcggataatggactcagcgctcttgtcctcaccggtagcggcggagaaaatggtctgccccagctcttccagagagacattggcaatacgggacatccggttggcaatgtcgatatcccgctgggtgcaggtgggagatttgaacatgaccgtatccgacacgatggcggcagccatgaggcccgccattttggcagagggcatcagacccttttcctgatacatatccgcaacgatggtggtagaactgcccaccggctcattccggacataaataggattgttggtctcaatatccgccagacggtggtggtccacgatctccagaatgtccgcctgatccagaccgggcacagactgggccttttcgttgtggtccaccagaattacccgcttgcgccggggacgcagcagatggaatcgggacagggttcccaccacgtgctcattttcatccagaatggggtaagcccggaatcggctttccagcacggtattgcgcacgtcatcgatataatcgtccagatggaaggaaaccagatcgtggctcttgcagatgcgctcgataggcagagagtggcagatcaggtggactgcccggtacgcgtcataaggcgtggagatgatgcaggtatcggtgtccagctccagcagctcccggctgacctccgcctgacagacgatgacgcaggtgacccgcagctccagtgcccgcttgatcatgtccggctgatcgccgcagaccacgatgctgtccggagaagaaaacagcaggttttcccgtcccgcaggcagggcgatggtgacctcgccggagatctcatcccggatctggccgccctcgttgaggacctttccctccaaaacggagagcaggttatagaccggcacgttcttgaccgtggaattgcggacagccagcatatcgtagctggccacgtcaccggcggaaagcataccgtaaagcgtaccgtcctcattggccacaggcagtacggagatccggtccgcctgcatcatctgccaggcccggctgatggtagcggcgggagacagggtgggcggcgtatcgaagtccaggtcccggacctgcgtccgaacgttgttgatcagctccggcggctgggcaccgaatttgtccagaacggctttcgtctcatcgctgatctggcccaggcgggcggcgcagtactgccgctgccccagagcgtttttcagtgcggcgtaggccatggcggatacgatggagtcggtatccgggttgcgatggccggtaatgtaaactttgtccattccacagctcctttcggatcgttcttaaattctgtttctctcatgattatgagagtccggcgtgaaattgtcaacagtgcctttcaccaaatggaccatgcgaaagcacagtctcacaacccattttgtatagttccggaccatttacaggatcagaagctccttgggtgccagcgtaatgtcctgacagccctgttctgtgatgacgatcacatcctcaatgcgaacgcccagcttccccggcagatagatccccggctccgcgctgatgacagcgccggcaggcagcggcttgctgttggacggcgtagcattgggattttcatggatctccacgccaacgctgtggccaaagctgtggccaaaatagggaccgtatccggcgtccgcgatgacctgtcgggcggcgccgtccaccgctgcgccagtgacgccggcctttgccgcagcgattccggccagctgggccttgaggaccgtgttgtaaacagtctccatctcctccgtcacatgaccaacggccactgtgcgggtcatatccgagcaatagccgccgaatttgcagccgaagtccatggtgacgaactccccggcctgaatgggcttctcactgggaacaccgtggggcaggctgccgttggggccggagaccacgatgggatcaaaggacttgtcctccgcgccgtagtgcagcattttatagagcagcagtgcggcaatttccttttccgtaacgccgggacggatctcgccgagaatgtccgccagcgctttttccgcgatccgctgggcctggatcatacactccaactccgcctggtccttgacggcccgcagcgtccacaaaagctccgtggcggggaccagctcgcagcggagcttctccgaaaagcggcggaaatccgccgccgtcatatattcatcctcataccccatgcgggtgatgtgttccttttcgatgacctcgttgatgagggcggagtagggatgttcccggcccgtttcccggatctccgcatcccgtacatggcgggctgcggcctccgtataccggctgtcggtgaaataatagttgtggtttcgagtgacgatggccacaccgtccgtcccggaggagtgaaaaccggaggcgtaaaagcggttggcctcacaagtcagcagcacagcgtccaagctgtgggtctccagcacactggcgatttttttgaaatgattcatagcagatcctctttttctgagagccgcggcatatcaggtgtaaccgaccctctgtgatgagcagtgtagcagaatttcacgaaattgtcaaagcggctcgtcagttcggatttaatctcaccgtattttgtggaaaatcacagttgactttagtcgtttaaagctgtatggtaataacatcacaaagtccggtgcggcggaaaggagttcacaatgcgtttcggaatgtttacctatatttaccgctacgcacgctattttgcgggcttctttcataatgcagaaacggaacaggcattctgccgggcataaggcttgcactcgttaaacgcgagggggctctgttccatggacagagcccccttgttttttgaaggcatccaactttgtgaattcgtccgaatacggacaaaaggagaagatcactatgaaaaagaaattgcttgctcttgttctggctgcggccatgacgctgtcccttgcctcctgcggcggctccaagacggagacaccctccaccggctctgacaattcctccgccagctctgacaattcctccgccgagggcgccacctataaggtcggcatctgccagctggtgcagcaccccgcgctggacgccgcaacccagggctttatcgacgctctgaatgaagccctccccggtcaggtggagtttgaaaacaagaacgcctccggcgagggcaacaactgcggcacgatcgtcaacggctttgtttccgagggcgtggacctgatcatggccaacgccaccgccgccctgaccgccgccgcttccgcgactgccgacattcccattctgggcacctccatcaccgcttacggcgtggccctggatcttgacgatttcgacggcaccgtaggcggcaacatctccggcacctccgatctggctgacctgagccagcaggccgatatgatcaccgagtggttccccgaggccaagaaggtcgctctgctgttctgctccgccgagcccaactccaactaccaggtccaggaagtagcgacctgcctggccaacaagggcattgagaccaaggaatttgccttcaccgactccaatgacgtggcgtccgtgacccagtccgccgctgactacgcggatgtggtctacctccccaccgataacatcgccgcctccaacaccgaggccatcgccaacatcctggtgcccgccggtgttcccgctatctgcggcgaggagggtatctgctccggctgcggcgtggccaccctgtccatcagctactatgatctgggcgtgaccaccggcaagatggccgccaagatcctcaccggcgaggcggatatctccaccatgcccatcgaatacaccgacgccacccccaagtacaaccccaccatctgtgaggagctgggcatccagcctctggacggctatgaggccatcgagggctgatccaaaacaaacgcgatcctataacgaaaatctggcgggagggggcaatcccctcctcccgctgtgaacaaggagaaacggtatgagttttctatcctcccttctcaatgcgctgccgggcgctgtggctcagggcctgatctggggcctgatggccatcggcgtctacatcacgttccggatcctggacgtggctgatctgacggtggacggatctctggccaccggcggtgccgtggccgtcatgctgatccgggcaggtctgaacgcttgggccgcgttgctgtgcgcctttctggcaggtatgctggccggctttgtcaccggcctgttccacacgaaatgcggcatccccgccattctggccggtattctgacccagttgtccctctactccatcaacctgcggatcatgggcagcaaggccaatcaggcagtaggcgtggataagtatgatctgctggtatcccagcggtatgtgcgttcggtgagtctggataaccccctgcctctgctgctggtattcacggtggtgctcattgccgttttgtactggtttttcggcacggaaaagggctgctccctccgtgccaccggcgcaaatcccaacatggcccgggctcagggcatcaataccaacgccaacgtggtgctgggactcatggtgtccaacggtctggtagccctgtccggcggtctgctggcccagttccagggttcctccgacatcaacatgggccggggcgctatcgtcattggtctggccgccgtcatcatcggcgaagtggccttcggcaaggtattcatcaacttcgcgttgaagctgctggcggtctccatcggtgccgtcatctactacatcgttctgcaaatcgttttgcagctgggtctgaacaccaacgatctgaagctggtgtccgccctgatcgtggccgtgttcctggcgatcccctactggaagggccacatccacaccaagaagggaggttccgtccatgcttgagttgaaggatatctgcaagacgtttaatcccaataccatcaacgctaaggtagcgttgaaccatctgaacctgacactgaatgacggggattttgtcaccgttatcggcggcaacggtgcgggcaagtccaccatgctgaacgccatcgctggcgtgttccaggtggattccggcaccatcaccatcgacggacaggacgttaccaagctgccggagcacaagcgggcggcatttctggggcgggtgtttcaggaccccatgatgggcaccgcgcccaccatgcagatcgaggaaaatctggcgctggcagcccgccggggccagccccgggggttgaagtggggcatcaccgccttggagcgggcagattacagggaactgctgaaaacgctggatctggggcttgaggaccgccttaccgccaaggtgggcctgctctccggcggtcagcgtcaggcgctgacgctgctgatggcctccctgaagcagcccaagctgctgctgttggacgagcacactgccgctttggaccccaagaccgctgacaaggtgctggctctgtccgaccagatcgtgcaggagaacaacctcaccaccctcatgatcacccacaacatgaaggacgccatcgcccacggcaaccggctcattatgatggatgccggccgggtggtggtggatatctccggtgaggacaagaagaagctgacggtccccgacctgctggccctgttcagccgcgccagcggctctgacgaggccaatgacaaaatgctcctgtcctgaaatcctacatacatctctcccccggaaggtctcttccgggggattttgctatgcaaaagcacagtaaaataagaaatgtgccattccctcgcccccgcagggcaaccgggaatgatgcacgaaaacttcatgcactggcatttgtgcatgttcgcggtgcgttgctcatgcatgcagttttatgcgcaaaaatataccccgttcttccgctttttcagaagaacggggtgtacttttaaatcaggcatgcggtcagtccgcgctggaattcatgacctcgttggcggacttgacggtgcggcgcaggaagattgtgctcagggtgaaggacatgacctctgcgatggggaaggaccaccacaccagctccagccgtccagtccgggacagcagccacgccaccggcagtaatactaccatctgacggcacacggagacgatcaggctgtacaccggattgccgatggcctggaacaccgagccagcgatgatgcagaagcctgccagcaggaaggaaacgctgatgatccgcagggcgggaacgccgatggccagcatggtctccgatgcgtcgaacagttccagcagtgtggagggaaacagctggaaaatggcaaagcccacaaccatgatggccatggcggtgatgttggaaaggcggatggtcttccagacccgctggggtcgggctgcgccgtagttataggaaatgatgggcaccatgccgttgttcaggccgaagatgggcatgaacacgaagctctggatcttgaaatacgcgccgaacacggcggtggcggtgggggtaaagacaaagaggatcttgttcatgccgaaggtcatcacagaactgatggactgcatgatgatggatgggatacccacccggtagatctccttggccacgatagggtcccagcggatgttctcccggcggatgtgaatgtcgtggttgcacttgatattcacgatcaggcccacgatcgccgccacgatctgtccaacaacggtggccacagcagcgccggccacgcccatccggggtgcgccgcacaggccaaagatcagaatggggtccatgacgatattgatgatggcgcccaacaactgggtacacatggccagactggtacggccggtggattgcagcagccgctcaaagcagaactggctgaaaatacccacggaaaggcccaagcagatccgggtgtactgcacgccgtattccacgatctccggcactgccttggcctgcgccacgaagaagggccgggagaggaacaggccgatgaaggcaaagacaagatagctgcaaatgggcagcaggaagatacctgcgccggcagcccggtccgccatctcctgctttttctcacccagagagcgggaaagcagtgcgttgatgcccacggcagtgcccgcgcccacggcgatcatcaggctctggagggggaacgccagacccacggcgttgaaggcgttctcactgagccgggagacaaacacgctgtccacgatgttgtacagcgcctgtaccagcatggagatcatcatgggcaccgccataccggccagcagcttgcctaccggcaaaacgcccatcttgttttcctgaggagccgcacccgcggcgttttgcttactcatagattagattggttcctttcatatcagctttcggaagaaagacgcggcctctcagccgcgccttttctggcatttactttttcagttcgccggtggctaactgcgtcaggtaggcattcaggaagccgtccaggtcgccgtccatcacgttgtcgatctggctggtttcgtagccggtgcgggtgtcctttaccaactggtagggcatgaacacgtaagagcggatctggctgccccactcgattttcatctgcacgcccttgatgtcagaaattttctcggcatgctgctggatcttcagttcaatcagcttggcacgcagttgcttcatacagttatccttgttctggaactgggagcgctcctgctgggaggccaccacaatgccggtgggcttgtggatcaggcggacggcggaggaggtcttgttgatgtgctgaccgccggcaccggaggagcggtagacctgcatttcgatgtcctccgggcggatctccacctctacgtcatcaggcagctccggcatgacctccacagcggcaaaactggtctggcggcgggcgttggcatcgaagggggacacgcggaccagacggtggacgccgtgttcgctcttcagcaggccgtaggcattctcgccctcgatggaaataacggcagatttgataccggcctcgtcacattcctcgtagtccagcgttttccaagcgtagccgtgacgctccgcccagcgggtatacatccgatagagcatctggcaccagtcctgggcctcggtgccgccggcaccggagtggagctggagaataacgttgtttgcgtcatactcaccggagagcagcgtggtcatacggatctcttcgatctcggtttccagcgcggggaactctgttttcaactcttccaggatctcttcatcctccgcctcctggcccatctcgcacagggtggtcagatcctcccaggtgctcatgagtttcttgaagcggtggagcttgttttgaagctgcttcaggcgggtctgcaccttctgagagcgctccagattgttccagaagccgtcctgagtggtctcatcctccagacgggcggcctcctgagccacagcgtcgatgtcaagggcgtcccccagcttcttcagctccggttccaggtcccgcagcttctgcttataaacgtcatattcgatcaaagccatactgattctccaatttccatatagattactttagccatgatattatataggagtttcccgattttgtaaagggaaatatgcacaaaaatgacgattttcaaaaattcagcgcacgtttgcggaaaacagatgaaaaaagagacggacaaagtccgtctctcacgctcaatgattcaggataaactgttccagctcctctgccgtccgcaccaccgcggcagccccggcctccgccagctcgccgggtgcggcgtacccgaaaaactccacgcccacgcaggcaaggccgcattcccgcgcgcccagcacgtcatacttccggtcaccgaccatcaaaatggtgggcttatcagcatcggtcaggcgcaggcggcgcatggcttcccgaatgacatccgccttttcccagtcggcccccgcagggctgccggtcacagcggacagaaagggtgtaaagccaaaacgccgacagatgctcacgcacagctcctccggcttggaggaggccaacgccagagtgtatcccttggccttcagccgttccagaacgtcccgaataccgggggccgcctcgttttcatactgtcccaccggcacatagtgctcccggaacacccgaacgccctccaccgccttctcccggctgtagccgcagtgctccatgaaggattcctgcagcggcggaccgatgaatttcaaaagggtctgggcatccggcatggtcccgcccagcttttcaatggtgtatttcacggagttgacgatcccctcccgcgaatccgtcaatgtaccgtccagatcaaataatatcgtgtgaaacatctggtctctcccttctgtaagcaaaacaaagccgggccaacaagcccggcttcgccgactgttttgtccctttacagacgattctaacatgaattcaaaggctccgcaaggaaaagctgcacaaaaatcgcaaattacagagtttccaccggctcgtaatccagcagttcaatgcgggagctccacatatccgccgtttctgccgggggattggatagcatggtggtgagatacttcttgctgtcatcggcaaagacggtagccaccttccggcccggctccagattctgaatcacagagccaaggaagttagcgccggaggagatacccacgcccaggcccagcacacggccgaattttgccgccatggcaatggcgtccagatcgttgatgtccattacgccatccaccagagtctggtccaccacagcagggataaagtcgtcgccgatgccctcaatgtggtgagcacccttgatagctccgccggaaagcagaggcactgcatccggctccacagccacagcccggacggcgtgatccgccttcagacggcgggcggtgcccatgagggtgccgccggaaccgacgccggccacgaagtccgtcacatccggaagctggcgcaggatctcaacgccggtagtaaggtagtgggcctctgggttatcctgattttcaaactgcttgggctggaagccgccaatctcctccgccagatctctggccccctgaagggctgcgttgaagccgccggcttcccgtgagatcaggtgcagggtggcaccgtacatagccatcagctttttccgctcctcactggcccagtccggcataaagatgtggacgggatggccggtgaacgtgcccagtgcggagaaggcgatgccggtgtttccgctggtcatctccacgatgggctggccgggcttcagggtgccgttggcggtggacttggtaatgacgtgggccgccagacggtccttgatgctgccggagaggttgtatgcctccagctttgcccagacaaagccttcccggccgtccagcttgtagcggatgcggatcatgggggtgttccctaccaaatgtgtgaagttcataactgtgtcctcctcatcaatataattcatgttaaatcgttccatctccgggaaatgcggctacgcaaaacaaaaggagcgatgtgcgcttgcacatcgctcctgaaagctcttcatgcaagacacaggcacactaaaacggacgcctgtatctgcgatcagcagttcagccgccctatgtcttacaacaacaggtttttacaaattcatttctcatagcaaaatcagtgtagcacctctctgttggaaagtcaaccatttttccattctatgggaaaataggccggtttgttaccgcaaaaggtttgtatggaccagcgcccggaacagacaagctgccgccacgcccgtcaccgctccggtgatcagggaagcgcccagcaggatcggcagatagtacagcggggccatcgagcccagcgtcaggcaggctgcggcgatctggccgcagttgtgggccgccgcgccgccgatggacacgccgtagatagacagatgccgggatcgggacagcaaaatcatcaccagcatggcggaaaagccccccagcagggagaagatcagggcgttcatgttcccggcaaacaccgcccccagcagacaccggcctgtcaaaatcagcagcgcctgagcggggccaagggcgtacagggcgaataccgtcacaatattagcaaggcccagtttgatgccggggatgggaatggccagggataatgggaaaaagttctccagatagctgaacgctagtgccagcgctgtcagcacggcacagagggtcaactgcttcgttgtcagtttcacagttcccctcctaaccgattacaatgtccacgccgctgctgtctgccgcgccgccggtgagctgaatgacgatccgggccggaagacacacgatgctctgcccgctgcgggagatggtcccggtatggacgcagtcctgggtgggacagtcggaggaactgacccgaaggccgtttccgtcctccgccgccaccgtcagcgtcacgccgttataagaataggtgcgtggcgcgtccagcaggtccgccggggcaaagcggtcaatctcctgcccgtcagcggtgaccaccgccgtcagagcaccggtttcggttccgccacgccagaccgtcatggccgagagagccgccagcgcaatgaccgccaagaccacgatcacatcccagaaattgggcttcagctcaggaaaccgtttcataggtgtacccactgtccttcacttcctcaaaccggtccgccagtccggcagtgatgaccacccggccatcctccgtcaccagcaccagatcgaagtcatacccgccatttcgccagaagtccagcgcctgctcctctcccatgacgaacaacgccgtggaaaaagcgtcgcacatagtgccgtttccgggcagaacccattcctgatccggcccgttggcatccgccaccaccgtcactgacagcagaccgctgtccgcaggatagccggtggcgggatcaataatatggtggtaggtttttccgttttcctcaaagtaccgctcgtagccgccggaggtgatggcgtaggcgtcccgcagggacaggatcgccgcaaggccactctcattccggggattcttgatccccacccgccagtcggagccgtcgggcttggtccccagcacgaacacgttgccgcccagagagattttaccgttttcgatctcatggtcatagaaaacagcctctacacaatcggaggtatagcccttggcgatgccccctaagtcgatggcttgtccttcccccagcgtcacagaatcagagggcgaccccaacatctgaatcgcatcgctgttcacctttttcaacagtgtgtccagttcggactgctccggtacccggaagctgtctccggtgaagccccaggcatccatgacgggagcaatggtaatatcaaacgcgccgtttgtggcgtcccgatactccttcgcacgggcgatgagattccagtaatcgtaagtcaagtgccggatgctgccgtcccgattcagcccggataccagactgtgcgcctttgtacgggagagccgattttccaactcttcgatccttttctctgtgtattttaccgcttgctccgcatgttcaccataggccgcgacctccatcaccgtgtccatggcgaagatctgggcagtagcctccgttgtttgttttccgcagcctgtcaggcacaggcacaaggctgctatcagaattgagaaccgtttcatggcgtcctccgttagaatttgattcgattttttcagtataccgcgaatattgtaaaaaagcaatgaaggttttccttgcaaattggaaaagaggctggtatactatgaacgtgtgtcggcgggaaccggtctggaatggactgcccgcattttgggaaatataaccctggaggttttaatagatggcaaaaaatccgaataaaaaggtcgctccgaaggacgaacccatgaatggagcaatgaaattttttctggctggctgcgtagcagaactgtatttactgatcctgcgtcgtttttatatcaatgctgactctgaactgacccggatcgcctggtatgatcactacctctggactctggccgggatcggcgcgggtgtgttggcagtgggcgtgatcgccgctctggttttgcggggcagcgccaagaagcagaagtccgcttggatccttgctgcggcaggcgcttttgtgggtgcggctacggctctggtccgcttaaatatggccaccctctcttttatgacaatcgttgtgccggtcatcatgctgctggggatcctctgggcgctgtatgaccgggaatgtgcactggctctgacggtgctgggtgcctctctctttgttctgtggggcgtgcgtcggtacggctccagcatgtatgtgggcaccaccgtcaagatctgcgttgtgatctatctggtcctgctggcagctctcgccgtgctgaccaagaacggcaagctgaataagcttctgccccccaaggcagacaagctgccggtatatgcatcctgcggtctttccgcgctggctctgctggcctctctgctgggcggtggcatctcctactacgccatgtgggcactggcagcggtggtcttcgcactggctgtctactacacggtcaagcagctttaaaatgtgagcaaacagctccggtccagtacggaccggagctgttttttgctgcagcaagttccaatctgcactttgctcccccgaaagtacagggggacctgacgccattggatacgatctcaaagcggaactgcatgaaaagccccgggagaaaccgctttctcccggggcctctttcccataaaataattgcgcgtaaggaaagcagatatccgatcaatccgtaaaatcaggatagccctccttcatggtctcatcataaacggcgcggtcaccgccgatgaacttgggccgtacccgggccgccagcacaatggcctgaccgatgtgatcctgctccagccgcaccggcaccgccacctttttcaagtgcatcccgatgagggtgccgccgatgtccagtcctgcgtctgcccggatctcctccagcgccacaggatgccgaaatgccttgtaagcggcggtagcgaaggagctgcccgccttgggctggggcaccacattgacgatctccccgccggggaccgcctcgtattccacgatcaaagcccggttcagatgctcgcagcattgggcggccatgtagacgcccatggggccgaacacactgtcaaggccccggaaaatggcatccgccacctccggtgtagaccagcttcccacctgatgccctaccacctcactggtactgcatccgatgaccacgagctgtcccttccgcagatgggcagtctccgccagttggcgggccgcagcggcggactcccgctctacctgttccaaaagctgctgattctccaacgtatgtaccgtagttcctgccatatataagcctcccttttgttttacgcacaaggcgccgtgtgagaatttttctcacacggccgccttattttttcgtttacagttccagaccgctcagcgcaggcgcctttgccttttgcagcagcacagccagcgcaagaccgatggcgataccggcgatcccctgaacgatattgccgggaatactggcggccgccgccagacccttgcccaagatcatggaagcgtaggcaaaatagcccaggaccatgatggtctcccccacgatgccgctgatcagcatggcagtcttcccgcggcccaaggcccggaagatcagcgccgctgccaaggcgtcaagacccttaatgatcagggtgccgggaacatagtgtccgtagccgctgagcagatccaccagcatggagccgataccggccgccgccgcaccgtaccagggccccaacagccaaccggagagcagcacgaagcagtcgcccagattcacatagccgttgacgggggacgggatctgaatgatgctggtagccacatagacaagggcggccatcaaagcactgagaactaactttcttaccttctgattttccattgcacttcacctgttccggcgtttaccgcctgttcttgcattcattatatcccagcttgatactatctcaatattcagaattgcaaaattttataaggtcagtttaaggcaaaacaaaaaaggacatcctgacggatgtccttttgtttggcctattaaccgatcttgttgagcttcagggtcatagcgctcttgcggtgagcagccgtgttcttgtgcagaacgcccttagcgacagcctgatcgaccttcttgaccgcgaccttgtaagcgccatcggcctcggtgcgattgccttcagcggcagccgcctcgaacttcttgatggcagtcttcagatcggacttcgtagccttattgcgcgcgttgcggacctcaccgatgaggacacgcttcttggcagacttgatattcggcaaaccaaacacctcctcctggcatttcttggcgcggtttcataatttccaccgtgcagaatgatattttagcagagaagttcagaaaaagcaagcctttttttaatatttctatatttttttgtatagcgcgaatatctccgcaaaagctacccttaataccacaagattttgtgtcaggagggcaaaatgtttacaaaacggacggatctggcaatcgaggcccacgagctgtggcaggaatccgccgggaaaaccacccggctggcaggcgtaaaggccacggagaagaaaatacagggatatccggtcgcacaggtggatattctggaccgggagggggaggccgcactgggaaagcctgcgggcagttaccgcacccttgacctcaccgccttctggcagaggggggatgggtttttcgaccgggcggtgcgggccgtggggcagcaagtcaaggagctgaccccggacagcggtccggtgctggtggtgggccttggaaaccgggccatgacaccggacgccattggcccgctggcggcggacagtgtcctcatcacccgccatctcatcgacgctatgccccagcacttttccgggttccgcccggtggcggccctgcggccgggggtgttggggaccaccggcgtggaatctgcagaagcggtgcgggggctggtggaccggctccatccgtcggcggtcatcgccgtggacgcgctggcctcccgccgggtggggcgggtgtgctgtaccgtccagttcagcgacaccggcatcatccccggcagcggcgtaggcaatcaccgctccgccctgaaccgggaaacgctgggggtaccggtgctggccgtgggcgttcccacggtggtggacgccgccacgttagcggcggatctattggaggaatccgggcttcccgagccggatatggaaacgctgcggagccgccctgaaaaccttatggtcacgccaagggacatcgaccagcaggtgcgggacctgggtaaggtcatcggctacagcatcaactgggccttgcaggatctggagatcgaggagatcaacgccctgctgtcatagggtcagaggtccagctccagcaccacgggacagtggtcgctgcccgtgacctcgctccagatgtcggcgcttttgatcttgtccttcagccggtcggagacgataaaatagtcgatacgccatccagcgttgttcttccgggcattgaagcgatagctccaccaggagtacgcgccggtcttgtccgggtaaagatatcggaaggtgtccgtaaagccgttttctaacagctgggtcattttagcccgctcctcgtcagaaaagccggggttcatgcggttggacttgggatttttcaggtcgatctcctgatgggccacattgagatcgccgcagtagaccaccggcttcgtttgatccagctccatcagatagtcccgcagatcgtcctcccactccatgcggtagtccagccgggaaagctggtccttggagttgggcgtgtagcagcacaccagatagaattccgggtattccgccgtaatgacccgtccctcgtgacggtggacctccttgccgaagtcataggtaacagagaggggcgtctgccgggtaaacacggcggtgccggaatagcccgccttgtcggcgctgttccagtagcgctcatagcccggcaggtcgaattccgcctgttccgggcgcatcttcgtctcctgcaggcagatcacatctgcgtccgcaaaggcgcagaagtccagaaagcccttgccgagacaggcccgcaggccgttgacgttccaagataccagtttcatagaggctccttccccgccgtccggtcccggcggcggtttttgacggttttcccccattttacccggttttcgccgggaaatcaacttgcccttttcggcgaaaaggagtacagtaaaataaaaatgattagaggtgtatcgtggggacggaaagcggaatccggaatatgacggcgggcagtcccttccgccatattctgatgtttaccctgccgctgctggcggggaattttttgcagcagttctacaatatggtggatagctgggtggtgggcaactttgtcagcgacggagccttggccgccgtgggcgtcggctttccggtaatcttcctgttcacatccctgttctccggcatcgccaccggcggcaccgtggtcatcgcccagtccttcggcggcgggagaccggaccgagtccgaagcgccatcgacagcctgtataccgcctttatccgcagtattctgcccatcaccgccgccgcgctgctgctggtgcatcccttgatgaccgttttacgggtggaccccgccgcctgggcagagacccggacctatctgctggtggtctgtgcggggcttgtcggcagcatcggctataatctcaacgccggcattttagggggcatgggcaacagctccaccacactgctgtttctggcggtgtccactattttgaacatctttctggatctggcactggtgctggcggtaccgctgggggtgctgggtgtagcgcttggcaccgtcatcgcccaattatgcagctggctgttcggtatctggtatatcaaccgcaggtatccgcagctggccatccatcccttcaacgggatcttcgaccgcagactgttctgtgagatcatccgcattggcctgcccagcggtatccagatgtctctggtggccctgggcgccatgggcgtactctccaaggtcaacagctacggaaaggccttcactgccggcttcaacgtgggcaataaactggataccctgtcctttctgccggtccaaagcctggccgccgctgtgatctcctttgtggggcagaatatgggggcaagccgggaggaccgggtccgtcagggcgtccggatcaccgtgaccatggccgttgtgtggacagttctcagttccgcccttgtggtgtggctgtccgtccctctgtcccggatcttctccccggacccggcggtcatcgccgccagcgcccggtatctgcaatgtgtgatgccgccctacgtgctgtttgccattctgttcgtactgaactccgccatgcggggcgcgggcgacagcctgtatcccatggtgaacgtggtggcctctgtgatcctgctgcgggtccccttcctgtacctgctggcaaaccgcttcggcccggacgctatgtattggagctacggcatcggctgggccgtggcttgcgctctgtcggtctatcactatgctgccggaaaatggcggggaaagtaccgcagcgaataaaaacagcggaaatcggaaatattttgaccggatgattgactaatcgtttaaaatatggtataagtgagtgcaatcgagaatgcaatgaaggggagagtacgtcctcgcggcatggttcagagagtcccggcagctgaaaagggacccatgcggtagacagaacatggccccggagccgcgcggctcagcgctttggcgcaggctgcgatgggtgcgcccattacagcgtcagggtatcgcgtgccggtttcggcaggcttgtacccgcagaggctcacgccgcgaggtgtgggtgaatcaaggtggtaacacggctttcttcgccgtccttgagcgtatgctcagggacggcgtttttatttgcgatcactcaaaatttatcataaagaagaaaagaggaaccggatatggaaaaggacactttttatatcacaacccccatctactacccctcagataagctgcacatcggccacacctactgcaccgtggccaccgacaccctggcccggtatcaccggctgaagggcgaggacgtcatgttcctcaccggtaccgacgagcacggccagaagatcgagcagaaggctgacgaggccggcgtcactccccaggagttcgtggaccgcatcgtggacggtccccgtggcgtccgggatctgtggaagctgatgaacatctccaatgaccgcttcatccgcaccacggacgattaccatgtgaaggccatccagcggatcttcaagcggatgtatgacaagggcgacatctataagggcacctacaagggcaaatactgcactccctgtgagtccttctggacggagagccagctgaaggacggctgctgccccgactgcggccgccccgttgtggacgccgaggaggaagcctacttcttccgtctgagcaaatatgccgaccgtattcgggacctgctggaaaacactgacttcctccagccccgctcccgcgtcaacgagatggtgaagaacttcattgatcccggtctggaggatctgtgcgtttcccgtaccagcttctcctggggcatccccgtggactttgaccccaagcacgtggtctatgtgtgggtggacgctctgagcaactatatcaccgcgctgggctatgagaatgaccgctataatgactacaagaaatactggcccggcatcaacatcgtcggcaaggaaattgtgcgattccactctattatctggcccgccatgctgatgagtctgggggagcctctgcccaagcacgttttcggtcacggttggctgctgctggacggtggtaagatgtccaaatccaagggcaacgtggtggacccctacctgctggcggagcagttcggcgtggatgccctccgcttcttcctgatgcggaccttccccttcggctctgacggcaacttctccaatgagttgctgatccagaccatcaataccgatctggccaatgatctgggcaaccttctcagccgcactaccgccatggtgaacaagtacttcggcggctccctgcctgcaggctgcggtgccacggaagatgagaagcagctggctgccatggtccgcatgggcagcagcgtggagctggccgccagcggcgacactgtggaccccgtgctgtacgatgcccagctggtggcacaggccgccggtctgaaaaaggcctacgcccatgagatggacacattcgcccctcacaacgccctgtccgagaccttcaagctgatccagcgggctaacaagtatatcgacgagaacgccccctgggcgctggccaaggacatggaagccaacggcgcccagctggctcatgtgctctataacctgctggaagccacccgtatctgcggtatcctgctgacccccttcatgcccgagagcatggaaaagctcttcgcccagatcggcgtgggtgcggaggcccggacctgggagtctgcggacctctggggcgaactgcctgagaccgctgccgtggtcaagggtgaaaacctgttcccccgtctggatctggacaaggctcttgcggacctggaagccgccgaagccgccgctaagaaggcagagcagcctgacgtggaggtggagcctcagctcaccgaaacggtggacttcgacaccttctgcaagtccgatttccgggtggtgaaggtcaaggcctgcgaagccgtgaaaaagtccgataagctgctgcgcttcacgctggatgacggcaccggcaccgaccggcagatcctctccggtatccacaagttctatgagccagaggaactggtgggcaagaccctggccgccatcgtgaatctgccgccccggaagatgatgggctttgagagcaacggtatgctgctttccgccgtccacacggaaaagggcgaggagaagctgaacctcatcatgctggatgacaagatcccggcgggttccaagctgtgctgattacttaggagggggacttgtccccctcctaaccacctcccaccagtctgcggacgggcgaacgtgcccaaggcacttagatcaaagtatttttgtcaggcacatgtcctgacaaaaatgatttcaatttttccatgcgggacacaaagtatcttcatcagagtatcattcgtcaggcaaaaaagtcccttgccccgcgcgggcaagggaagtcccccagggatgcctcgacaaacataatctgaattttaaaggagatctctttgatgaaaaacaaaataaagcgggcggttatttcggtagttgtatttgcagtgatttatatattatctggttttatcattggttggcatagctatgatatgtatctcaaggcaattgaatttttagctgctatcataggtgcagggtgctattggatcggcagtaacgaacaataaaataccagttttttcatctgcgctctatcagcgcatatgctgtaagtttcaaaatttacggagatcgaggtcatcaatgcggttacaaagcgcgatttttgatatggacgggaccctgctggactccatgcccacctggcgggagctggggcccacgttcttaaaggaggcgggcatctccgccacaccggagcaggaccggatgctccacaccttagcggactgcgacgtgatcccctatctgcgggaggtctgcggtctgccgtggtcccagcaggagatcatcgaccagatcattcagcggatggagacattctattccagccaggtccggcccaagccgggtctggaaaaatttctctccattttgaaaatggagggcgtatggatgtatgtggccaccgccacccatcggcggctgacggaaaaggccctgaaaacggcaggcatcgaccactatttccgggggatcgtcacctccgccgacgcgggaaatcacaaatctgaaagcgccgacatctacgagatggccatgcggcggctccagtccaacaagcgggacactgtggtatttgaggacgccctccacgccatccgcaccgccaaggcagcaggcttccgggtggccggggtctatgaggccacggcggagcaggatcaaccggagattcagcgtctgtgcgactattacatccgttcctacgaggaactggtccagtctgaaaccttctgagcatcgcaaaaggagccgtatggctcctttttttcaaaatctttttccaacgctgtaacgaaccgcgccccaaacggatataacagatgaaaacgccgctgaaagggggagaaactccgtgaaggatctggataccgtctaccgccagcacgcgcagacggtctacaaatttctgctctcccaatgccgggacccccagacggcggaggaactgacccaagagactttttatcaggcagtgcggtccatcgaccggtttgacggcagctgcaaggtgtccgtctggctgtgccagatcgccaagcacctgtggtatcagcatttgcggaaggccaaccgggaaacggagcttcctgaggaagcagagctgccgctggtgccctccgccgaggaggaggccgtcagccgctccgggcatctggatctactgcggcagatccacgagctgccggagccggggcgggaggtggtctacctccgggccttcggtggactgtccttccgggagattggagacgttttaggcaaaacggagacctgggccagagtgaccttttaccggggcaaggaacgattgaagcaaggaggttgcgacgatgaaaaatgatctgacctgcggtgtggtgcgggatttgctcccctcctatgtggagggcctcacctccccagagagcaatacagcggtggagcgtcatctgtccgggtgcccggactgcgcccagcttcggacggcgctggcaggcgcgccggagcaggcggccccggaggacgcaaaagaggtagactatctgaaaaaagtaaagcgccggggctggcggcgtgtggcggcggcagttgccgtcacggtgctgctgttcacggcgggcgtcgcggcaaagctgtttgtcatcggggagcctgccaactgggactaccaggagaatctcaactggacggctcacacaaatgtgccgggacagttggatctgcatttctattccgaatggtctgccattgcctacagtcactggatggtggaaaacaaaaacggcatcgttcatgtcagcgcaaggcagaccctgccgtcattccttcatgacacttccgaccattgggagcatatttcgctggatggtgtacgggaagtttgggtggccgatcagctgatctggcagggtggtgttgagatctcgccgcagatcgacagaatctatcaggcccaaaccctctatgtggggaacgcccccgccgtgggacaggtactcagtgccgggcgattcgactggatcggtgattacactatagaattgcaaacctctacccagccctaccgcctgacgctgaatttctccgctccccacacacctggtggaataaggctatctgaaacgggcctctatcaggacatggcggcggtgctggcaatcatcggcaatctggacgagatagaatgtgcgttccgggacgaaaacggccagccctggtcccgtgtgctgacggtggaggaattgaaccaagacctgcctcagatcgtcgccgactacaatgagcgattttcccacggcaagccctgtcccctctatgacgatgtgaaggattacgccggctcctgcgccgatcttgagcagttgtatgatgccatgtggtgggctggtgaaggcgggatctacgcggaaaccaaataaaagcatcagcgcccacggctttcgccgtgggcactgttcatttatcccatccgcagggtcgctcgaacgtccgcgtcgaaataggccgtgggattctgaggaacaccgtcctgccggacctcaaaatgaaggtgcggaccggtggaccttcctgcgctgcccacagcggcgatcggcgtccccgcctttacaggatcgccctcgttcacatccaccttgctgcacgcggcgtacagtgtggcgagtccatcgccgtggtcgatcatcaggtaattcccgcgttccgtgtcaaagccggtctccgttaccgtaccgtctgccgccgccagtaccggggttccccgttcggccggaatgtcgatcccattgtggacggttttcccctgtccgccgggattccatctggctccaaaggggttgctgaggctgatggtattgctgccttccaccggccattgaagccagcggctttcagcttcgctgacggcataaatgccgtaaacacacgcctcctcgtccccggccagctggggcaggaccgtccatgttccgttttcataccggtccagccgcagacggccggtggagagggtgtaggtccgactttctgttttgccgtccagaaaagtggcctccaccgtcagatgcgctccgtcaaaggtgtcgatgctgtcccacgtatcctgcttcatgtcaccgctcgccgttggcagctcctccgggggcacccagaagccatagctggccgaaggatcatagtccacggtcacatcgctgcccaaagccgtcatgacatcggcattcatgggggcgccctcgtctgcgccatagacgctgcacaccagttccccgttctcctccgcctgccagagcacctgcacctcatcattagacaaagcctttcgggtctcgctgcggtacagtccaccccggtccacagataaagtcaccttttgaagattttctccggtcacctgaaacaggcagccggtaaaatacccctgcagcgggtcccagatcccggtgccgctgcgcagagccaacccgccgttggcattggggacgatggtctccccgatatcggcggcataggccgtcaggccaaagctgtaggtaagctggggcagtccgggttcctctgccgaacggggcgccagccgcactgtccccagcaccagagccagggcgcaggcagcgcacaccgccgcccgcagcgccgtccgtttccaccgcgttccgacaccggccgcctcctgccggatcatttgcagcacccggtcattcagcccgctggggaccgaaatttgttccatcagatcgtgatacgcacgtttcatcgtcaatacctcccagaagttctttcagctgcttgcgggcccggtggagccgggttcggaccgtggcggcgggaatgtgcatcagttggctgatctcctccgccgaatacccctcagcgtaataaagatgcaccgccgtccgggccttttccggcaggcggctcaccgcttcccacagttcccggctctcgtcctccggctgcgccagatccggtatctccgcgaaagaaagtaccggccgccgcagatggaaccggtgcagatccgcgcagcggttcagcgttgtgcggataagccatgccttggcgcggtctccgtcccagtcctccgccgcctgcttccacagccggaggaacacctcctgatacacgtcctccgcgtcggcgatattctgcatccgggtcagggccagcctgtaaaccgtggagccataagcatccatggcattgctgagctgtgcttccgtcatgcaatgcctcctattacaataaatttggacaggaaagccgggcagccagtccggctttctttccatctcatgcctaagctacaataaggggagcaactggctgaccaatgcctccttgggcttctatgtccgtaacaaagactgtcagccatccccttattgcagcgttcgatttgagcaggttgagccttggagttcgcgtcacccaatagattgaatcggcaatgagaaaaagatggattccggttgcaaattcgtgttggaggaatgcaaatgaactctgttggcatcgacatttccaaaggcaggagcacaattgccgtcatgcgttcctttggagaagtcgtcatctcaccctttgaagtccgtcacaccggcagtgaactgagctagctggcaaagcagctcaaaagcctggacggtgagactcgtgtggtcatggaggccacaggaaattatcatgcgtcggtggcaaagctgctccacgacgcaggactatatgtttccgttgtcaatgcaaagctggtgcacggctacgggaacaacgaattacggcgtgtcaaaaccgataggaaggatgctgtcaaactggctaactatggccttgaccgctggcttactttgccgaggtatatcccagaggaagatacccggctgctgctgaagaactgctaccgccagtaccggcagtattccaaggtgcagacggttctgaagaacaatttgatctcgctgctggatacggtgtttccaaacgccaaccgtctgttttcaagcccgatccgtggggatgggagtgaaaagtgggtggattttgtggctgaattctggcattgccgctgcgccagcgagaaatccgaaagagctttcacaagcaaatacctgcgttggtgcaggaagcacggctacaacttcagggaagcaaaggcgcacacaatttacgccgaagccagcggacatattggcgtcatgccaaaatccgaaacaacgaaactgctcgtgaaacaggctgtatcccaacttagggcgacttctaccgcgcttgcggctctcaagcaggaaatgcaatcattggcttccgtgctgccggaatatcccgttgtcatggatctgttcggcgtaggcccgacgctcggcccgcagctcatagctgaaatcggggatgtgcgccgcttttattccaagaaagcgctcgtagcctacgctgggctggatgctccgccaaatgattccggcgatgtgaccggcaggcacaaatccatgagcaaaattggtgcatcatctttacggcggacactctttcttgttatgagcgtctatttgcagaccgcaccgctggatgaaccggtctgccagttcatggacaggaaacgcgccgagggcaagccctaccgcgtctacatgatggctttcgccaacaagtttctgcggatctactacgccactgtaaaagcctatttggagtcattggaacacaccgcctgatcttcgccataaagccattggctggccgccgtttcattttgagatgcaaagcggcttggtttggtgcggcatttttacaagctgcattgccttgaaatttctacttgacttttcttagcaggtcttttttgtgtgattgaaaagcgctttcactgataaaacgttatgagagatcaaatcgtttcccgctccggcggaatttttttgcagatgtcgaatctaatctgaattttacaccatttttcgtgtttttgccaaaaagcaggaatctgcttgcaaattacggtccagccctttacaatggggcatcataaatcagaaagggtgagcgtatggaatttcacgcgaaggagcagctgcccggtctgctggactggatgcggcagcagatgaaggcctgcggcggaaagaccgccgtgatcggcatttccggtggaaaggacagctccgtggtggcggcgctggcggtagcggcctacggaaaggaaaacgtggtgggcgtgctgatgcctgacggcatccagccggacattgactattccaacggtctggtggaatttctcggaattcgccactatgtattcaacattcagggcggcaccggcggcattttggatgagatggcgcgtttaggcatgaagcccagccgccagaccacggtgaacctgccctcccggatgcggatggtgacgctgtacgccatcgcccagagcgaggacgccggcatcgtgctgaacacctccaacctctcggaggactgggtgggctactgcacggtctacggcgacgccaccggagccttctcccccttgggaatgtacaccacggaggaggtcatcgcccttggtgcggagctgggcctgccggaaaaattcctgatcaagcccccctccgatggtctcaccggtctgacggacgaggacaatctgggctttacctaccgcgctgtcaacgagtatgtccgcaagggcgtcgtggacccggcagtaaaggaaaagattgaccggctccaccggaccagccgcttcaaattccagctgatgccggtgtatcacaacggcctgcccatggccctgacggatgagacggactattacaagtgaggaaacacaaaaacccctcgccgctcggcgaggggtttttgctgtgtgttttaggagggagaaaacgcatcgggttgggaggaccctttgcaagtattaagatacccgaacatttttgcgaaattatgtgtttgctgtgaacaatttgtaaacgttccgagcctttttcaacttttcgactgcattttccacaaatgcccgcaaaaaccggtaaaaatgccgtccttaccggaatttgcggctctcggcgaccgccagttcgtcgcagcggttattaaattcgttctccgcatggcccttgacccagtggtagcgaagggtatggatgctctccagccgcagcagctcgtcccaaaggtccgggttcagggcgggctttttgtcgcttttcacccagcccttggccttccaacctttagcccagcccttggaaaggccgtcaatcacatatttagagtcgctccaaagctccacgatgcaaggctccttcaaaagagacagcgcccggatcacggcggtcagttccatgcggttgttggtggtatcggcttccccaccggaaagctcccgcttgtgggcaccgtacatcaaaatggctccccagccgccgggtccgggattgccggaacaggcaccatcggtataaatagtgacttgtttcatcttaaacatcctttgagatttttcatgttatcataccatggattgggggatttcacaagaaggttgttttgatcgcgtcataatagtgcaaggggcgtcccggcttccgggacaggaagcacggctttgccgtaagaagcgccgctatgcggcacagaatgcacccgcttctctctgctcccacagggggtagttcccactacagggcaagtgggaggtatctttggcgcaaggaagcacggctttgccgtggggaatgcaccccccattttctttttgaaacatcaaaaagaaaatgcgccgt

SEQ ID NO: 12165 - DNA, 3755 bp, Unknown
  gut microbiota DNA sequence
ccttctacaaaaaatatccctattccgaaaaatagggatgaaaaaagccgcttactcaaataaatgaataaacggctatgtaagaaatattcgattgtaagtaaagttttatatcactgcaaaataacgaagtgcatctttgattgcttctaccttttctggtgtcggatgtttcctcggctgtttcaattcttctaccgcattaggagcatcatacatcggcaatcccaaatttcgctttacctctgcgatatatgcggtatgtaccttgaagccgtatttcgcttctatgtactccttaatcattttgtaggtcactttttctttgggcttatacgcttcggctcttttagcaatactatctaccggaatcttgccctcgccctctccaaactccacatcaatgtggatataactgtcggcttttttgtgggataaaagaactaccgtctccacatgggcggtgccggggaacatatccacggcggcggctcgcttggcttcgtagccgaactcccggaagatcttcacgtcccggcccagcgttgccgggtcgcaggagacatagaccaccttcttcggccccatggctgccacggaggcgatgacctccggagccagtcccttccggggcggatccaccgtcactacatccgggcgcaggccgtcgctctccagcttggctgcaatgtccgccgcatcgccgcagaaaaactccgcgttttcgatgtgattgcggagggcgttctccttggcgtcccggatggcggggggcacgatctccgcgccgatgacccgtttggctgccttcgcgagacacagggtaatggtaccgataccgcagtagaggtctaataccgtttcattcccggtaaggcccgcgaattccagcgccttgccgtacagcacctccgcctgatcccggtttacctgatagaaggacggcatggacagcttgaattccagtccgcagagggtgtccatcagataattccggccgaacagcgtccgatatttgtctcctaagaccacattgccccggcgggtgttgctgttcagcaggacgcctacggtatggggcacagcggcggtgacataggccgccagctccggctcccgcggcaccttattgccgttgaccaccacgcagcaaaggctttcgcctttccggttcacccggacgcagacatggcgcacgaggccctttccggtggtctcatcgtaggcggagatcttgtagcggcgcatccactcccccaccgcttgggcggtgcggtcggcggcctccgtctggatcagacagcggcggatgggcacaaccttgtgggtccgggcctgaaaaaagccgatggagccgtcggcccccacagggtactggctcttgttgcggtaatgctccgggtttttcgtccccaggatctcctccacggtcagttccagcccgccgatgcgggtcaaagcgtcctgcacccgctggcgcttggcccacagctcctccggataggtgaggtgccggtaggcgcagccgccgcacttcccggcataggggcactccggctccatgcgttcgggagatggatcatggatctttacgatctcgccggcgcaggaggttttcatcaccttggtgatccggaggtcaacctcctccccccggacggcgtggggcacgaacaccaccgccccgtttacccgggcgatccccagcccctcgctggaatagccgtcaataacggctgtataaatactgcctttttccaatgcttccatggcttttatcccttttattctcaattgaattcagatggctctcgattccgcagcggcagggatggatgtgtacgggaaagacctgtttgggtttcctccaccacttgaaccaatccgtttttggtggcttacaagtctcgaaaacgcacggcagcggggagcatcgcccccgctgccgtgcggcgtactctgcgggtaggtatattctatcaggattcctcccacttgtccagaagctgccggagctgatccgcccagcgcccaagggtcttgttgtcccggcccttggagcggcggatgacgtccaccatccgctgacccagcgccaccagacgctcgtaggcagagctgacccgctgaccgcccacggccttggccttccgttccggcaggtagccgggagccacgatcttatcctcgagcaggtcgtagacctcggtgtactggggcgcatgggcggtgaagcccagcttttccacgctctcggcgaaatagggagccacctcccggtcgccgtggacgatgaacacgtgctggggcttgggggccttgatgtccgcgatccacgccagcaggtgatcccggtcggcatgggaggaaaggccctggaagttcacgatcttggcgtgaacggcgatctcttcgccgaagagcttcacacttctgacgccctccagcagggagcggcccaaggtgccctccccctgatagcccacgaacacgatggtgcactccggcttccagaggttgtgcttcaggtggtgacggatacggcccgcgtcgcacataccggaggcggagatgatgaccttggggataccgtcctcgttcagccccttggattcctccaccgtctccgtcatgcggaggttggagaagttgaacatgtgggtgccgtcctgcaccagcgccagcgcgtcggcatccagatagccgtccagatcgccggtgaaaatggtggtggcacggcgggccagaggcgagtcgatgtaaaccgggaaatccgggttggacttcacaaggcccttgtccttgatctcccggatgaagtacagaagttcctgtgtgcggcccacggcgaaggccgggatcaccacgttgccgccccgggccatggtatcatcgatgatcttcgccagattctcggtgtagctccacacctcggtgtggttgcggttgccgtaggtggactccatcaccacatagtccgccccggcaaagtggctgggattccggatgatgggctgatccacgttgcccagatcgcctgaaaaaatcagctttttggtgacgccgttttccgtggcggtgacggtaatgcaggcgctgcccagcagatgtcccgcgtcggcaaagcggacgctgatgccctcgcacagttccacatcctcgccgtattcgcaggtggtgacgtactgcttcacattttccgcgtcctcaatggtatacagcggctccaccttgggggcgccggaacgggctgccttgcggtttttccactcggcgtcggactcttgaatgtgggcggagtccagcagcatgatatccatgaggttagccgtcacgcgggtggtgaggatacggccctggaagccctgctttaccagcatggggacccggccggtatggtcgatatgggcatgggtgatgagcacgaagtcgatactgccgggatggaagggcagggcttcattgttcacctcgtcacgcccttgctgcaaaccgcagtcgatcaggatgtttttgccgttgacctccagacagtgacagctgccggtcacgcactggtcagcgccgtaaaagctcagcttcataatgggcctccttcttttttcgtccgggttttccgcgttgttctcctgttaagatcatcttaacacaaggccccggaaagcacaagaaaggtttcgtgaacttctccggtcattttgccgggtttgccggaatatgccggaactttttttattctctcacgtctgttataa

SEQ ID NO: 12166 - DNA, 1867 bp, Unknown
  gut microbiota DNA sequence
tttccctcatctatgatcgctttccactggcgatactccggggtttcatcccactccagcgccctgtctatatagaactctgcaagctcaaaagacgcaggcggtgtcaatgcgataaaaagataatacgccatcaaaaacgcgcagtaggcagcggttttcatgcgtccttccccttgaaacctatgcagcgacgcctccaaaacgaagaacaggttgagccggtctacttcacttgcatccgcgtaaaagcaattcaggtcatccggtgtgagccccaataagacgttctcctcaaaatacggatgtccgaaatcgatcgttatcttcacagaattcgcctccacggggccgttccgccagctttcccgctatttcaactggtccagcgtgagagaaaagctgggcatgaaggtctccaggaaatacgtcacctccggcagctcgtattcctccagcgccgcgcgggtctgggcagcggcgtcccggaactcgctgttcccggccttcaattcctccacgcatttgatgtaggcggacagcttgtccgccgccttcaccagtcgctccgtctccgggtccatcaccgtgaggatgggggcgtacaccggctgaaattcctccggcagcatatgcagcagcttttcctccgccaccgcttccaccgccttgtaggctttgcggatggcggggttgtcgtacttgatgggcgtaggcatatcgccggtcaggatctcgctggcgtcatgatacagcgccgccaccgccaccgctccggcgtccgcatggccgccgaacttctcattgcggatcaccgccagagcgtgggccagcaccgccacctgatggctgtgctcctgcacgttttccggggctgtgttccgcatcagcgcccagcgttggatgaagcgcatccgggagagataggcgaaaaagtgactgccgatcctcatgtttctgcctcctgttccacgatttctcccaacagggcctcgccgtccacatcggtgatccgcacggtccgcagggcattatgcaattccgcaccgtccaccaaaacttccatatagttcggggcgtggccgaagaatttcccgtttttcggctgctcaaacagcaccggatacgtctggcccacgcagccctccaaatagctcctgtgcatttcctccgccaccgccgccgcccggcgggcccgctcctccttgacagccttgggtacctgttccatcttggccgccggggtgccgggacggatggagtaggggaaaatgtgcatctgggcaaagcggcatttccggatgaagtctaaggtctgagcgaactcctcctccgtttcctccgggaagccagtgatgaggtccgtggtaacggcggggcggtcaaaccagcggttcagcagctccacggattccagataccgggcggtgtcgtacttccggttcatccgcttcaaggtggcatcgcacccgctctgcatagacaggtggaactgggggcacaggttcggcagagccgctgcccggcggcagaagtcctccgtcacagtgcggggctccagactgcccagccgcaggcgcacctccggcgccgcggcggacagggcctccagcaggtcgataaggctctggccgttcttcagatcgtggccccaggaggagatctcgatgcctgtcagcacgatctcccggtagccctccgctgccagctgccgcgtctgctccaccgcctgttccagcgaaagggagcgcaccggtccccgggcgtaggggatgatacagtaggtgcagaagttcacgcagccgtcctcgattttcagcatggcgcgggtgcggccccccatgccgccggcaggcagcacctcaaa

SEQ ID NO: 12167 - DNA, 4948 bp, Unknown
  gut microbiota DNA sequence
catgtctgaaaccccgcgatatggaaaggttaagtgccctcgcatctgccgcctgcaaggcagagcccttaatcacggctgcggctggtggacgatgcccacaaacaggggcaggccgtcagttccggtgatggcgaacacgaagggacggttcagaacaaagtccacttcctcctccggcggggcggcctcgccgcacatcatcataacggtataggctgcggcggtgacgccttcctcgtcaacggtcacccgggcggcgtgtttggcctgggagagataagccgccgtatcgtcagtcatgggggaaaagtccgagaccgccggatcaaagacgtccgtgatgcccagagccttcaggctgtcggccagatccagatccgacgccgtgtcgaacttcggcagagcgaggttgacgataaggtatttgctctccgcgctctcgccgccactgagtaggaagtccatcgtcggctcgtcagccagcagcgcctccggtgcaacgccctcgtccggcagcaggagccacatggcaccgctgccctccaaccgcttggaaaccgcggagaaatggtcgctccagtaataggtgttcgtcccgcactggcgcatgaagtcacaggtcatgtctccgctgtcggcgtggaaggtatccggcgcggtgttggccttggagaactcgccgtcccacttggcccggaaatagatggtggacgccagcgcgaggatcgtttcctgatccatcgtcaggccggaggcttgctccttcagaagcccgccggtctgctggtcgatccagtcctgaagcgccttgtcaaaggcggcggagcccatttcaccccggaaggacgaggcgtaataataccttgccagtgcgtccatggtttcctgctggaagctgatcttgtcattgagccacagggagtcggccagaatactggtcaccgcgccatcgtcgcagtagttagcgttccagacagcggcggcctcggcccggagggcgtccacatcgccgctgcccagcagggcgaggatctgctcccggctctcgccgcctgtcacctccgccagcatggcgagggccatgtagagattgatgggggagcagaccttgttctctccgctgccgccggtgagaaactgtgggatgacggcgcggaggtagccgtccagcacgtccgtatagccctccggctgctccatctgctttctgcggtctgcctgccatgcgtcataaacctgattgaaaccgtcactgtcaaagtctccgttgggtctgctgaacttggtttcgtccgggtactgcgccatttggggatactgtggggcggccagctggtatttgctgacggttttggcctcgggctgcgcgcaggcggtcagggaaatcagactgaccgcggcaaggagaagagcgaagattcgtttcataagaagtacctccatctgaaaaaatgaaaacgaccgtctatattgatatagacggtcatttttcaaaaaagtttcacagaatatcaattttcgtaccgggtccagtccgggttcgcattgaggtcggtccaggtctcatagctgccggccttgcgcctgtaatcgtgggagttggtagcctcctgaatggccagatagaaccaatcgccggggccgcaatccggccagacgttcatgccgggcagcagatcgctggggtcctccgggacccgattcagcatccggttgatcatggtcacggcctgggcgcgggtgatataggcgtcagggcggaaggtgccgtcctggaagccgctgatccagcccaactctgccgcccgctcgatatacgccttggcccaatggccctcgatgtcggagaaggtgcggctgccgttgctcttgccggtgtcgaaccgagcgcagatagcggcaaactgggcccgggtgatgggatctccggggccgaaggctgcggcatcatagccccggacaatgtccagtcccgtcatggtggagatggcggtgttggcccagtgaccgtccggtacgtcggtgtaggtgcagccggtcagcaggttggcatcacggacggagtccttcagcaggcggaagaagatggtggccacgcctgcccgcgtcatgctgtcattgggacggactgtaccgtctggcccaccgacgatataggcatagtggtcatcggtgaacagcgcaggcactgcggcctcggtattgtagacagtgatcctgctgtttttgcctgtattggtcgggtgcttgcccccgcccaatcggtagccctcaggcggcacggtctcgacccagtagtaatcgccgctttgggagacctctgcctgtgtccagccgtaccggttggtctcgtagacgccgagccttgtatcggatcgggtcccgacacgccacagctcaaatttcgcgccgctcagcggcgtaccgtccccggcatcaagcttggtgagccggagcgtgtagccggtgtcgtcatcgtcgccgctgctgttgcgtgtccactgcgcgtacagatgaatatggtctgtcaccgtgatcgaagagccggggacatggtgcgtgccgctcccatcgcgctgagtgttccagccgacgaaagagtgcccgtcgcggacgtagccgttttcggataccacggccagatctccgaagatgtagctgcggctgtcaaccgtttcgccggagtccgcgccgtttctgtggtaagtcacggtataggtctgggcggtcatcctggtccggcagatgctggaggggatcacgacagaggtgacggtactgccgctggatactttgccgctgatatgggcggcggtgttcagagattcaccggcggcgaaagctgctgcatccagaagaccggcgcatttcaacaccatcttgacggaggattttcccgcaatcgcggctttccaaccgggcaagggggtgcaggtgacggtgaccgtatggccggagacactggccgtgccgtcgaggatgccgtcaccgtcgaaggtgtaaaggcagtttccgctgtcaccggttttggctgcgagacggctgtccaattccacaacaaaggacatggccgggatatcggccgatgccatgttcagcataccgcgcaggctgtccgacatggtgtaggtcacggtataggggacctcgtagggcgcggcatcagaggtcttcgcaatttctgtagggcctgagatgccgacgctgccgaagtcggtggtaggctgtgccagcgcaaccgcgcagccgttcgtatagccgttgggaagtgtcagacggatgccgtcgtcagtaatttttgtgctgtataccctgacctccgcgccggacaccggtttaccgtccgcaccggtctcctgtaccagcgcgtagaccggaagtgctttgttgaaggtcagcccgcccactgtcagctcggccgcgccgtcccgctgcgcccagaaggtggcgaggggagcgttccagccgttcgcatcagccttgccggacaaggcggtcacactctctttgctggcgttgcccaacttgatgtccaaactgttctccgcgggggtgacggttgtagagttaatctggaaatagacattctgattgtcaagttctgtgttctgtgagatatacaaataatgattgctgctgccgttgccctggttgcttattgtaatatcattttcggttccggtggaagaatctttaacatcggtggcgttcattgtgttatcacggattgtgccgccctgaagttcaactttggaattattcttatattgataaattccgccgccgacagtctgactgacattgccggatatttcgccgccgtacatcgtgaacgatgtattactgctgatcataataccgccgccatttttcactgcggtattccccttaacttcagcaccttcgtacatatttatgaccacttcaccatgacccgcggtcgcaacgccgccgcctcggctgcttgcgtcattattgttgattttaccatatatatcaacaattgcatctcgttgaatatagagggttccatagaagacgctgttatgatgaatattgctgtcagcgccaatcaacagtgtgccgaacttgaactgtattggagttttattgtttttaatgccagatatttcaccgtgaattgtaattgtattgcggtctgtaccataatcatctttgttaacaagactccaagtgggatcttcgttcgttttgatgccagctgcatcggaattgccgaggaaggagccggtggccatttcaaaaactgctttatcaacgaagaccaatacgccctctgtacaatcggaaattttcccgtttaaggttgcctttgcactgccgcgcaggtgaatggccgtgccgtccttgccctgccacatagcgggattgccgatgatgccgctgatcgtgccgccgacgcttacgctgccaccgtccgcgtagaccgcgcggccgtttacatttttaatttccgcaccattttccatctcgaaatcggaaccctgcagccagaccgcaccggcggggccgacggagcctgcatcgcctttgcttcgtgtgatcgacgaagcatcctcgatcacgctgccgggctccatcaccagcttggcttcgccagtggcgcgtaccgccgacatgccgccgaagttccgcagcaccgcgccatcacccagcgtgatcgtggtggtgacggttgcgttggaggcgatgatggcgtcctgcacataaacgagattatcgttgctggcagcgccgacagaaccatcactgacggcctgagcaaacaccgtgccctctttcttgccggcatcgtcaaaaatgatgttcgtcagggtcagaccggcgcccacgccgccggtggtctgaacctcgaccatggcggggttgtaccagctgcgggcattgtcctgctgctgagcaaagttatcgccgcgtgtaatgg

SEQ ID NO: 12168 - DNA, 24196 bp, Unknown
  gut microbiota DNA sequence
ttttcagaacttttatgaagttctgaaaacttgctcagcggggagaaaagactttttcgacacgctgatgcaagcagcctgcccattcgggcaggctgcttgcgtctgaacagaaccgggggaaaagttcatattgtattcagcgggggtttgtgctaaactactataattacaatagactaaaatagtatcgttatgtccatcgcaaactgccataaaaatagaaaggttctgattttccatgaaaatcgttgttttagccggcggcatctccaccgagcgaaccgtctctctggtgtccggcaccggcgtgtgccaggcgctgcgccgcaagggccatcaggccattctggtggatatgtttatgggactggaaaatccgcccgcagatctgaacacgctgtttgacgcgccggatggcctgtgcccggatgtgaagatcgaggtgcaggccccggatctggatgtggtccgccgcagccgtccggatcaaagccccagccgtatcggccctcatgtgctggatatctgccgactggcggacatcgtgttcctgggccttcacgggcaggacggcgaggacggccgcatccaggcaacgctggacctgctgggtgtcccctataccggcgcgggctacttaggctccgccatcgccatggataagatcgccgccaaggagatgatggatgccaacggcatccccaatcccaagtggcagaagctgacctatacggaggaagagatcccccaactggcggagacgctgcccatgccctgtgtggtgaaggctcccactggcgggtcttctctgggcgtctatctgcccaaggatcgggcagagctggcggatgccctgcggcaggtccgcagcttctgccatgaggtgctggtggagcagcggatctacggccgggagctgacggacgccgtgttgggtgagcggtatctgcccccggtggagaccttccccagcgtggagaactttgactatgaggccaagtatcaggccggcggcgccaaggagatctgcccggcggagctgacggaggaacaggcgaaggccgtgggtgagatggctttgcgggtccataaggctctggggctggccgtctattcccggacggatatgatcatggacgaaaacgggcaactctggtgtctggaggccaactctctgccgggaatgacccccaccagcttcgtgcccaaggaggccgccgccgtgggcatcagctatgatgacctgtgcgaggagatcgtgcggcagtccttaaaaatcaagaggagataacttatgcagccaatgacggtaacagagatcgcatctgcggtcaagggggtctggtggaatcccagtgaacaggtcccggtggtgagcgccgtttccacggacagccggaggatcgttcccggcagcctgtttctgccctgggtgggggagaagttcgacggacacctgttcatcgacgcggcgctggacgccggcgccgctggctgcctgtgcgccaagctgccccagaatatccgggaggataagttttacatcaaggtagcggatacccgactggctctgcgggatctggcctccgcctaccgggaccggtttgagatcccctttgtgcagatcaccggcagcgtgggcaagacgaccaccaaggagatgatcgctgcggtgctgggggccaagctgaacgtcctcaagacgccggaaaatttcaacaatgacatcggcacgcccctgacgctgctgggccttgctccggagcatgaggcggcggtgatcgagaccggtatgaaccacttcggtgagatcgaatatctgggagccatggtgcggccggacattgccgtgatctccaacatcggcgacgcccatatcgaatatctgggcagccgggagggcattttaaaggccaaatgcgagatttttgaacatctgaaggcagacggcgtggctatcctcaacggcgatgacgcactgctggatacggtgacgctgccccagcggatcgtccgctgcggtcagagcgagcactgtgagacccggatcagcgacattgtggatcacggcgtggacggcatcacctgcacggtgacaacggcccgtgacacctacgtcctgaccatcccggctcccggcgagcacatggcctattccgcatccatggcggtggccgtgggggaggagctgggcctcagccgggaggagatcgtccggggcgtggcagcctatgagcctaccggctcccgaatgcgggtcatccgcctgcctgggggacgggtgctgctggacgactgctacaacgccaatccccagtccgtgaccgcggcactggaggtcctgggccgcacggactgtgagcgccgggtggcggtgctgggcgatatgggcgagctgggggacctgacggatcaggcccacttcaatgccggcgctctggcggccatgctgggcattgactttgtgatcgccattggctccaaggctgcacggatcgcagacggcgccgccatgagcggcggagacgtggtgcatttcgccacgaaggaggaggcgctccccacggtgcgggagcagctgcggcccaacaccagtatgctcatcaaggcgtcacactccatgcgctttgagcggctgacggaggacttgcggaagtattatgattgagattcaggtcaacaaccttgtaaaatcctttgaggtgggccacaatgttctggatggcgtcacctttcagatcgatcaggggcagcgggtaggtctgctgggcaaaaacggcgccggcaagtccacgctgttcaaaatattgataggagaactggactgcgacgagggcaccgtcaccatttcgccgggtcaccgcatgggtctgatctctcagatcccggtgtacccggaggggtacaccgtggacgatgtgctgcgctccgccttcgggcggctccacgccctgaccgctgaaatggaagaactggcgggccgcatggcggcgggagagacagacccggccattttgaagcgctatgggagcctttccgagcggtttgaggtgttcggcggatacgatacggacgtggccatcagcaaggtggccaatggcctgtccatttccgacgatatgcggggccggctgttcgaccagctctccggcggagaaaagacccgggtgaacctgggccgcctgattctggaggatacggacattctgctgctggatgagcctaccaaccatttggaccttcacgctacggagtggctggaggcctatatccagaaattccggggtaccgtggtggccatctcccatgaccgctactttttggaccgctccgtgaaccgggtcattgagattgaaaacggcaaagcggagttttactccggcaattacagcttctacgcggtggaaaaagaacgccgctatcaggaacggatgaagcagtacgaaaaggagcaggccaagatcgcccagctggaaaagtctgcggagcagctgcggatgtgggcatttcagggtatggacaagacctatcgccgcgccatttccatggagcgccgcattgagcggatgcgcaccacggccaagcccaccaaggcccggaagatggacgcccgcttcaccgccgcggagttccacggggacgaggtgctgggcatccggaacctgagcaaggcctacggcgagaagccgcttttcgaggggatctccctgaaggtggaggggggcgagcgcatcgccctcatcggtgacaacggcaccggaaaatccaccctcatcaagatgatcgccgacgaggtgtacccggacagcgggcgcatccggctggggccgcaggtgaagctagcctatctgcctcagatcatccactttgaccacccggactggaatctggtggagaacatgatggcggccaagcggggcatttccgcccagtctgcccgaaaccggctggcggcctatgacttccggggtgaggacgtcctcaagccggtgtccgtcctgtccggcggcgagcagagccgcctgcggctgtgtatgctgatggatgacgagatcaacttcctgattctggacgagcctaccaaccatctggacatcgcttccagagagtggatcgaggaggcggtggaggcctatgacggcacgttgctgttcgtcagccatgaccggtactttatcaaccgcttcgccacccgaatctgggaggtggccaatggcaccattaccgactatcccatgggctttgctcagtaccggcaggtaaaggcgcaggaggaagcggaaaaaacagaagcaccaaagcctgtaaaggaaaagatggttacagaaaaaccggttcgcggcgaccgggcgcagcaggcggcccggcggcagctgaccatctgcgagcgggagatcgccaaggcggaggagcggatcggggcgctggacgccgaaatggaggccaacgcctgcgactatgaaaagctcaatgcgctggtggcggacaaggacgctgcccaggcggagctggatgccctgtacctccgctgggaggagctcagcgaggcggcaggcgaggcataagaaacagaggtgaaaacatgcgggatgtactctgcatttactattcccgaacggggaataccaaacgggtgatggagaccatcgccaaagaaatggacgcggagctgttggcactgaccgacggcgtggagcggagcggcctgcggggctggctccgcagcggcatggacgccatgcggaaggactgccctgacgttctgccctttgaaacggaacggaagctggaaaattaccgcctggtcatcatcggcaccccggtgtgggccggacggtgcagcagcgtggtgcgcagctttctgaagcagcacggcaaggaactggaccgggtggcctatgtgctgacccggggcagcgagcacaagagcgaggatatttaccggcagatggatcagtatacgggaaagccccatcaggcggccacatccctgcgggtgggccatgtgggccacaccttctggcaggaggagtttctccggcagatccgggagctgctggcagaggaggaatagcgacactccttttcaaatttcaacatttgagaaaggagcacagtcatgctggataaattaaaggatctggacctccggtatgaggatctggaatcccagttaggcgatccccgggtgtatggcgacgcagagaagctgcgtcaggtgaaccgggaattgaaggagctgctgccggtggtggagacctaccgggcttatcaggcggcggacagccgccgccgggaggcggaggagctgctccatgacccggaaatgaaggaaatggctcaggacgaactggcggaagccaaggaagaactggaacagctgaaggaaaagctgacgatcctcctgctgccaagagatcccaacgacagccgaaacgtgatcctggagatccggggcggcgtgggcggcgaggaaagcgccctgtttgcccattcccttctgcggatgtataccatgtacgccgagagccgcggttggaagctggagatcgccagcatcaacgaaacggagcttggcggcgtgaaggactgctctgccgttattgaaggggacggggcctggtcccggctgaagtttgaatccggcgtccaccgggtccagcgggtgccggagacggagtccggcggccgtatccacaccagcgccgccacggtggcggtgctgccggagatggaaccggtggacgtggaactgaaccccgcggatattgaaatgcaggtctaccgggccagcggcgccggcggacagcacgtgaacaagacctcctccgccgtgcggctgatccataagcccacaggcatgatcgccgagtgtcaggaggagcgcagccagtttcagaaccgggagaaggccatgcgtctgctggcctcccggctgtacgaggcggagcgggaaaagcgggagagcgcctatgatgcggagcgccgcagtcaggtgggcagcggggaccgctctcagcggatccgcacctataatttccctcagggacgggtgacggaccaccgcatcggcctgacgctttataagatcgacgccatcatggacggcgcgctggacgagctgatcgacgcgttggtgacggcggatcaggcagagaagctgaaacagggacaggaagcagagtgagcatattttgagagcaaacgcccggcggcgttgaatataagataattcgaggcgagaaatgatgcatacacgatattttgacctgcgggacaccaagggtcagcaaaagatcatcgaggatcagatctccgcagcggcagacatcctgcggcaggggggactggtgggaattcccacggaaacggtctacggtctgggcgccaacgcattggacgcagaggctgtcaacaagatctttgaggccaagggccgtccgcaggacaaccctctcatcatccatattccgggaccccagtggctgccccggtactgtgaggacgtgccgccgctggcgtatacgctggcccggaaattctggcccggtcctctgaccatgatcctgaagcggaagcccatcgtgccggacaccaccacagcgggactggacaccgtgggcgtccggtgcccggaccatcaggtaacgctgtccatcatccgggaggcaggcgttcccgtggccgcgcccagcgccaatacctccggccgtcccagctgcaccactgcggcggacgtgatggaggacatggagggcaagatcgacgccgtggtggacggcggtccctgtcaggtgggcgtggagtctaccattttggatctgacctgcacaccgccccgtctgctgagacccggcggactgcctttggaggcattggaagaggtcgtcggccctgtggcggtggataaggccgtaacagagcggttgaaggacggggagcagcccaaggctcccggtatgaagtatcgccattatgcccccaaggctccggtgactgttgttaccggcccggcggaggcttctgcccggaccattttgcagatggtgaagcccggtgacggtgtcatctgctttgatgagttcgcggagctgttcaaggaacaggaagtggaatgtctgggtcccagtcaggataagcggattcaggcccagcgggtgtttgacgctctgcgggcctttgacagcaaggacgcggctcagatctatgcccagtgcccggacagtcagggccttggccttgctatcagcaaccggttgaagaaggcggcgggcttcaagaccatcgccgctggacagaagcgggtggtcattggcatcaccggcggtaccggctccggtaagaccagcgcgctggaggccatccgggatctgggcggccgggtcatcgactgcgacgaggtgtaccatgagatgctccgggacagcgcagagctgcgccatgccatcgaggtgaaattccacggcgtgtttaattccgacggtacactgaaccgcaagaagttgggtgagctggtctttgagaacaaggaacggatggcgcagctcaatgaggtcatttaccggttcattgtaccggaggtacagcgccgctgtcaggccggcgaactggtggcggtggacgccatcaacctgatcgaaagcggtgcggaggccctgtgcgaccggaccgtggctgtcacggccccggcggagctgcgggtgcggcggatcatggcccgggacggcattgacgagcgctatgcccgtatgcggatctccgcccagaaatccgacgaattctaccgcggtaagtgcgactatgagctcagcaacaccgctgagacgccggaggatttccgggagatcgccagagatttcttccgccgccttatcggagagctccgggaggaaaagaacgaagccagccggtaaacgacagacaggagccgctagtggctgccctgccttaccgtcgcggagaatttaccactttatcgacagtctcgaaggaggatactatgtctgatagcaacaaagcattgaaggaaaagctgctgagcagccgtaaaaacggctttgaccgtgtggacgcggcggagctggagcagatggaagcctactgcaaggaatatatggcgtttctggatgcaggcaagaccgagcgtctctgcgcggcggagacagtccgcctcgcagagcaggccggatacaagcccttggtccggggacaggccttgaaggccggagacaaggtgtatgtctgcaaccgggggaagagcgtgctgctggcccatatcggcagtaagcccatgagcgagggagcccagatcgccgccgcccacatcgactctccccggctggatctgaagcctaaccctctgtatgaggacaatgagctggcctatttcaagacccactactacggcggcatccgcaaatatcagtgggtgaccatcccgatggagcttcacggcgtggtggcgctgacggatggcaccactgtcacagtgaacatcggcggcgatgaaggcgatcccaagctggtcatcacggacctgctgccccatctgggtcaggagcagagcaagaagccgctggctgagggaatcgtgggcgaacagctgaatctgctgctgggcagcaagcccatcggagacgatgaaggctccgaccgggtgaagctggctgtgatgcagcttttgaacgagaagtacggcatcacggaggatgatttcacctccgctgaactggaagcggtgccggctgtgaaggccacggagatcggcctggaccgctccatgatcggctcctacggccatgacgaccgcgtctgcggctacgccgccttgaaggcattgctggatctggacaagacgcctgccaaaaccgccgtctgcgtgctggcggacaaggaggagatcggctccgacggtgtgaccggtatgcagtccgctgcctttgacacctttatggaggatctgtgcgaggctcagggcgcggccctgcgggtgtgtctggagaattccttctgcctcagtgccgacgtgacggcggcctacgatcccaacttcggcgaggtgtttgaaaagaagaacgccgcctatctgaactacggcattggtctgtgcaagtacaccggcgcccgcggcaagtccggcgccagcgatgccagcgccgagacggtgggctatgtccggggtatctttgaccgggccaaggtcatctggcagatcgcggagctgggcaaggtggacgccggcggcggaggcaccgtggccatgtatatggccaaccgcaatatcacgacgctggacgccggcgtgccggtgctggccatgcacgccccctttgaggtggtctccaagctggactgctatgagacatataaaggtatgaaagctgtttacgaagcggaataaaagctgtttcaaaagagtttgacggcgagaaaatatggaaaaggcaggagggaaatccgctcctgtcttttcatatatgacctttttcaacaatttgaccgtaaacggcggacaatttaacgaaatttttccaaatcccacaagggtatctttgccgttttcggttgcaagctgttgggaaagctgatagaatagaaccatccaaagacaaatgaccgtaagaggtggacgatatggcgagaaaaatcaagtattatctggtggcggcggaggccctgccggagatctttatccgggtggcggaggccaagcggatgatgcagaccggcgaggcggacacggtgggcgcagccacaaaaatggccggcatcagccgcagcgccttctataagtacaaggacgcggtgcagcccttcaacgatatgaagtcggagcatatcattacgttttacaccctgctgaaggatgtgtccggcacgctttccagcgttctgggcgtgtttgccgcctccggcgccaacatcctgaccatcaaccagagcattcccacaaacggctgcgcggctgtgaccatttccgctgagacctccgccatggagaagtctctggaacagctgatcaccgacatttccgcattggacaacgttatcaaattcgagatcctggccggataagggaggagcaacgatgatcaagatcgcaattctgggattgggtacagtggggaccggtgttgtgaaggtagtagaggccaacacagttcccatccagcacaagctgggccagccgctgtccgtgaaaacggcgctggtccggaagctgcgggccgacccgtatcagcacttgatgaccgagaatttccgggagatcgaacatgacggcgagatccgggtggtggtggagaccgtcggcggcgtggaggccgcctatgagtacacccgccggtgcctcatggcaggcaagcacgtggtcacagccaacaagcagcttgtggcggagcatggctgcgagctgctggagctggcccggaagaaccatgtgaattacttgttcgaggccagcgtgggcggcggcatccctgtgctgcaccccctgacccagtgcatggcggccaaccgcgtggatgagatctacggcatcctgaacggcaccactaactttatcctcacaaagatggtgaaggagggcgcgtcatttgccgaggttttgaagctggcgcaggagaagggctacgcggaggcggaccccacggcggatgtggagggcatcgacgccggccgcaaaatttgtattctggcggatctggcctttggacatcaggtggacccggcgcaggtacccgtggagggcatcaccggcattgatctgaaggatgtggagatcgccggacgccacggctaccgcatcaagctgttgggccgctgcctgcggctggagggcggccgccgcactgcgtatgtggcgccccacctgatctcggaggagaaccccatgtccgatgtgaacgatgtgttcaacgcggtggtggtccggggcaacgccaccggtgaggtcatgttctacggcaagggcgcgggcgagctgcccaccgcctctgcctgcgtggcggatgtgatcgagtgtctgcaggaggagcgccaccggccggagatcggctggagcgccgacaccggcggctttgcctctccgctgacgctgaagaaccgctggtacttccgggtgggaacggatacccttccggaggccttacatagcgcaaaggtgctggaacagggtacggagaccgcctttatcacgccgcccatcaccggcacggatgcggagcggctggcggcttacctgcccacgctggcaaagatgcgggtgctggattgattccccaatcccggcttcccgcgtatgatggagtggaccctgctgccggtcggtaagatttcaatggactggcggcaatctgaagcaaagagggaacaaccatgagcttgatcgtacagaaattcggcggcagcagtgtgcgggacgcacagcggatccgcaacgttgccggtatcattgcggaaacttatttggagggcaacgatgtactggtggtgctttccgcacagggagacaccacggatgacctcattgccaaggcggaggagatcaattcccatccctccaagcgggaaatggatatgctgctggccacaggcgagcagatctccgtagccctgtgtgctatggcactggaatccatgggcctgccctgcgtgtccctgaccgcctggcaggtggggatccagactaccgccgtccacggggacgcccggatcaagcggatcgattctgagcgagtccaggcggagctggatcagcacaggatcgtactgatcacgggctttcagggaatggatcgggccggggatgttacgaccctgggccggggcggcagcgacaccagtgcggtggcgctggcggcggcgttccgggccaaactgtgccagatctacacggatgtggacggtgtttacactgcggacccccgaatcgtgcccaacgccagacatctggacgagatcacctatgatgaaatgctggagctggcgtctcagggggccggcgtgctccacaaccgcagcgtggagctggcgaagaagttccgggtggatctggaagtgctctccagtctggagagaaagcccggaaccaaagtgaaggaggtcacaaaagtggaaaagacgaccatcgccggtgtggcgaaggataccagcatcgcacggatcgcactgatcgggctgcggcacaatcccggcgtcgcgtttcaggtgtttgacctgctgagcaagcataacatcaatgtggacctcattttgcagtccattggccgggaggacagcaaggatatttcctttactgttcacgaaaaggatctggaggacgctcgggcgatcctgacggaaaatcaggaggttctgtgctttgaccatatcgaggtggacggcaacatcggaaaggtctccatcgtgggtgcgggcctgatgaccaactgcggcatggccgcccggatgtttgaggcgctgtatgaggcgggcatcaacatccagatgatcaacacctctgagatccgggtctccgtcctgctggacgagggggacgtggaccgggcagtccgggccatccacgccaaattctttgacgaaatctgagtgatatagcggaacacggggaagccggtatgggttccccgtgtccctttgactgtttggaaatcattaaataagccgcatcaagcggcggaatggagataggtatgaacgcaattgtaaccgtgatcggaaaggacaaggtgggcatcatcgccgccgtgtgcatcaagctggcggagatgaacgtcaacgtgctggacatttcccagaccattctggacggcaagttcaccatggtcatggcggtagatgccgccaatgccaacgtgggctttgaggaactggctgcccagcttcgggagctgggggaggggatggagctgtccatccgcatccagcgggaagaaattttcgatgccatgcacagaatataaggagagagaacgatgctgaatcaaaaagagatcctctctaccatcgctatgatcgaccagcagcacttggacatccgcaccatcaccatgggtatttccctcctgagctgctgcgatcccgatgcgaagaaggcctgcgacaagatctacgagaaaatcacccggtacgcggaaaagctggtcaagaccggcgaggacatccagcatgaattcgggatccccattgtgaataagcggatctccgtgacccccatggctctggtggccggagccagcgagacggaggactatgtacccttcgcaatggcgctggaccgggcggcaaagacctgcggcgtcaactttatcggcggttattccgcactggtgcagaagggaatgacccttgccgacgaaaagctgatccgctccattccggaggccctggaccggacagagctggtgtgctccagcatcaacgttggctccacccgtgccggtatcaatatggacgccgtgaagctcatgggccgcatcattaaggataccgccgcccggacggcagaccgggacggtcttggctgcgccaagctggtggtgttctgcaacgccgtggaggacaaccccttcatggccggcgccttccacggcgtgggcgaggcagaacgggtcatcaacgtgggcgtttccggtccgggcgtggtgtaccatgccttgcagtccgtgaagggccaaccccttgacgtggtagcggaaaccgtgaaaaagacggcgttccaggtgacccgcatgggccagctggtggctaaggaggccagcagccgtctggatacccccttcggtatcgtggacctgagcctggctcctaccccggctattggcgactccgtggcccgtattctggaggaaatgggccttgaggtctgcggcacccacggcaccaccgccgcgctggccctgctgaacgatgctgtgaagaagggcggcgtcatggcgtcctcctccgtgggcggactgtccggcgcctttatccctgtcagcgaggacgagggcatgatcgccgccgccaaggcggggaccctgtgcgtggataagctggaggccatgacctgcgtttgctccgtgggtctggatatgatcgccgtgcccggcgacaccccggcggagaccatctccgccatcatcgcggacgaggcggccatcggcatggtgaacaacaagaccaccgccgtccgcctgctgcccacccccggcaagaacgtgggcgacacggtggaaatgggcggcctgctgggcagcgctccggtgatgccggtgcacaaggagtccagtgccgacttcatccagcggggcggccgcatcccggccccgctccacagcttgcggaactgatttgaatagttgaacagcaaacccccgccgtagtcatacggcggggatttttggcaaaaatcagcggtttgcggaacaaaaatgctctggaaatgggaattgaaaccggtcagctttcctttttgaaacaccgcaccagtcccgcgatggcgaaagccagtcccacaaggctggtaaaatcggaggggagactgccgaggatggggagccagggagagagcggcgcatacagcatcagcataccggcaaacaggatcagcgcgatcccctgcaactgattttttatctaaaaactcctttctgctacaaaacggggcggttttacgcctgctctgcaaatttcttcttgtcccggtcgatctgcttctggtagcggtcctgttcggaaaagacacagccgcagtacttctgcatataaaagccaagctctctggcccgctgatttcctgcccggaaattgggccggaaatcccggtagagaaattccacgccgtactgccgggcgtatttctccgccgcggccttgatgccgtcgtgatcctgatagagactggccagcagggtggaggtaaaggactcatagccgtgctccgccgcgtaccgggctgtttcctccagccggtgctgataacagtaggtgcagcggtggtcaatatcgcttgcaacgtgttctacaaacgttctaagaccgtagtcctcatctacaatgacctgcatttcaatggtgggagcgtaggccagcagacagtcccgccgggcttcatattccttccacggatgaatgttcgggttgtaccaaaaggctaccggttcgatcccttcggcccggagcggatcgatacagctgagggagcagggggcgcagcaggtgtgcatcaaaacagatgtcataacggaaacttcccttctgaaaaagcatattttttatagtataacataggttgtcaaatgaagaaagtctaagggagtaaccgatttcttaacggaatattcacgaaaattccatgttttttacattgagaattacggctgagaaacgtaaaatattggtaataagctaaagtggggctgaaaggcccctaaaggaggaactccccttgcgggtcggacttgacgtaggctccaccaccatcaaatgcgtggtgttggatgaccggaacaacttgatataccatacatacgagcggcattacagccatattgtagagaaatccgcagagcttctgcggcgggtggcggagcgctgcggccgggaggcggtgtttgccatctccggctctgccggcatgggcatggcggagagcgtaaaggctccctttgtgcaggaggtgttcgctacccgggtggcggccaaccgtctggcaccggggacggacgttatcatcgaattgggcggcgaggatgccaagatcctctttctgaccaacggtatggaggtccggatgaacggctcctgcgccggcggcaccggggccttcatcgaccagatggccacgctgctgaaaatgggcgcggaggagatggacaaagccgcccagacagcggaaaagacctacaccatcgccgcccgctgcggcgtgtttgccaagagcgacatccagcccctcatcaatcagggggccaaatccgccgacatcgccaagagcatctatcaggcggtggtgaatcagaccatcgcgggtctggcgcagggacggcccatcaagggccacgtactgtatctgggcgggccgctgaccttttccaagtgtctgcggcagagcttcgacgagactttgggcgtcaccggaacttgtccggagaatagcttgctgtttgtggctctgggcgcggcgttttacgccgaggaatcgtgggacctgctgaaaacggcggagctgttggagcagcgcggcatgtcggagacctaccgctcccagccgcccctctttgaaaatcaggcggaatatgacgcgttcaaagcccgtcacgccaaggcggcggtgccgcaggcggacttcccgacggactacgccaagcccgtccacatcggcatcgattcaggctccaccacggtgaaggtggcggtcatcgacgagaacgcggagctgctgttcaccgactaccggcccaatcagggggaccccattgccctgctgaaaaccgtgctgctggggttatatgagagccatcccaagctgaacgtggcgtccgtcaccaccaccggctacggcgaggatttggccaaggccgccttccacgcggatttcggcgtagtggagaccgtggcccactttaccgccgccaagcattttatgccggatgtggacttcatcatcgacatcggcggtcaggacatgaagtgcttcaagatcgaaaacggcgccatcagcgacattttcctcaacgaagcctgttcttccggctgcggcagctttttgcagacctttgctcaggcgttgggctacgatgtaaaggacttcacgaagctgggcctgtttgcggaccggcccgtggatctgggcagccggtgtacggtgtttatgaattccagtgtgaagcaggcccagaaggacggcgcctccgtggaaaacatctctgcgggactgtccatctccgtggtgaaaaacgccatctacaaggtgatccgggcctcctcaccggaggagctgggccgtcatgtggtggtgcagggaggcacgttttataacgaggccgttctccgggccttcgagaaggaaatgggccttgaggtgatccgccccaacatcgcgggcctcatgggagcctacggcgcagccctgtacggcatgaaaaaagctgtcaagggaaaccacagtacactcctgacagagccggagatgcgggcgttccatcgggaaacagagagccggagctgcggccagtgcggaaacaactgccagctgaccgtcaacaccttctccgacggcggacggctcatcagcggcaaccgctgtgagcggcccatcaccggcaagaaggacgacggccgctggaatctgtatgaatataagcggcagctgcttttaggctacaagccgggggagaaccggcgggggcggatcggtttgcccctgtgtctgaacttctgggaactgtatcccttctggcacacatttttcacgaagctgggctttcaggtggtccacagccccatgtccagccggaagctgtatctggaggggcaggggagcatccccagcgacaccgcctgcttcccggcgaaactggcccacggccacattgagtttttggccaagctgggcgtggacgccattttctacccctgcatgacctacaacatcgacgagggtctgggccagaaccactacaactgcccggtggtggcctactacccggaggtgctggagggcaactgtgactgtctgaagaacacgaaattcatttatgactatgtgggtatccaccggccccacgatttcacaaagaagataaccgccgtgatggagcgggagtttggccccattccccatggggagatcaaggcggcggtggaggcggcctacggagaatatgagcgtcacatgaagcagatccgggagaagggtgcggagatcatggccgccgcccggaaggaggggcgccggatcatcgttctggcaggccgcccctaccatgtggacccggaggtcaatcacggcatcgacaccctcatcacccaattcggcgcggcagtcatcacggaggattccgtttctcagctggcagatccgttcaagaccacggtgctgaaccagtggacgtatcacgcccggctctacgcggcggcgaagtactgctgctcccagccggatatggatctggtgcagctggtgagctttggctgcggcgtggacgccatcaccaccgacgagacccgggaaattctgcgggagggcggcaagctgtatacccagctgaaaattgatgagatcaccaatctgggcgcggtgcgtattcgcttgcggagcctgtttgcggcgttggaggaacaggaggagacctgatatggaacagacctatccccggtttacaccggacatgaaaaagacccataaaattctcattcccaatatggcaccggtgcagttccgcattctggcagccagcatggagaaccatggctatcaggtggagctgctgggcaactgcggcgagcgggtggcggagctgggactgaaatacgtccataatgacacctgctatccggcgctgctggtcatcggccagtttttggacgcactggattccggcaagtatgatctggaccacaccgccctcatcatcacccagaccggcggcggctgccgggcgtccaactacattttcctgctgcggaaggctctggaaaaggccggctacggcaatatccccgtgctgagcctgaacttctccggtctggaaaaggacagcagtatgcccatggatctgaaattcatgcggcaggctctggctgccatctactacggcgacctgctgatgaccctccgggcccagacccagccctatgagctggaagctggggcggcggagcggctgcaaaacaagtggctggacattctctgcgatgaggtccgccacgataagggctattccggccgggagatgaaggctgtcatgccgaagatcgcggcggagtttgccgccatcccggtgcggcgggtgcccaaggtcaaggtgggcgtagtgggggagatctatgtcaaatattcccctctgggcaacaacgaattggaaaagtttctggcctctcaggactgcgaggtgaacctgccggggctgatgggcttcgtgcagtactgcgcctacaacatggcggagaccgtgcggctctacggtggctctctggtggagaaaaccgccgcggaggcggcgctggccctcatcgcgggcatggagaaggtcatcatcaagaccctcaaggacgcaggctaccatgcccccatgccctttagcgagctgatcaagctgccggagcagagccacaccatcggcatgggctgcaagatgggcgagggatggctgctgacggcggaaatgctggagctggtgcgctctgggtatgagaacatcgtctgcgcccagcccttcggctgcctgcccaaccacatctgcggcaagggcatggtgaataagatccgggagctgtacccggaggccaacatcacccccatcgactacgatcccagcgccacgcgggtcaatcaggagaatcgaattaagctgatgctggcggtggcaagagaacgtctgtcggagcggcgggagccgcctgccgacttgccgaaggtccggacgtctgtatctgccaagctttccaaacccaagtccctgtgcgcaaatatctgattttgaagagagtcgcttcggcggctctcttttttgctgcttacaggggaccggacagacaaaattgatggaatttggttgaccgggcaagataaaaaaggtataataaaatgatttattatgagaaagtatgtccctcggtgctttgcgggacatggaggaggaaccatctatgtggatcgcggatcaatggcaggattatgagctgctggattgcggcggcggtgaaaagctggaacgctgggacaagcagtatctggtgcgtccggacccccaggccatctgggaaacgccccggcgtctgccggagtggaaacgggccaacgcacggtatctccgcagtcagaccggcggcggacactgggagaaaaaggctctgccggaaagctggcaggtgcattataaggatctgaccttccaggtcaagcccatgaacttcaagcatacgggcctgttcccggagcaggcggtgaactgggattttgtcatggacaagatccgcaaggctgaccgtcccatccgggtgctgaacctgttcgcctataccggcggcgctacggtggcctgtgccaaggccggcgctgccgtctgccatgtggacgcggccaagggcatggtggcctgggccaaggacaacgcccggctctccggcctttccgacgcgcccatccgctggatcgtggacgactgcgccaagttcgtggagcgggagatccgccggggcaagacctatgacgcgatcatcatggacccgcccagctacggccggggtcccggcggcgaggtctggaagctggaggagagcctgtacccctttgtgaagctctgcgccggggttctgtcggacaagccgttgttcgtgctcatcaactcctacaccacaggtctggcccccagtgtgctggggtatctgctgcacctgctggtggcggagaagtacggcggcaccgtcagctgggacgagctgggtctgccggtgacggctaccggcatggcgctgccctgcggcgccaccggacgatggttttctgagtaataaacagataaacaaggagcggctatgttaaaaacgaagaataagcatctgcggtatgtgatcacattttttgcggtcctgtgttcttcgctgctgcagacgtttgtgatcgaaagctttgtccattccgccggactgctttccggcggctttacaggcgttgctattttgatcgaccgggcggcatcgctttacggcgggaccatctccacctcccttgcgctggtggcgctgaatctgccggtggcagtcctctgctaccgcagcatcagtccgagattcacgcttttttcccttctgcaagtaggcatgaccagcttattcctgaaatacttctctctgccgccgattttcgacgatattctgctcagcgcggtgttcggcggcttccttatgggcatcagcatcgtgctggccctgaagggaaacgcctccaccggcggcacggactttatcgcgctgtatgtctccaataagaccggaaaatccatctggtcctatgttttcgtgtttaacgcctgtattttgtgcatctttggctatctgttcggctggctgtacgcaggctactccatcctgtttcagtttatctccacaaagacggtggaaaccttccaccaccgctacgaacggctgacgcttcagatcaccacccaaaaggcggaggagatcatggcggcctatgtgagcgggtgccggcatggaatgtcctgcgtgaaggcggtgggcggatacagccacaaggatatgagcgtcctacacactgtgatctccagctacgaggagagcgacatcgtgcacctgatcttgcaggtggacccccatgcgatcatcaacgtgctccgcacggaaaacttctacggcggcttttaccgggccccgttggattgaatatcaagttaaatgaggtatccgatacatggatatgatcgagaccaaggctctggaattcgcctatccggcggaggaaggggagaagccggtcctggccctgcggggcgtggagacggccattgaaaagggcagctttgtggtggtgctggggcacaacggctccggaaaatccacctttgccaaatgcctgaacgccatcctgctgccctgcggcggcaaggtgtacgtggagggcatggacacccaggacgaggaatgtcttttggagatccgccgccgggtaggcatggtgttccagaacccggacaaccagatcgtcgccaacgtggtggaagaggacgtggcctttgccccggagaacctgggagtggccacggaggagatccgccgccgggtggacgatgccctggccgccgtggatatgaccgcctttatgacccacgcgccccatctcctctccggcggccagaagcagcgggtggccattgccggcgtcatcgccatggagccggagtgcatcgtgctggacgaggccaccgccatgctggaccccatcggacggcaggaggtgctttccgccgttcataagctgaaccgggagaagggtatcaccgtggtgctcatcacccaccacatgaacgaggcggaggaggcggaccgggtcatcgtcatggatgacggccgcatcgcgctggacggcacccccaaggaggtttttacccaagtggagccgctgcggaccatgggcctgacggtgccagacacggtggacttgctggaccgtctgcggaaggacgggctggacgtacccctggacgctttaacggtggacgaatgtgcggctgccattactgcggctctggcgaagaattgacggaggacagaaggattggaaccgattctacaggtaaaagacctgacacatacctatggcgccggaacgccgttccagcgcagtgccgtggagcacatgagctttgatgtgaacgagggagaattcttagggatcatcggtcataccggctccggcaaatccaccctgatccagcatctgaacggtctgctccagccaacggcaggagagatcctgctgcgggggaagaatatctgggcggagccgaaaaagatccgggaggttcgcttcaaggtgggtctggtgttccagtacccggaatatcagctgtttgaggaaacagtgtacaaggacatcgctttcggccccgctaatcagggaaaaaccggggacgagctggatcacgccgtccgggaggccgccaagttagtgggtatccgggacgatcagctggaaaaatccccctttgagctgtccggcggacaaaagcgccgggtggcgctggcgggcgtactggctatggagccggaggtgctggtgctggacgagcccacggcgggccttgacccggcgggccgggaaaacctcatggccaacatccgggactaccaccgcaacaagggaaaaaccattattttggtgagccacagcatggacgagatcgcccggaacgtggatcgcattttagtgctgaaaaacgcccatgtgctgatgcagggaacgcccgcggaggtgttcgcccggggcgaggagctgctctccgccggcctggacgtgccgcagatcacccggatcgctatggaattgaagcgtcggggcgtggacatcgacccggctgtttatacggtggaggcgctggagcgtcagctccttgccctgcggaaggggggagcgggatgctgaaggacattaccttaggccagtatttcccgggaaattccatcgcccataagctggacccccggacgaaaatcttgttggtgacgctgtacatcattgcgctgttcagcgccaaaggctggatgggctacgctgtcatggcggtgacgctggccgcgtgcgtgaaggtgtcccatgtgggcctgcgggcgctggtgcgtggcctgaagccgctggtgttcatcatcgcgttcacaggcattctcaatatgttcttcaccccggacacccactacctctgggagtggggcatcctccgggtctccgtgaagggtattgaaaacgcgctgttcatggtcatccgcatcatgctgctggtgatggggacgtttctgatgacctacaccaccagccccatccgcctgacggacggactggaatccctgctgaaccccctgaaaaagatccatgtccccgttcacgagctggccatgatgatggccattgccctgcggttcatccccacgctgatcgaggaaacggacaagatcatgtccgcccagaaggcccgtggcgcggacttcgacagcgggaacatcttccagaaggccaaggcgctggtgcctattttggtacccctgtttatcagcgccttccgccgggcggacgaactggcaacggcgatggagtgccgctgctaccacggcggcgagggccgcaccaagctccacgttctgaaataccagcggcgggactacgtcgcgctggcgggcggcgtggtcattctggtgctggtggtagccctgcggagactgggcgcttaaaatcgaaaaacgttataaacacaga

SEQ ID NO: 12169 - DNA, 1294 bp, Unknown
  gut microbiota DNA sequence
aagatggaatcgtggttgaagtaccgggaggcgaaatacttcacatcctcgatgcttgccagcacccgttccagcttttccggaagggcttccagctcgtgaaggatggtatcgtactccgttttctcaatggtacccagcaaatcgcccagatacagggcaatgaggtccatcaggaccagctgagtggagtaagccttcgtggtagccacggcgatctccggaccggcccaggtatagagcacatcgtccgcttcacgagcgatggaggagcctaccacattcaccactgccagtgtccggccgccgcgccgcttggcctcccgcagggcggccatagtatccagcgtctcaccggactgactgatgaaaatgaccagagaatgatcgtccaccaacgggtcgcagtagcggaattccgaggccaggcacacctccaccgggcggcggagcaggcgctcccagttgtacttgctgaccatgcccacatggtagctggacccgcaggccacgatgaaaatacggctgacgccctggatgtattcctttgtcaggcgcaggtcgtccagcaccacccggccctcccggaccctgggggagacggttttccggatggcctccggctgctcgaagatctccttgagcataaagtgggggtagccgcccttttccgcagcggaaacgtcccagtcgatgtggctgtggggcttatcgatggggtccatctcgtcattgaaaaggttgacgccctccgccgtcagcacggcgatctcgccgtcctccatgtaaataacatcgcgggtatggctgatgacggcagtcacgtcggaggcaatgaaattctcgttttcaccgcagccgatgataagggggctgtccttccgggcggcgatcagggcgttgggatagtcggcacagatgatgccgaaagcataggagccttcgatccgccgcaggacacggcccacggcctccagcatattatgacactcgttatagtggaattccagcagctgagccgccacctcggtgtccgtttcagacttgaacgtaacgccgtgacgcaaaagctgctgcttaatctccatatagttttcgatgatgccgttatggaccatggcgatccggccatcctcactgacatggggatgggcgttgatgtcattgggctctccatgggtagcccagcgggtatggccgatacccagcgttccttccacatcagtgccgccgtggatcatatctgacagcacctgaaggcggcccttggacttatagacctgaagcccctttg

SEQ ID NO: 12170 - DNA, 1369 bp, Unknown
  gut microbiota DNA sequence
ttcggtctggataccatcgtgagcctgacctccccctggttctccttcttctatcccatcacgctggtgatgaccattctgggcatcttcgagaagaagatccccaatgacggcgcgttcaagggcgctgtgtactttacggtgatctacgccgttctggatctgccccacgagtatggcttcggcttcctggaccccgttctgaatcacatccccctctatggtctgggcttcggttggatcgttcccgccatcgtgggcttcatcgtgggtctcattgtctggaagggcaagggccgcacggagacctgagcaaactgtttctgagctttataccgtattggaatggaacgcgcaaagcgcgtaaggaggaatttctatgtccattgaaaaaggcgacgcgaccaaatatgtccataccggcaacggcgagctgtgctatgagctgaacaaggctctgactgtgccggagaccttccccatctacctgtcctctgcctatatcttcgattccattgatcccatcgacaagatctgcgacgagggtgctcccggctatgcttacttccgtctgggcaatcccaacgccgacgccacctctcagatcctggccgccggtgacggggccgaaaagggtctggtattctcctccggcatggcggccattacaacctccattctggcaacggtgaaacccggcgatcacatcgtggcctcccccatcatctacggcgaggcgttctactacctgaagtatgagctgaagcgctggggcgtggagaccaccttcatcgacttcaacacgcaggatgtggcggactatatccgtcccaacaccaagctggtatacggcgagaccattgccaaccccctgatgagcgtaccggacatccagcatctggcggacgtggctcacgccaacggcgccaagctgtttatcgacaacacctttgccacctccatcatcgccaagcccatcaagtacggcgcggatctggtgatttacagcgccaccaagtatctgggcggtcacgatgacctggtaggcggcgcggtggtcggctccgaggagatcatcaagtctctgagcttctacctgggtctctacggcgcgaatctgggcgccacggaatcctggctgctggcccggagcctgcggacgctgcccctgcgggtgaagaagatggctgaaaacggtctggcactggccaagttcttcgagagccatcccaaggtggaaaaggtctactaccccggtctggaatcctcccccagcaaggcgctggccgataagcagttcgagggcaacggctacggcggtatgctctgcgtaaacttcaagggcggccagaaggagatcgacaagctc

SEQ ID NO: 12171 - DNA, 29360 bp, Unknown
  gut microbiota DNA sequence
accgttcgattctggaggggttgtcaaaaatcaaattttggagtagaattttatctcatacagtgaaagagctttttcgtagctttttatataagaaaagccgaaaacccttgaaaacaaaggctttcggcgttgttcactggcgtccataagaggatttgaacctccgaccccacgcttaggaggcgtgtgctctatccagctgagctatatggacgtgtctgatatatgattatagcccgatcaaagtcgaactgcaatcccttatttagttttttttgaggtggccgttgtaacgcaaccttaggaggcgttcgctctatccagctgagctaccggggcatagatctcattcttttcacggcgcagcaaggctctcaggcccatagccgttgcagtttattgtatcccattttgccgaaggtgtcaacgtaaaaaaggagcacggctcacgccgtgctccttttcgatctgtcggatgagaattacttctcgtcgtacatggccttcagcttcagcaggtgctgatagcgatccatggcgacctcctcgttgcgcttgaacagagtttcggcgcggtcggggaactcgcgggtcaggcggctgtaacgggcctcgttcatcaggaaggcgcggtagccctcttccttgggctccttggaatccacaatgaacttgtcagtctcagcagcggggttgaagcggaacaggttccagtagccgcactcgacggccttcttcatctcagcctggcagttggtcatgccgcccttgatactgtgcatctcgcagggagcatagccgatgatgagggagggaccatgataggcctcagcctcctgaatggccttgagggtctgagcggggttagcacccatagctacctgagccacatacacatagccgtagctcatggcgatctcagccaaagacttcttcttggtctccttaccggcagcggcgaactgtgccacctgaccgatgttggaggacttggaagcctgaccgccggtgttggagtagacctcggtatcgaagacgaagacgttgacgtccttgccggaagccagaacgtgatccacgccgccgaagccgatgtcataggcccagccgtcgccgccgaagatccagatggacttcttctccagatattccttgtccttcaggatggcagccaccagcttgcaggcgtcgcagtcgcagaacttctcgcccttggccttcagctcctcggcgtgtgccttgaacttctcaatgccggccagctcgtccacagttgcgatgctgctttccagagccttgatgtagtcggcggaagcggtcttgttggcagcgccgtcagccatggtatccagccacttctgagcggcttccttcagttcgggacgtgcccactccacagcgatcagttgacgggtcaggtcagccagacggttacgagtggcctcctggcccagatacatgccaaggccgtgctcagcgttatcctcgaacagggagttcgcccaagcgggaccgtggccattcttatcggtgcagtagggagaggttgcggcaggaccgccccagatggaggagcagccggtggcgttggagatgtacatccggtcaccgaagagctgggtgacgagacgggcatagctggtctcggcgcagccagcgcaggagccggagaactccagatagggctgcttgaactggctgcccttgacggtgttgtcctgcatgtcggccttgggagcgacctcggccacgcagtagtcgaacacatcctgctgtgcggcttcctcttcctggccaaccatggtcagggcacccacggggcagacgcccacgcacacgccgcagcccatgcagtccagaggagacacggccatggtgtacttgtaaacacccttgcccttgccagccttcacgtccacgatcttggcagcggcgggagccttggcggcctcctcctcagtcagagcgaagggacggatggtagcatgggggcagacatatgcgcagttgttgcactggatgcacttggaagcgtcccaagtaggaacggagacggacacgccgcgcttctcataagcggcagcgccctgctcgaactgaccgtccacatgaggcaggaaggcggaaacaggcaggctgtcgccgtccatacggcccacggggaacatgatgtcctccacctgcttcacaacgccctcgcggccggtgagcttggtggtcacagtctcgtccttggcgtcagcccagtcggcgggcacgtcgaacttcttgtaggcggtagcgcccagatcgatggccttgtggttcatgtccacaacgtcctgacccttcttcaggtaggagtgggtggcggcgtccttcatgtactgcagggcctcggtctcaggcaggacctttgccagagagaagaaggcggactgcagaatggtgttggtacgcttgcccatgccgatctgcttggccaggtcgatggcgttgatggtgtagacttggatgttgttcttggcgatgtagcgcttggaagcggcatccagatggtggctgagctccgcgtcatcccactggcagttgatcaggaacacaccgccgggcttcacatcgcggacgatggggaaatgcttggtgatgtaggcaggcacgtggcaggccacgaagtcagccttgttgatatagtaagaagacttgatgggctgatcgccgaagcgcagatggctgacggtgacgccgccggtcttcttggagtcatactggaagtaggcctggatgtacttgtcggtatggtcgccgatgatcttggtggagttcttgttggcgccaacggtaccgtcgccgcccagaccccagaacttgcactcgatggtgccggcaggagcaacgccgggaacggccttctcctccagagacaggtgggtgacgtcatccacgatgcccagagtgaactcgtgcttgggagcgtccttcttcagctcgtcatacacggcaaaaacggaggcgggaggcgtatccttgctgcccagaccgtaacggccgccgatgaccttcatgtcattgaagcggttggcgttggccagagcggtgacaacatccttatagagaggctcgccctcggagccgggctccttagtgcggtccagaacggccagagccttgcaggtagcggggatggcagccagcagcttatcggcccggaagggacgatacaggtggaccttcaccatgccgaccttctcgccgtgagcgttcatgtagtcgatgacttcctctgccacgttgcagatggaacccatggcgatgattacgcggtcagcgtcgggagcgccgtagtagttgaagagctgatagttggtgcccagcttctcgttgatcttgcccatgtacttctcgacgacctcggggagatcctcgtagtacttgttgcaggcttcacggtgctggaagaaaatatcgccgttctcatgagaaccgcgcatcatgggacgctcggggttcagggagtgcttgcggaacgcgtcaacagcgtccatatcgcacatttccttcagatcctcgtaatcccacacggcgaccttctggatctcgtgagaggtacggaagccgtcgaagaagttgatgaagggaacgcggccctcgatggcggccagatgggccacgggagccagatccatgatctcctgaacgtcattctcgcacagcatggcgaagccggtctgacggcaggccatcacgtcggaatgatcgccgaagatgttcagagcgtggctggccacggtacgggcggacacgtggaacacgcagggcagcagctcgccggcgatcttgtacatattggggatcatcagcagcaggccctgagaggccgtgtaggtggtagtcagcgcaccggctgccagagaaccgtggacggtaccggaagcaccggcctcagactgcatctcgcacactttgacggtggtgccgaagatgttcttctgaccgttggctgcccactggtccacatagtctgccatgggagaagacggggtgatggggtagatacccgccacttcggtaaaggcgtagctgacatacgcagccgcgttgttaccgtccatggacttgaattttcttaccataaactcttacctcctgtcggtggataccgtctgcagaacggctctcaccggtttttggcatttgggctctctcttctcaaacgccattcgccgtaattgtagcacttcctctacaatttgtaaacagaaaagctcaaattttgaaacttaatcggttttcttgttcttttttagaaaaatatgtttattttttaactttgccgccctttgggtttccaaaaatcatgaagtgtggtacaatttttttaatcataaaaatgtaaacaaaattttaacttttttcaggaggcaccgctatggtcaccactgtgcgttctctgggcctcaacggtattgccggctatgaggtcacagccgagtgttttctctccggcggtctgcccgccttcgacatcgtggggcttccggacgccgccgtccgtgaggcccgggaacgggtccgggcagcggtgaaaaactgcggagcaaaatttcccgtcagccgcatcaccgtcaatctggcccccgccggtacgaaaaaagcgggcacggtctatgatctgcctattttcgtagggctgctggcggcggacggcgatctgcccgctccgcccaaggacgctgctttcatcggcgagctaagtctcaccggtgccctgcggggcgtcagcggtgtattgcccatggcgctggccgcccgggaggcaggtatccggacgctgtacgtcccggcggacaacgctgccgaagcaacgctggcggagggcttgaccgtctacggcgtcccggacgtgggcgcactggtagcccatttgaaaaacgagacccctctctcccccgccccggtctgggtaccggagccggaggaaaccggcctgccggacttgcaggacgtgatgggacaggagcatgtaaagcgggcgctggagatcgccgcggcaggtggacataatcttttgctgattggctcccccggagcgggcaaatccatgctggccaagcggctgccctctatcctgccggagctgagccgtcccgaagcgctggagacctccggcatctggtccgtggcgggactgacggacccccgccaccctctgctgacccagcggcccttccgctcccctcaccacaccacctccgccgccgcgctggctggcggcgggccgttgatgcggcccggcgagatctctctggcccacaacggcgtgctgtttttggacgagctgccggaatttcaccgggacgtgctggaggctctccgtcaacccttggaggacggcatcgtcaccgtggcacgggcaggcggcaccctgcggctccccgcccaattccagctggtgtgcgccatgaatccctgcaagtgcggctggcggggccacccatccgggaagtgcacctgctcggacaaagaggtggagaagtacgttcagaagatctccggtcctctgctggaccggatcgacctccatgtaaatgtcccctctgtggaatacgaggccatgcggcgaaagtccaagccggaatcctccgctcaggtcaaggggcgggtggacgccgcccgggccatccagtccaggcggtttgagggcaccggtatcccctgcaacgcccagatgacgccccctatggtgggccggttctgcgagctggattcccggtgcgacgcgctgatgaagtccgcctttgagcgcatgggtctcaccgcacggagccatgaccgggtactgcgggtggcccggaccattgcggatctggacggtgcggagcatatcggcgtggagcatttgtcagaggccattcagtaccggaataccgacattctgaaggggtaaagccgaacaggagatgtgtctaaaacgcatctcctgtttttatttgttttgacgaaacatttgtgcaatttgactataaaaactttaaaaaatttgttgacaaaaacgattacctggcgtatagtagcgtcgaaatcagaaagaaggaggtacacaccatggcaatcctgtttacggtctctatgctggctgtggctggcggtatgatctgctctcacgcggaataaaccgtctccaaagatagaccaattaaaagaaatatgatcgaagaaagacccgtcctgccaaatggcaggtctttttttatatatttgtattcttcgctccgttttgggacatactgtggacatccgtttttatatttttataaaggaggaaccgccatgtccatcccctttcaggacagtgagaccgccaaaaatcttctccgcgcctttgccggagaaagtcaggcccggaaccgctatgactttgccgccaacctctgccaaaagcaggaattacaggcgatggcctttatcttccaagccacagccaagcaggaacaggcccacgccaaggttttctgggaccatctgcaagccctgaacggccaaaatctgcctatctacggcgcttaccccattgagggcaccaaccggatcctggaactgctgcgcgccgcccagcacaacgagcacgaggagcatggttccgtatacccctccttcgccgccatcgcgacccaggagggcttcccggaggccgccgcctccttccggcagattgccgccattgaacaactccacggcgagcgtttcggcctgctggcagaccagctggaaagtggggctctgttcgtctcgcagatagagaccggctggatgtgtctaaactgcggccacacccaaaacagtctggaggccccgaagcagtgccccgtctgtaatcacggtcagggctggtttatccggttggagttggccccatggtctcccgtggtgaagcaaacctgaattaagaaccatgccgcatcgggagcggcaagcaaaacaggctgaaagtgacgctttcagcctgttttcttacatatagtacaaattgatcatctgtgctatgtctccgggaagtccttgatgagcagcagcagtccctccttcacagagaccacagcgatctgccccggcagcacctcgttgctggtgccgtactggtagccgcaatgaatttccccgttgtccagtgggaacttgcagccggtctccgtgatgccccgggcggtgccggtgatattcaccagagagtagaagggaaaccgctccggaatctccaccggctccgcccccaccagttccatctccgaatagtcatccaccagcagggcctgttttccctgttcccgcagcatcaccagcaggtagacattcaccagcgtatgatccagacgtccgccggaaacacctaccagcaaaaattcgtcgaacccccggcgcatggcctccttggccgcaaacaccgtgtccgtatcatccttcttcaccggcagaacgatggtctcccggtcagtctccggcttttcatgggaatcgaagtcccccacgatcagatccggttccgctcccagcgccttctgatgtcgcaggccgcagtcgcagtaaatgaaaaagtcgtccgcccggaaatattgccgcacccggttataggtccggatctccgcgccgccgacgatcacgcagcgtctcatatccatcacatccttttccgctatcataccccgttttttgccgggccgcaatctttttgcggataaaatcgcaaaaacctgaaatcctaacactaccaactggaaaaaggagtgagcctatggaaacaggcatccataatacctccgagattgggcggctgcggaaggttctgctgcaccggcccggtcaggagctggaaaacctcatgccggaatatctggaacggctgttgtttgacgatattccctatctgaaggaggcccaagccgagcatgacgccttcgcccaatgtctccgggacgccggggtggaggtggtctacctgatcgatctggtggtcaattctctgacttcaccggaggtacggcaggaattgataacacaattcttaaaggaggccgatctgccggatgaggccgcagggaaggccgtagcagaatatctctccgaactggatgaccgtgccatggtgtccgccatgatggcgggcatccgccgcagtgacctgcgaaagcagggaggccgtctcagcgaccatctgtccggtcttgaggagggctatccctttgccgtagatcccatgcccaacctctacttcacccgcgaccccttcgccaccatcggcaccggcgtatccattcacaaaatgcacaccgtcacccggaaccgggagaccctgttcggccggttcatctttgagcataacccctggtaccagaacgcacctcgctggtatgaccgcagtgcatcttcctctttggagggcggcgatattctggtgctgtcccctcaggtgttggctgtgggcatctcccagcggacagagggggattccatcgaccaactggcccagacggtgctctcacaaagcaagactttccaaaaagttctggctttcaacattcccaaaagccgctccttcatgcatctggacaccgtgttcaccatggtggaccgggacaagttcaccgtccatcccaacattctcagcgacatcaccgtgttcgtcatggagctggatgaaaatcagcagatgcagatccgtcaggagaccgggcggctggaggatattctcaaggagcacctggggcttagtcaggtgacgctgattccctgcgggcagggcagcgtcatcgacgcagcccgggaacagtggagcgacggcagcaacaccctcgccattgcccccggtgaggtggtggtctatacccggaatcatgtcaccaaccgctccttggaggaggcgggcatccgcatccacgccatccccagcgccgagctgagccgggggcggggcggtccccggtgcatgagtatgccgctgatccgggatgacccttagcgggttcttgctcccgcaggaaggggcggttcccaccgcagaatgcactacttttcttttgagatatcaaacgcaccagattggtgcgaagatgtgcggcgatgccgcaccggattgaatccctattttcttttcgtcttgccgaaaagattaccggggttcccggcggaactgtaccggttcggtacggagaagccaaggggatattctcttttgaaaagagaatgtcccccccggccccctaaagagcaacacggggggatttcgatttccccccgcacccccttgaaacgacacaaaggggcgggctgcggccctctccctttggaaaccctctcccaaggggacaagggacgagggcaaggcccgcctttggaaaccaacccccaaggggacgcaggatgaaagacgaggataaagcaggaaccaaaccgggtagcgcgtagcaaagcggaacgcgcgggagtagaaatacgccgattcggttttgtaccccgttgtaccctgtgcccgcaggtgcggggacgcagttctggaaagaataggtatagcgcagccggcaggagacttccggatttggtcggcagtgcgtgacggccaacccccgttttgggtgatttgacacgaaggtgccaaatcatccctcagcgtcttttcttttgaccatgaatggccgttttcttttccgcaagaggaaaagaaaatggggattcaatcccgcatggtatcaccatgctcccccgcgccgcaaagcggcgccgtgccctcacaatttctaaatcagtttatagtaaatcaaaaggagcaattatcatggcagtcaatttaaagggccgcagttttctctcgctggccgattttaccccggaggaacttcgctatctgctggatctgggccacgacctgaaggccaagcggcgggcaggcgtctgcgcccccaccatacagggcaagcacatcgtcctgttgtttgaaaagacctccacccgcacccgctgttcctttgaggtagcggccacccaggagggcgcccacgtcacctatctggacgccggttcttcccagatgggcaaaaaggaatccctggaggacagcgccaaggtgctgggccggttctttgacggcatcgagtaccgaggctacgagcagtccgtggtggaggatcttgccaagtggtccggtgtgccggtgtggaacggcctgacggacgccgaccaccccacccagatcttagcggatctgatgaccattgaggagcactgcaaaaagcctttaaacaagatcaaggtggtgttccccggcgatgtgcggaacaacatgtgctatgcgtggatgatgggcgcagccaagctgggaatgcactttgtcgccatggggccggaggaactggccaagcagatggatcaggaggtggtacaatccacctttgccgaggcccggaaaaacggcggcctcatcgagatcactgaccacgcagaggacttaaagggcgccgacgtgatctacggcgacgtgtgggcttccatgggagaggaagcccagatcccagagcgggtagggctgctgtcccccttccgggtgacgatggacaccctgaaggccacggagaatcccgacgtgctgtatctccactgtctcccctccttccacgattttgaaacgaaaatggcgaaggaatggcaggccaagggcgtggacatccgggaggtcaccgatgaggtgttccgctcccgtcacagcgtggttttcgacgaggcggagaaccggatgcactccatcaaggccgtgatggtggccaccatcggcgcgtaagtcagtccgtaaggaggaagtgttcccatggagcaacgcaaattccagatgcccaccgcgtatacgatcctgttctgcctgattcttctggtggcactgtccacatggctcatcccggcaggcagctatgactacgccgatggtatccccatctccggcagctatcacgccgtcgcccccgcgccgcagggcatcggtgcggcactgaaggccgccttccgaggcttttatgacgcagtggatgtctgcgtgttcatcctgatggtgggcggttttctgggcgttgtgatgaagaccggggccatcgacgccggagtcagcaacgtgatttcccggctgcaaggccgggaaaacctgctcattactattttaatgctgtttttcggtctgggcggcaccacctacggcatgtgggaggagaccatggccttcttccctctgctgctgcctatttttctggcggcgggctatgacgctgtggtaggcgtggcggtgatcctgctgggggccggggccggtgtcatcgcctccacggtgaaccccttcgccaccggcatcgccgcaggcttcgccggggtctctctgggagagggccttctctggcggctcattcagttcgtgatctttgagggtgccgccatctggtatgtctccgcctacgccgcccggataaagcgggacccaagccgctccgtggtgggcatcggcgcaggcaggcttcacgcagacgtgggccgcgtccaacctctcacccggcgtcacgccgccatcctccttatttttgccgccaccttcctcaccatgatctacggcgttattccctttgatgaaatgggcctgcccctgccggtcttgggctggtggttcccggagctgtccgctctgtttttagtggcgggcatcgtggtggggctgatggaccggctcagtgaggtagaactggcggagaccttcgtctccggctgcacggatcttttgggcgtggccttcatcatcggcatcagccggggcatcaccgtactgatgaatgacggccatatcaccgacaccattcttcactggggagagacggccctctccggccttggctccacctccttcgtgctgctggtttttttgatctacctgccgttgtccgtgctgattccctcttcctctgggctggctaccctgtctgtgccggtggtggctccgctgggacagttcgccggggtgggcggcgacgtggtggtgacggccttccagtccgcctgcggtcttgtgaatctggtgacgcctaccgctgccgtggtgatgggcgcgctggcgctggggcgcatcccctatgaaaaatggctgaaattcgtgtggaagctgatgctgcttttcctgctgctgaccggcctattgctggtgcttgcagccgcgctgtcctgatcggaccgccgtgccctccggggcgcggcggttttttcgcatagcaccgtacgccgccgcatagatatggaaacggacaaacacaggaggcgtcgctatgaagaaatgtttttttgccttggtcctgccgctggccttgctgctcaccgcctgcggcagagaaccgagacccgccgctctccttttaggacaggctgcggacttaaacgaatcggaacccctgttggtgatcgacggacagaacatccccgcgtgggaatacctctattggctggcactggactgccgccagatggaggaacgctgcgaagccgccggagaaccagtggactggaccgctccgctctctgagggtggcacaccggaggatctggtaaaggccgatgcgctggcggacacagccctgtatgctgccgtggggacctgggcggcggcatacggctgcacgctgacggacgctgagcggaacgcacttccggaacggcactacgcctatctgacgctggagcaggggcggcatctgacggagaccggtgtgcaatatgccaaattatacgccctctacgagacccccggcagtgccttggctcccgcggaaaacgagctggctctgtttgaacagcaaactgccccgctgacggcagaacggctcctgatccccttcgagtctgaccgagaagccgcccggcaaaaggcagcggagctgttcgcacatctgaataccgctgcggatccgtcagccgcctttgacgcgctgctggcagagaccggaggcgcattattggaagaagcggattggacgccctcccttcaggatgcggcggccgctctggaaccgggacagttttccggcattatcgagaccgaaaacggtttcgtcatcctccggcgtctgcctgcggaccgggatgctctgcgggaagcctacttcgacagcctgctgcaaagtgccgctgacgccagcgagatccgggtcacttccgcctatgaaaccctgcgtcccgccgccttctggaccgcactgaagcaggcctccggctgaggtcattttttacattgttaaattttcgtcaatttagacgaaagtcacaacagttttgtcaaagatttaacaaaaattcgtgaaatacaagattatcgttgacgggggccttaaaagcgcctataatttcatttgcagaggtggaaaacgagtgcgtttgccaaaaaattaacaagcatctctgcccctgttgctataatcctgacggacttttccgtctaaaaaaacacaaaacggaggatcaacatgaaagaactttatgtcgtaaattgctgccgtaccgctatcggctcctttggtggctctctgaagaacacccccgccgtggacatgggcgctatcgttgtcaaggaagccttgaagcgcgctaacgtcgctcccgagaacgtggacgagctgatgttcggctgcatcctcactgccggccagggccagaaccccgcccgtcaggtctctgtgaaggctggcatcccctattccgttcccgcttacaccgtgggcatggtctgcggctccggcatgaagtctgtcatcgagggcgcccgttccatcctggccggtgactccgacatcgtggtctgcggcggcaccgagaacatgagcgctgctccttacaccctgcccgacgagcgctggggcgcccgtatgagcgacaagaaggttgtcgacgagatgatcaaggacggcctgtgggacgctttcaacaactatcacatgggcaccaccgctgagaacatcaatgatatctggggcatcactcgccgcgagcaggatgagttcgccgcagcttctcagcagaaggcctgcgctgcccgcgactccggccgtttcgatgacgagatcgttcccgtccccgtgaaggtcaagaaggagatcgtggagttcaagcgcgatgagtatcccaaggagggtgtcaccgctgacagcatcgccaagctgcgcggcgctttccccgtgggccccgagtcccccaatcccgtggttgtgaacacctttgagcccaccggcattcaggacgccgaggataagggcacgccccgcgtgaccgccgccaacgcctccggtatcaatgacggtgctgccgctatcgtgctggcctccggcgaggctgttgagaagtacggcctgaagcccatggtcaagctgatcggctggggccagggcggtgttgatcccaagatcatgggcgttggccccgttgtggcttcccgcgctgctatggctaaggctggcgtgtccatcgaggacatcgacctggtcgaggctaacgaggctttcgctgctcagtccatcgctgtggcccgcgagctgcactttgacatgagcaaggtcaacgtcaacggcggcgccatcgctctgggccatcccgttggtgcttccggcgctcgtatcatcgtcaccctgatccacgagatgatgaagcgtgaggacgctaagaagggtctggctaccctctgcatcggcggcggcatgggtactgctgtcgtggtggagaaggtctaagctacattctgcatccccaaccggggccgcgcaaagcggccccggttttttgcgctgctccgcctcctttctcttgcatgatctccattcctttgctataattaggaatcattactgcaaaaaagaggtgagtgagcatgaagcagcagcgcaacacccgtcagcggcagctggttttggacgtggtccggggccgccgggaccaccccactgcggagcagatctaccagagcgtccgggagcaggatgcccatgtcagccgcgggaccgtctatcgaaacctgaacctgctctgcgacaaccgggagatctatcgggtagtcatgtccagcagcgaccgctttgacctccggaccgatcctcactatcatatacactgtctggtctgtgacagtgtggtggatgttccctacacctatgactgcgcctatgacgaaacgctggagcaggaaaccggctaccgcgtcctgtgtcatcacatggtggtagagggcgtttgccctgactgccaacgttccgaaacgggctctgtgcaataatttctctactcgctaaaatccaacgggtcacggagtactttccgtgacccgctttttcgttggacgccgctattcgggatacaggccagttcgctggcagtgcataaaaaagagccgcccccaaggggcggcccaaacgggtgggatattggaaagcttcctcgattatggtagcacgaactggctctattgtaaatgggagcttttgtcgaatgctgccccctttcgtcgctttaaaattttttgtgaattttatacatttgcatctggtaaaacgcagaggaatgtgatatgatttgaccatagagagggccccatccctcttccacgaaaggagcgagcattatgaagtatacttacgcatgcaagaaagttcccctgaatgactccattaaggattacgccgaaaagcgcgtggaaaagctggaaaagtatttccaccgggaagatgcgtccgccttcgtgacatttactgtggaaaaagacaagctgtgcaccgtggagatcactatccgggatggttccactctcctccgggcgcagaccacagaaccggatggggatatgcgcggtgccattgacgccgccgtcagctatattgagcggcagatcctgaaaaacaaaacccggctggctaagcgcctgcggtccgatgccttccccgccgtccctgtggatgacttctccgtggcggaggaatcggagttccacatcgtcaggaccaagcgcttctccgtgaagcccatgagcccagaggaagctattttgcagatgaacctgctggatcacgatttctatgtgttccgcaacagcgatgatgacagtatctccattgtctaccaccgcaagaacggcggctacggtctgatcgtcaccgacgaggaagaataaaatacaaacagggcgcctctggcgccctgtttcagcgtgccgaaaaagtcttttcgccccgctgaacaagttttcagaacttttataaagttctgaaaacttaggatttcaaatgcgcagaacactcttcttgggtttcctgcacacactcttcctcaccgttgcggaatgtttaccatcctgccaacagcctcagacagggcgccaaaaggcgccctgtttttcatgtttacaagatgactgtgagccgttttgaaacacagcggacacggaattcagtcccgcttcatagaataaccttactggtggtccacctcgtacatgtgggccatgaggtccagcagcttgctggtgtagccccattcgttatcataccatgcaatgagcttcacgaaatcgtcatccagcatgataccggcagtctcgtcaaagatgcaggtctcggaaaagcccgtcaggtcggatgagaccacctgatccgtggtgcaggtgatgatgcctttcatgctgttcttggctgcgttccgcatggccacgcacacatcgtggtagctggcgggatggatcagccgggcggtgagatccaccacggacacatcgttggtgggtacacggaagctcatgccggtcattttgcccttcagttccgggatcacctgacccacggccttggcagcaccggtgctggaggggataatgttgcccagaacgctgcggcccgtccgccagtcccggcctgcacgggagtccacggccttctgcttggcggtggcggagtggatggtggacataagggcctgccggataccgaaggtatcgttgatgaccttggtcatgggggccagacagttggtggtgcaggaggcgttggacaccacgttcatatccggggtgtacttcagatggttgacgcccatgacgaaggtgggcatgatgtcatccttggaaggggctgagatgatgacctttttcgcgccgttctgcagatgggcgctggccttttccacggtgttgaacacaccggtggattcgatgatatactccgcgccgcagtcatcccaggggatctgggaagcatcgctctcgctgtagacccggatcttcttgccgttgatgatgaggtgccggtcatcgtgctccaccgtatcccggaaagtccggaacacggagtcgtatttcacctgatagaccatgtaatccagatccgcattccgcaggttgatgccgcagatctgataactgctgctgccacgctccaccatgatccgcagagctacacggccaatgcggccgaagccgttaatgcctaccttgatcgccataaacagatccctcctgccctttaggcgttgatttgttgctttcattataggcgcattttctaaaaggcgaaatggacgatctgtaaaattaaatctgccttttccaacggctcttagcccctttgcatagcacatcgtttaccacatcgtttacttgtgaaaagttaaattatttcaaatttccgacaaaattcttgttttcttcctaaatttttgatatgctgattgataccatcccgcattgggaaatgttttcctggtgtaattttcactctgcggcttatgatagttttgatgcaaaacagaaagtgaggcactgttatggagcagcacgggaccgaggcagctctgctgccgaacattgccaaccaaatgcgcagcctgctcagcaatctgtacctggcggcttctcaggtcattcctccggagcagcgggagcaggacccagccttggacgccaaggccgccattttggagcaaagttttttccggctgctgcggctggtcaacagtatgtccgccgcagagtatctgtcagacagccaaacgctgtctctgcgggacgctgatctggtaaagctggtctctgaggtctgcgagtcctctgcggatctggcagaacagttgggtattcagttgaaatttgtctgcgccatggatcggcgggtctgcgccattcatcctgccgccgtggagcagatgctttatcacctgctttccaacgcgctgaaatttacacctgccggcggcaccgtcacggtggaactgaaaaaaagcggtgaaactttgcggctgaccgtcagtgacaccggctgcggcatcccgccggagcggatggcccatctgttcgacggctgtttccagccgggccatcccactcctgcgccctatggcttgggtctgggccttcctctgtgccgggccatcgcggaaaagcacggggggagcatcaccgtggagtccgcccccggcaagggcagccgctttatggtctctctgccggaccggcagttgggcagccagctttccgacatcccctccatctacaatggcggcttcagccgcccactgctggggttggcggacgcgcttccctccgatgcgtttgccgtgcggaatctggaataataggcgaacgaaaatcttaccgttttatcgtaacctcagaaaagcggcgcaaagccgcttttctttttctacacgatagctcttttaataccatttggcatatctattcggcataatacgatctggaatgtgcattgacgcataggaggcttctatggcacaggtatttttgggaatgagcggcggggtggacagctctgccgccgcggtcttgctgcaagcgcagggatacgccgtcagcggcctgcatctgtccctgttaagcggtctgcctttaccggcagaccgccttccggatgacggctccgacgcccgggccgtggcatccctgctggggcttcccttctacgatatggacctctccccggaatttcgggcaacagttatcgactatttcatccgggaatatgaggcgggccgcacgccgaatccctgcgtgttctgcaaccggaggatcaagttcggcgccatgtgggacgctgcccgaaaactgggggcggactatctggccaccggccactacgccaaaatccgacaggatcctgccaccggccgtcacctgctctgccggggggcggaccgctccaaggatcagagctactttctctgccgtttgacgcaggagcagctttcccggacgctgttccccttgggtaatctggaaaagtcggcggtgcgggccttggcggaggctcacggcctgatcaacgcccaaaagcgggacagtcaggacatctgcttcgtgccggacggggactatgtgggcttcattacccgctgcgtgggacacgaatcccccactgggccgtttgtggaccgggagggccgcgtcttaggccagcacaaggggttcatccgctacaccaaggggcagcacaagggactgggtcttgccatcgagccgccgctgtacgtcctgcggaaggatccggcggaccacgccgtctatctgggtcacaatgaggacctgttcacctcagagctgattgccggggactggaactggatctccattcccgctttgaccgcccctatgaccgtcaccgtcaagacccgctattcccagcgggaagcggaggccgtggcggagccgctgtccggtgggcaggtacgcctgcggttccgggaaccccagcgggcagtgacgccgggacagttcgttgtcctctatgacggagacgccgtggtgggcggcggcgtaattctggaatgagtttccatcatgctttccgtttctccgggcatactaccctcagaccgaaaaaggagtgacggagtatgaaaggttgtgccggattttgggtcggcatgagcgccggtctgctggccggcgccgcaatgggtatgatgtcgccctacggacgggcccccatgaaaacacaggtggggaaaagcatccgcaagctgggtatcgcggtggacaacgccgtggacaacattgtatccgatctgcgctgaacaaaaggaacagggagggctgcgccctccctgttcctcagcgtgtcgaaaaatccttttcgccccgctgagcaggttttcagaaccttataaaagttctgaaaactaatgattttaatgacgcaggacacccttcttgggtttcccgcgcacacccttccttaccgttgccgaaaattttccgctttatcgacagtcaccgccccgccgcgtttttatgcggcggggctgctgtatcatttcttatccttttctgtatacaggcagcgcatggcgttgagaatggccaaaaatgccacgcctacgtcggcaaacacagccagccacatgggagccctgcccagcgcgcccatcaccagaacgatggctttcaccgtcagggcaaagacgatgttctcccgcacgatccgcaccgttttgcgggcaatgcggatggctacggcgatcttggtgggctgatcgtccataagcacgatgtcggcagcttcgatagccgcgtcgctgcccagaccgcccatggcaatgccgatgtccgcgcgggtcagcaccggcgcatcgttgatgccgtcgcctacaaaggccagcttgccggtctcctgcttcagcagctcctctacccgcgtcaccttgtcggcaggcagcagctccgcgtggtactcgtccaatcccagagcgtccgccaccgtatgggccacttccttggtgtcgccggtgagcatgactgtctttttcacacccatagccttcagttggacgatggcctccttggcgtcgggcttgggctgatccgcgatcacgatatgcccggcgtagaagccgtcgatggtcacatggacgatggtgccgggcagctcacagggcagccagttgacgctctggcgctccatcaggcggctgttgcccacgccgacgcgcttgccgtccacctccgccatgatgccgtgtccggcaatctcctccacgttggagacccggctgcggtccattccgcttttgcaggcctcccgcagagagacggcaatggggtgcgtggaatactgctccgccagagccgcgtattccagcacctgatccgcttcaaagcccacctccggatggacggcggatacggcaaaggtgccttttgtcagggtgcctgtcttgtcaaacaccacggtgtccgccttggccagcgcttccagatagttgccgcccttaaccagaataccgcacttggaggcgccgccgatgccgccgaaaaagctcagcggtacggagatcaccagcgcgcaggggcaggagatgaccaggaaggtcaacgcccggtggagccaatccgtccagacggtgcccgccagaaatccgggaagggtgggcagcatcgccagtaggaccgtagggatcaggaacagagccagcgccgcatataccacacagggggtatagtatttggcaaaccgggtgatgaactgctcgctgacggctttcttttcgctggaattctccaccagctccagaattttggaaaccgtggattcctcacagggctttgtcaccgtcacccgcagcaaccccgtcaggttcacgcagccgctgatgatgtcatcgcccacacggatgcttcggggcagggcttccccggtgagggcggcggtatccagtgtggaactgccctctaacaccgtaccgtccagcggtacccgctcgccgggcttcaccacgatgacggagccgacggccacatcctccggatccaccgtttccaagccgttttccgtttccagattggcggtgtccggacgaatgtccatcaacgcggcgatggaggtccgggacttgcccacggcataatcctgaaacagctcaccggtctggtagaacagcatgacgaacacagcctcgtcaaactctccggtagcgtaagcgcccacggtggcaagggccatcaggaagttttcgtcaaagacctgcccattgacaatgcccagtgccgccttccgcagcacatcatagccgatgatgaaatacggcgccagacagcacaggccccggacccagccggtaaggggcagcagcttgacaagaaccagcagagccgccgcaatcagaatgcggttccgcatttttctttgctttttggaaagggtcgtcatcgtatcctccttttcgggaccaggcgaagcgccgccttacggcagttacgctccgaaacgcgccagcggcggcggttcttacaggtgcagttcgcagtccggctcaatcttcttcgcagtggccacaaccttttgcaggatctcgtcaaaacgggcgtcatcggcgtccagcgtcagcttctgggtcatgaagctcaccgtggcgttgttgacgccgtcgatcttcttaatggcatcctccaccttggcggcacagttggcgcagtcgatttcgaacttgtaatgcttcttcataatagcttcctcctgattttatatttatgagaactgaattggaaatcaaaaattactccagaatatgctctaatccctgatcgatgatggttttcacatgatcgtccgccagagaataaaacaccgttttgccatcccgccgtgactttaccagccgggcgtttttcagtgccttgagctgatgggaaatagcggattgggtcatccccagcagcgccgcgatgtcgcacacgcacatctctgcctcaaagagcacatacaggatacggatgcgggtggaatcaccgaagatccggaacagttctgtcaggtcatacagggtatcttcccctggcatctccttttgtactctctctacgatctcatcgtgggcatgcatgaattcacagcactccacgttgtagcggtcctccatgattggcctcctttcgcatgaatgtctgctcatatgttcatgataacacgtattagccgtttgtcaaccccgaattcaaaaaaagagtagaaatcagagaaaatatgtgatacactcaaaaagtagtacaatagaaaggtatacgaaaacaaaatggacgaaattacaattgaaatgtttaaggacaaagagcgcaaaaatctctttgccacttacaaccatattgagatggtcatggtagaggaagaccacgccgtattccggctgaatatccagccggagagcaagaactcctacggtatggtccatggcggcgccatttacgccatggcagacaacgccaccggctttgccgcccacaccgatggccgcaattacgtcacgcagaccagcgctctccacttcctgcgcaaccagtctgagggtgagattcaggccgacgcccgggtaaggcaccggggccactccacttgcctggtggcggtggacattctgggtgaggatgagaaactgctggccaccggcgagtttaccttcttctgcgtggacccggagatcatggcccgcaaggtgaaaaaggcataaaacccgaagcaactaacaaaagcggaacggagagcttctccgttccgctttttcattctttttacgcttgttttttcaatggcatagtgaagataaagcgggtggacgccgcatcgctctccgccttcagtgcgcccttatgttcccgggcgatggtgtccgcaatagccagccccaatccaaacccggatttttccccacgggaggcgtccgcccggtaaaatcgctcaaacagatgggccagatgctccggcggaatggggtcaccgggattggaaacggtgagtcgggcctgccggtccgtcttttccagcgtcaaggtgatatggccgccctccgcgccgtatttcacggcattgtccagcagaatggaaatcagccgccgcagccggtcagcgtcccccaccacggtaacgtccgccgtgatccgctcctccaagggctttcccgcctcaaaggccaccggctcaaaggccagcacgcagtccgtggccacatcggagaggttcagcggctccatggcggcaggccggacgccattgtccgcccgggccaaggtcagcatctgctccaccagagtgcgcatctgctccgcctcggtatggatgttgccgctccaccgggcaggcttttccgcaagacctgccccctccagcagctccgcgttggagaggatcaccgtcagcggcgtcttcagctcgtgggaggcatccgacaaaaactgccgctgctgcttccatgccttctccaccggccgggtgacccagcgggatgccgctgccgcaatgcccagcagcaccagcatagctcccagtgcgatcagcaggtaggaacggaccagccgccgcagcaccgcctgctccatggacatatccacaaaggccagtttccggtaaaggccgttgtccatggagaggtagcggagatggtactcgttgaccgtcccctccgccgcttcctgctccaggcattggctgagaatgtcccgcagggtatcggtattctccaaatcggcataggtaccgccggtgatataggcggtatccccccagatattcactgtgaaataaggcagcagcacccggtccccgccgatctcaatggtggggttgggcacagcgccccggccgctgtcctcccgcaagacctgatacagcatttggcggctgaggtcctcaatattctgccggacggcgtgataggcggcgccgaacaccgccgagagcaccagggccaccagccccatgcacaccgccacgaatttccagcgcagtttccggatcatgacaagtgcctccccttgtcgaaaagtctgtggaaaatgttgaaaaagctgtggaaaagtcgaatagtcaggtttcctgctccaaccggtagcccaccatgcggatggtacggatctttaccttcgagtggaggtagtccagctttttcctcaaaaaggaaatgtagacctccacattgttgtcctcggcatcggattcatacccccacagcttgaggatcagattctccttggtgaggaccatttcccggctccgcatcagcagctccagcatatcaaattccttccggctgagccggacagaccgctctccgcagctaagctgaaaggtatccgtttccagccgcagatcgccgtattccagattctgagaggcccgctgctccggctgacgccgggtcagcatccggacgcaagccagcagttccttgggttcaaagggcttggtgaggtagtagtccgcaccgcagtccagcccctccacccggtccgcaagctccgaacgggccgagagcatcagcactgggacggttttccccgcctgccgcagcgcccgcaggacggaaaatccgtccttcttcggcagcatcacatctaaaatcaccagatcatagatgtcggacaaagcgttatccaaaccgctttccccgtcatgacagatgtccgcggtatagcgctccagctccagcaggtcccggagggtctccgccaggcggacctcatcctccactatgagaacacgcatcgttcttccctcccgtcaggacgcttcctccattccctgataggccagccgcatcatggggtccagcagctccagctccatgaggtagatggccggctcgtccccgaagcggacgtagcggccggtgccgcccatattctgagttccgacgttcatttcaaaaatgccctcaatgccggtggcggtctgataatgcaccgtcagcgtcacagggtcctgaaaaccgcagaaggtcaccgcgtcatcagagggacggaagtccacacattccgccactttcaaagccgccagatcctccagcagcgcccgcagggacggggcatcggtaatgttggccccgccggaacgccaggaaacggcggtgctgtcatcctccgcatgggtggcagtgagcacagtggaattccggacctgagtactgttcccttccagatccacctgctccaccaacggtccctgcaactggatggacgtgatggtgctctccgtcaattccggcagctccggcaggcggcacatctggtagatgggcgtctgcatggcctgacgcagcgttcccgccagaataaaaacgtggtccgggtcgctgttgatagtcgcgtaatagctggttccatcggtggtggcattccccaaggtaacggtcagcaccgcgtcatccggagctgtggccgtcaggctcacatccggggcatccaatccgtacaccgacaggtcctccggcatatccaaggtctgctggggcttgagggtctccaaaatcgtcagaatggacttgacgttggtatcgtccagcgggaagtccggctcactgtcccaggtccagacgccgttctcattcagggagaaggacagcgttgtggagccattgctgtaagacagggccacatattcactctgggctgcctccgcgatgtccgacggggaaacggtgttctgatccttggcagcctgggccgcccggtagcggatgctcaacacgacgagcaccgcagcgcacagcaccgccagaatgatgctcagaatcgtgatcaatcgtttttctttccagctcatgaaagcctccttattgttgtatcacgccggttttcggcgaaattccacattgtgacagaatattataccacgcatccgcctgtgggacaagcggaacctgtgtcatcagaaacatggttttccgcaaaaatttcaaaaattcaaatctgccctcttgacaattccccattttgtgttattgtattagttgcttaacacaataacacgaggaggtggctcatgaactggcagttttccaatgatgccccgatctacgcccagctcatcgggcagatccgggccggcatcgtctccggtgcgttctcgccgggagagcggctgccctccgtgcgggatctggctatggaggcgggcgtcaaccccaacaccatgcagcgggccttgacggaactggagcgggacggactggtgtacagccagcggacctccggccgctatgtaacggaggatcagacggccattatggaggcccgccatgcactggcggcggaccgggtgcggtcctttctgaccgatatggagcgtctgggatttgaaaaggaagacttgctgtcgctgctgcggcaggagtcggaaaaggagtgaacatatgccgattttagaatgtaaccagctctccaagagctacggcaaagttccggcgctggatggcgtcagctttgccattgagccgggccggatcgtgggccttttaggtcccaacggcagcggcaagaccaccctcatcaagctggccaatggcctgctgacccccagcagcggggaaattttgatcgacggtaggacccccggccgggagacccacgccatggtcagctatctgccggagcgcaccgccatccccacctggatgagcgccggtcagctcatggatttttacgaggatttctacccggacttccgccgtcaggctgcggaggagatgcttcaccatctgaacatccagcccaagcagcggatcaagcagatgagcaagggcacccgggaaaaggttcagctcattatggtcatgagccgggccgcccggctgtatctgctggacgagcccatcggcggcgtggaccccgccacacgggattatattctctccaccattatttccaattataatcccgacgccgccgtggtcatttccacccacctcattgccgacgtggaaaaggtactggatgaggtggtgttcatcgaccgggggcatctggtgctgcagtcctccgtggatcagattcgggaggaaaagggcatgagcgtggacgcgctgttccgggaggtgttcaaatgctgaggaagttgttgaagcatgagttccgggccaccggccggatcatgctgcccctgttcggcatcctgctgctggtgtctgtgggtgccaatttctccagccggggtatgctgaattctgacagctccctcctgcgcacgctgggtaccatcttcatcatgctgttcatcgtggggatcttcgccgtgggaatcatctcttttgtgttgatgatcaaccggttttacaaaaatctcctacaggacgagggctacgtaatgatgacccttccggtatgcgtccaccagcagatctggagcaagctcatcgtctctaccgtctggttcgccgccactgttgtggtgatcggtctctcctgctgcatcatggcctttgatatccgcttcgtgggtgatctgtggcacggcttcctgaatctgctggactacgcagtccggataaaccacctggatctggtggccaacggcgcggccttcgccgtggaactgctgcttttgtgcgtactgggctcttttgccctgtgtctgcgcttttattcggccatgtccatcggcttcagtttccccaatcacaaggggctcctgagcgtggtattctatatcggaacgggcatcgctctccaaattctgggcggcctcggcatggcactggtgaacgattcctggttccaccggcttctgctgggctgggagcccaacgtttccgttgtggccggtatgcatctgggtatgtggttcctgatcgttctggaacttatttactgtgccgttttctatttcttaacggtttacttcttgcaaaaacacctgaatctggagtaaactatgatagccgatgccccggcggtcacacgccggggcaatttttatgcaagggggacctcatggccttttgggaaaccgttctgggaaagtacattatgaccatggccatcgccgccgttccggtggtggagctgcggggcgccatccccgccgggatcgccgccgggctggacccgtggctggcctgcggcgctgccatcttcggcaacctgctgccagtgccctttatcatcctgctggtgcgtcaggtctttgaccggttgcggaagcacgccttcttcgctccgaaaattgatgccttggagcgccgggcccacctgaaggggcgtctggtgcggaaataccgtctgctggggctgatgctgttcgtggccatccccctgccggggaccggagcctggaccggggctctgattgcggcctttctgaacatccgcctgcgccacgctctgcctgccatcacgctgggactgctcattgccggaagtctcgtgaccctgatgacgctggggctgatccacctgctctgacacggcttgccccgttttcaactgcaggatcgcttttgatctgattccgccaagcaacaggccaggcatccattttgggtttcccgcgcacacccttccttaccat

SEQ ID NO: 12172 - DNA, 473 bp, Unknown
  gut microbiota DNA sequence
atgatggtcacaatgggcttccagccgcccagaccgatgggggtggaccgtccgcccttgccgccgatggtggcgtaggacttgcgggcgccgatgagccgctggttgatgaacaccgacagagaagcgatgcagatcatcaggatggccatggcgaaggccgtctgcgtgttctgggacttactgttggaatacagctcgctggacagcgtccggaagctgacgggagaacccagatagttgatggtgccgaaggtaccgatggccttggagaaggtcaggatcaccgcggaaagcatagcgggcagcaccagaggcagggtgatcttccgcaggatcaggggcttgctggctccctggatctcgcccatctcctccagctcggagttgatggagttcagtgctgcggacaccagcagatatgtatatgcgtaatagtggagcgtcagcacaatgatgatcgccagacggcc

SEQ ID NO: 12173 - DNA, 643 bp, Unknown
  gut microbiota DNA sequence
accttgtgcggcagataaggttcatagttctgccgggttatcgatggccggtaatgtcccaacatccgcgccagttccttggtttccatgccgttccgcagagatagaacggcgcaggtgtgccggagatctgtgaatcggatatggtcaagccccgcttctttgatgatctcatcgtgcatccggcgcaccatctgcggcgagtaaggtttcagcgtggccgggtgcataaacatgagcggactgcttgggtgcttgtcgtgttccctgattaggaggtcgattacctctggtgtcagtgctatcgtccttgtctgactgccgtactccaccagctctcgccgtaccacggcacggttttctgcgatggtcagcgtccaattttcgatatcaaggtcgctccatttcagggcgattagctcgccttggcgtaggcctgtcgtcagtgccagcatgaacatggggaggtagcccagccgctcggcggcgtccagatagtcctccatctccagcggcgtcagcacatcggcattgaccttctttggcttggagtagtggaacgctctggcgggattatcgctaatcaggccatcccgcatggcttggtccaggcattgctgaagcaggcggtggatgtgccgca

SEQ ID NO: 12174 - DNA, 3531 bp, Unknown
  gut microbiota DNA sequence
atatcgtaaacatggttgttgttcatatctgaaccctccgttatttcgccaaggctccctgaatgaagcggtcgatctccgcctttgagccgggcgcggtgatggaatccacggcctttccgttccggtacagcaccagtgtcgggatcacctcgatcccctcggcccccgccagccgcggctcctcgtcaatgttgatcttgccgacggcgaggctgtccgcgtattcctctccgatcttctcatacgcggggccgatcctccggcagtagccgcaccagggcgcccagaaatccaccaaaacgggcttttcctcccggatcgcctgctcaaactgttcctgattcatattcatagctgccatatctgccagctcctttcctttgtttgggtatagtataccgcatgacaggcggttctactgtgacggcgtcacataatttgaaaaaatcggcgcggcacccgtcggggccgcaatccccacaccggcgagaccatcgagatcgccgcggcgaaggtgcctgccttcaagtccggcaaggccctgaaggataccatccagtaatttcatagcgaatagcagcaccactcggacggtttttcgtctgagtggcgctgtttttttcagcagatttggatcggcgctccggggcacggttactgaaaacaattctagagacaacatccattaagtcgcatcatagaagcaacattcatccgagacgagcgggcaacagcttttcatcccgcgcttcatttgtgtataatccgcctttctgcgaaaggcaccgacgtggttatgaaacctgcggcctttcgtacatttgcaaaatttgttacaatatccacggagcgttcggtacactacagaacccgtggaggtgagtggtggggctgtatagcggcaaccccgcatttctatatggcgtcggtcatccgttaaggcatcaacgaatggcgcaaacaagtagcccgtaaacttatctctttcaaatcgactcgattttgccggatgaccagtcactgccgaatctttccaatctatcttgggaggtatatgtggcatttaagattttccgcaaaaactgctgtggactggatgttcacaagacttggatttacgcctgtatgggaattactgacacaaatggacgtacagagtataagcaggctcgcttttcctcctttacaaaaggcttgcagaaactggctgactggcttgccaaatacgactgtaacgatgtttgtatggaatccaccggtaagttttggataccggtgtttaatatccttgagaaaacctgctgggtaactttggcctatccaaaatacacgaaaccccaaaagggcaacaaaaccgaccataaggatgccaagtggatttgtgacctgtatatgtgcgatatggtcaacccaagttttatccctccgccggacattcgccagttgcgcgacctgatgcgctatcgttccaagctcactaatataatgaccagtgaaaagaaccgggcattaaattgtctcaccgtttccaagttgaagctggatgatgtgttttctgacgtgtttgggaaatcctcacgttccgttatccgctacattttagagcatcccggtgagacctttcaggttgccccgttcatcgacagacgttgcaagcaccctgttgaggaaattcaggccgttattgatggcactatctcccaccaacaagccgtaaagctcagagaatgtttgcagcacctggatgagctggaagtccacaaaaccaatgtagaaaaggaaattctttgtctggttcggcagtacccctatcagttggaactgcttcagactgtccccggcttttccggaaacattatgaccgccatcgcactgatctcggaaatcggtgccgatatgtcggtgtttccttccgcaaagcatctggtttcatgggcgggctgctgccctcgcaacgaccaaagctccaaaaaggtcaagtccactcgcatttcccgtgccggtgtgtacttgaagcccctgttggtacaggtcgctatccaaccatttaccgccaatgcggataagctttccgccgcaggtgcactggaaatacggtgtcagatatgtgatgggagatttctctccatgtgggcggcgcttttcatttttctcggctgtcctctgccgccctgcccgaaaaacctccatgtccacaatggccggatagtcatcctggccagtgtagcgtggattttctaagagacgcttcactttatgcttattccaaagaggaacttcctgactgtatgggatatttccttgattcaatgcatcggaaatgccctggtaggaagccccggcattatagagggtaaaaattcggttcaccgtctgttgttcttccggtacgatttccaatataccgtttcgaattctgtacccatataaaatttttcggttgatcatcttgccgccacctccaattgttctgccagttctaaaccaccacaaagccggaagcggatgcgtgtctgggattccgcgatgaccttctccaccaagctgtcgaacaagtcctcatcgaagatgttcatctgttccggcccattctttatgacagctgtcatcttgcgaatggcatccatggtttcatccaaggcctcgttttccgacaaccagcggcgttctccacggagttgagtcagtttggcgctgatggcattcatgcggacggcgcaggcatcggcatccagcaagccgttagcccgcagggtgctgattttatggctttcttccgttgcttccgcaatcgccttgttaatcatcagcattttgggattattttacctgtcccgcgttgttctttccgacgaacacgcagttgtgatgctcggcgtcctcatacagcaggccgctgttcaaaaactgacggattacctgtggagcgatgccgcgcttgtgcaggtaggcaaacaccctgcgatcatccgtattccggggcggcagggtaaggggcttttgcgcctcatcccgcttgacaaaaggcgccgctttgataggggagtctctggccctgccgtgaaaggccagcaggtactccacagcctccgaaaagctcttgccgtagaattgctgcaaaaaggtaatggcgttcccgccggtattctgcgagtatcgaaaccacttgcggcggtccttgatccgcaggctgtccatttccgctgtggtatggtatctgccgattcgccgcacctgatagcccaaatgggtcagcagctccggcagatccgtttccttggcgatctgcatttctgtgtctgtgaagcgtcttttgatctcgcttgccatagtgatgacctcctttctggcgaaacgcaaaaagccacccagggcatccgagagattcggatgccctgggtggcttttccctaaatcgtgttcttttgtttgggctttaacgcgggcctacacggcgttatcttcgtgggggtgtccgtgcccgctggagcggtcacgtcggccacacggggcgcgacaggggcctca

SEQ ID NO: 12175 - DNA, 1105 bp, Unknown
  gut microbiota DNA sequence
ttcttcactttggctttcccggcatccagcagatgacgggcttttgccggggagcagggcatcagcggacgcccgtgcttgttgatgacatacactttgtttggcatgatgccttcctccttcttctttgattgttgctaacgaaaaagccacgcggcctttcggccgtcaggtatccgtacccaatgttatctcaaggttttcgtgtgcaacactgctccttaccctcagagcttttaatcacacaccgcagtgcggcaggttcggattcacgcccaccggtgcctattcttacattcttgagtaacgtagtgctcgaaacacttagggtagtcaatcagggcttacgatttctcgcaaaacccctccaaatcgttagatttggtgggggttattgacagcgttcctttccccggagcctgtgcccggtcgagaaatagttgcagatacatctttctgattggatgatagtacatccagttttccctgtcaacaaaaaactggcttgcagccccctctttttccgatgttgcaaattgttcataatttttttcttgacattgggaggggcgtccgctattatatagttcaattcttttagttaaattattttaagtaaatgtttttaactaacaagagccgactttcaccgaaacaaggagatatatcatggaatttgaaaaagtgcgtgacattattgtcgagactctgggctgcgacgccgaagccgtgacccccaccgcttctctggctgacgatctgggcgccgattctctggctgccgtggagctggtcatggccctggaagaggccgtcggcatctccatcgccgaggaggacgccgccaacctgaaaacggtgggcgacatcatgacctatctggccgctcacaagaattaacgtgcgtccgccggagggtacagaccctccggcggtccagttttgcgaggaaaggatattccatgaccaatcaagaactgaacgacctgctggcccgcttcgagggaagctccctgtccaagctgaagctgtccacccaggaatttaccatagaaatggagcgggccgtctccgctcccgccgcgccggtgatcccggcagcggc

SEQ ID NO: 12176 - DNA, 1223 bp, Unknown
  gut microbiota DNA sequence
ggagaatgcgatcattttttccatgatctgagagatgttcataaagaaagcctccttaaacttacaggttgaagcggcggcgggcctcctcccggagagagggcacccggcggacgatccgcaggggaatgatgagtcccacgcagaccgccagcacgatcagggaccaccccggctgccacacaccacggaaataccggtcgatgcagaattcaatgcccatcgccagaagcccagccgccccgatgatcagggcaatagcggagagggtggagcgccgcccgccccggagcagaaaactcaaaagaaagaccagcaccccagcccagccgatcatgggcagggccagcccccggaaccagcggctgccgcccaggtcgatggagatgagccagacatagatgccaatggccgccacatcggcggtgagccggaaaaagaccggcagccgccgcagcaccataggcagggcaaaccagacccacagcatcaccgccgccccgatgacgtacagggaccagggacggtccgtgggcagaaacaggttcaaaagcccgcagcacagggacacggacaccagcatagctgtcagcagaatggcggcctctcgcctggaggcgggctgtacggcggcggagttggcgggaaagtagggcggcgcatccagttccggatgccaggcaggcgtcccgcacaggggacaggttttggcgctggggtccagccccacgccgcagttgacacagtaagacataaaatgctcctcttatcggttgctctcgatccgcaccggaatgccctcccgaaccagaaagcggaaaaagtcccgctctgtgtccgtttcggcctgggtgccggcaaaggtgatttccatgatgtctccatagctgatggaggcgcagtggcaccggggcacggtggcctggcccagcaccacctccatgccctgaatatggggagccatctcaggcggcacggtgaaggcaccgggattggtataggtgcaggagtagggccgcacccccaggagatagtagttgagggccatcaccgggtttttcagaaacaccggcaccgcccggagaaagaaattcttcgtgaagcggacgttgccggtaaaggaggcctgcagctcctggcggtggacgtggagcttcatatagtgccgcacctgggagacgatttccggaaaagtgtaatcccccaaggcagggtcgatgctg

SEQ ID NO: 12177 - DNA, 20305 bp, Unknown
  gut microbiota DNA sequence
atgatcccgtcagcctataatggtacatcctgtccagccacagccgcaagcaatgggggcagctcggagagatcctcggaggggttagattcccgatgggcgctgccaggcgccggttcgttcaaccgcccgacggtccgggaagtagtgtcgaataggactgagcaaaagaactttaaaaaatataatgagggccgctccatatccgggtatagcaatatgcttccaaccaagacaggagcggccctctgttttatttctgagctaaaaggtgtgttttcaaaagcacattctctaaggctctatgatcttcatgtaactgccaccaacagggcttcagaaagcagagaacattctccgcccatcggtagtcctctggctgcagcgtttccgttgcagcgccaagctggaatgccgcgttgcgtctccgcacagagacatcaacgctggcccgatccagatataagttcagaaagccgcagacgatggcggcttcttccgttgtatagaacatgttttccctcccattccgcaaacaggcatcattgtaacacggtgcccttgttttgaaaatgggctgtttccacaagtttcctctcaaaagtttgtcacaaacgcttgttcgatttgcggtggcatgatatactgatagacactaaggacgaggaggcgcgctatgcagtaaaacggacgaacgtatattgccattgatctgaaatccttctacgcctccgtagaatgcatggagcgtgggctcgaccctctgaccaccaatctggtggtggctgacgccagccggacggagaaaaccatctgccttgccgtgtccccatccctgaaggcatacggcatctccggcagagcgaggctttttgaagtggtggagcgtgtcaaggaagtcaacgcggaacggcggcgcaaagctggctgcctttccgaaaagagcttcaacgccaatgaactggcggctgacccatccagagaagtagattatctcattgccccgcctcggatggcaaaatacatccaggtcagcacacagatctacaacgtatacctgaaatacatcgccccggaggacattcatgtctattccatcgacgaggtgatgatggatgtgacgagctatctgcaaacttatcgcatgaccgcccgtgagttggcaaaggttatgatctcggacgtcctgcacaccacgggcatcacagccacggcgggtatcggcagcaacctctatctctgcaaggtcgctatggacattatggcgaagcacgtccagccagacaaagatggtgtccgcattgcggcgcttgacgaaatgagctaccgtgagcagctttgggatcaccgcccgctgacggatttctggcgtgttgggcgcggttatgcaaagaagctggaagccatcggcatctacaccatgggagatgttgcaaggtgctccatcggcaagccgaacgaatactataatgaagaactgctctatcggatgttcggcatcaacgctgaactcctcatcgaccacgcatggggctgggagccgtgccggatggaggatatcaaagcctaccggccggaaacgaacagcatctgctccgggcaagttctccaatgcccatattcctttgagaaagcacggctggttgtacgggagatggcggaagccgtcgcgctggatctgttggaaaagaagctggtaacggatcagttgaccctgacggtgggatatgacattgaaaacaccgcaggcggcagttaccacggtgagaccgtgacagaccgctatggcagaaagatccccaagcacacccacggaacagcaaatctgccgagaaagacatcttcggcccggagcatcacggacgccgttcttggcgtttatgacgcaaaggtcaatccgaagctgtctattcggagacttaccatcacagccaatcggctggtgggcgaagatacggcacagcaggagccggaagccccggtgcagttcaatctgtttgacaacgttgaagtgcaggagcagcggctgcaggaggaagaagctaaactgaaacgggagcgcaagattcaggaagccatgctcgacattaaaaagaagttcggcaaaaacgccattttgaatggcgggagctatctggatggcgctaccgccaaggagcggaataagcagatcggagggcataaggcatgagcggacaatacgatgacatcattcgtctgccccatcctgattcgccaaaacatccacggatgtccctctatgaccgtgtagcgcagttttcaccctttgccgccctgaccggccacagcgctgccattgcggaaaccgggcggctgacggaccagcgcatggaactggatgagtacgaaatggcacgtgtggacgcggaattgcagcgcctccaggagctgcttcccagcaggcccacggcgtccatcacctactttgtgccggatgaacggaagaacggcggcagctaccgaactgtcaccggagaggtcaagcggatcgacgcggtcaacggcgtgatccagatggcggatcggcagtgtattcccatcgcggatgttttcagcatagagatcatcccataaagacaccataacgaaaactcccaaacccatttgtaaaagtgggcttgggagttttcattatagctcaaattaaatcaaaaaggaggaatccgaatgaatccaaacgcagattatctcggcattgtcaccatgcttcgcagcctgcgggagcagggtctcgtcagcggcagcgaagcccaaaaaatcgccgcgcggctgagggtacagcttggcgcggacattattatttctctttgatttcttcgcttttaggatagctattgcagatgttatatggtattgtgtgttgctgacgaaggaggtggcagaggaatgagtgataaggagaaaaccaacggttctctggcgatggctccgcgggtcattacgattccggcagcgaatcaggaaaccgcacgaaaactccgcgtggcagcgtatacccgtgtcagttccaactccaaggatcaagaacactcctttgccgcgcagaatgcctacttctccaaactcatcacagacaaccctgattgggagttggcagacatatatgccgaccagggcatcaccggcacgtccatagacaagcgggatgacttcctacggatgatggaggactgccgaaaagggcgcatcgaccgcatccttgtgaaatcatcctcccgcttcgcccggaataccaaggaaagtctggcggctgtacgggaactgaagtctctcaacatcagcgtctactttgaggagcaaaacattgacaccgcgcaggtgtccggcgaagttcttatcgccatgttcgcggcactggcccagcgggagagcgaggctatctccgaacgggtgcggtggagctacagagtccgaatgagcaaagggagattttccacctgcaaagcgccctatggctatcggctcgttaaagatcatttggagattcaagaggatgaagcgtcaatcatccgacatattttcgaccgttaccttgcaggtgtcagtatggagaatattgcaaaggaaatcacggcgctgggctgtccaacgcgggacggcactcaatattggcagttgacctccatccagtacatactgcaaaacgaaaaatacgccggagattctctgtctcaaaagaaatataccacacgcagctttcctcggcagcaaaaaatcaaccacggcgaacgaaaacagtatcttgtgatagattctcatcccgcaatcatcagtagagagatttttcaaaaggtgcaggaacttctgacacagagaagtgccgcgattcatccacggtcagatgtcccccacgctttcgcgcgtaaagtcgtgtgcggtcactgcggcacactctgcaaaaggaaaaattgtggtggctctgtaaattgggcgtgtcgcagacacgacaagtctatcaccgcctgccccaatacgcaggttccagaggaacagatgaaaaacgcattcctccatgtatattacaatcttaaacattatggaacgagcattctcacccaactcatctctgacctctacgccgccagaaccggcagtctcctctggagcgaaaacatcgtggagatcaacaaacaaatatcggatatcgccagtcaggaacgacttctggcccagctcaagcagcagggagtggtcgatcctgacatttttatatcccgcagcaatcagcttgcggaacgccgccgggaactgaaactccaaaaggagcgcatcctgcggtctgaggaggatcacaccatccagcaaacacaggatctgctggatctcctcgaaagcggaccggactggctggatgacttcgatgagcagctattcagcgatatggtcgagaaaatcgtggtcgtggacaatgaaacactgcgcttccgccttctcaatggactggaggtcacagaaaaaatagaaaggacacggagataatgggaaaacgaaagcagcccttcggctataaagtgaagctcggcgagatcgtgccgcagccgcaggaggcggaaacggtgcggagcatctacctgcaataccttgctggtgcctccttcaagcagcttgccgaacagcttcagacagaggatgttccctacgatgaggacaagtcctggaacaaaaatatggtggcgcgaattctggaggatgaccggtatatcggtgagaaagaattcccggcgctcatcccaacgaagcaattccacgccgcccaggaacgcaggaaagagatgcgccccgagtataagcagacacctgcgcaaaaggagttacgcaagctgtgcggcggcaccgtacccgacagcgttgcacgaaaagtcctcaagatactgaatcagatggtcgacgatccgcagatcatcaagatagaaacatccggtgttcccaccacagaagatatccggcggctccagcagaaacttgacacgctgctacagacaccacctgtagatgcggacaccgcgcggcaaaaagccttggaggtcgcgtctctaaagctggcgagtgtcaaaacggaggaatatgaatcacaccggctccgccgcatctttggttcgcaggcaaagctgtgggagctggacgcaaacctcctgcggcagagcatccgaaaaatcacctatgacagtaagacagtcaaagtcctgctgaaaaacaatcaagtcttagaggagtgtgatgatacatgacgcagtcccgccctgaaccgaaggtcatcgtgattcccgcaaaggaggaatcgccgcaggatcaggaaaagaagaaaaatctccgggtagccgcatactgccgcgtgtccacgaaaaaggacgagcagctcaacagctacgaaaaccagaaagcatactacacggaaaaaatcatggcaaaccccgactggacgatggcggatatttttgcggatgaaggcatcacaggcacttccgcctgcaagcgcaaggattttcttcgcatgatccgccagtgcaggcagggcaaaatcgacatgatccttgccaaatccgtctcccgcttcgcccgtaataccgtggacacgctgaactatacccgcgaactgcgcggcatgggcatcccggtcatctttgaggagcagaatatcaactccatctacccagaaagcgaattcctgatcactatccacggtgccttcgcacagtccgaaagtgagggcatctcctcccgtgttaagtggggcaagcatcaggcgatgcggacgggaaaggcgaatatccagtataagaccctgctgggctatgaaaagaaccctgacggtgagatggtggtgaatgcggagcaggcggaaacggtccgaagaatttatgagatgtacttatccggccagacgctgcgcagcatcaaggaagccttggaatccggcggcttcaagaattcggcaggaacaatggaatggacaacttctaatctgcggacgatcctctctgacgaaaaatactgcggtgacgtcctgctccagaaaacattcattcaggattgtatcagtaaaaaggttatcaaaaataccggacagcttcccatgtatctgattcagaaccaccatgaagccattatcccacgggaccgattcgatgccgtgcaggtggaattggcacgacgtaaaacattgacaagcagcacgaaaaagagcgctccgaccggcatgagccgttacagcggcaaatacgcactcagcggtctgctgttctgcggcgagtgcggtacggcgtaccgcagagtggtgtggacacagcacggtgagaaacgagccgtgtggcgctgcagcagccgcttggattatggaaagaaatactgcaaagaatctccgacgctggacgaatcgccgcttcagcaggcggtgctggcagccatcaatgcatccatgtcagggtgcaaggttctggcagatcagcttgtagatgcgatggagcatgaattggctccggttcccggcgagagcatgagccttggagatatcgaccgagcggtcacagagttgggcaaacaattcgatacgcttctggcagaagcggcaaatggtgacgcggacgaatacgccgagcgctttcgtaccatctccaccacgatggaggaactgaagcgccgcaaggcggcaatcctcagtatccggcaggaacaggagcagatcggccgccgtatccatgcggcagcctcggcaatgaccgcggtgaccatgggaattacagagtgggacgatggcgtagtctatcagatactggaaaaggtcaccgttctggcaggcaaccgcatcaaggtcactttccgcaacggcgtagaaatcgaacagaccgtagaccaacctaagaggaggaaattcatatgatttatgtgaccggcgattgccacggaaattttgcaaggtttgagcaaaaacacttcccggaacaagcgaacatgacgaaggatgacacggtcatcatcaccggagactgcggcggcgtgtggtttggtgacagccgcgacgatgaaacgctggactggctggaacgcctgcccttcacgcttgccttcgtctgcggcaaccatgaaaactatgacgcgctggaacgataccctgtggcggagtggcacggcggcaaggtacaccgtattcgtccccatgttctgcacctgatgcgcggccagatcttcgagctggagggcttccgcttcttcaccatgggcggtgccaaaagccatgacatcgaggatggaattttggagccggataccccggattttgagcgaaggctcatgacgctccagcgcaagcccagagcgagataccgcatcaaccatatctcgtggtgggcgcaggaactgccctcagatgaggaatatgatgaagcgcggcaaagccttgacgcggtcggctggcaggtggactacatcatcacccactgcgctcccaccagcatcgccctcatgggaagccgccacaacgaggcggaccggctcacggacttcctgcaagaggtacgggaaagagcaagataccactactggctgttcggccactaccatgacaacaaagccattgatgaaaagcacatcctgctctgggaacagatcgtgcggatcatctgaagcaggtcaaagcagaggaaaacacggtgacaccgccgtgcttttctctgctttgagcgttaatcaggcgcaccgcgccggaaaggagaaagcccatgaacattcgcaaacccacagattacgtcaccatgttcaccacactggacacgcttatggcggcgcagctcccgcagatggaattgtactgcgagattggccgagtggtcagcggcagagcagagaaaggagcggctgtcgcggcgtcggaatacctgcaagcggcctatcccgcggccgagggcttctctccccgcaatctgcgccgtatgcgggcgttttacgcagcctacgagaaaactcctgaaatcatgcggctggcgatacacctcggctggacgcggaatgtggcgattttagagggatgtggcagcagcgaggaacgggcgtggtacatccgagccgctctgcgttttggatggaaaaaaacgaaattattggaatcgatcaaaacgcaggcgtggctgtattcttctctcgacgaacaggcggtttcctgctatactggtgaaaatgaagtaacgcaggagtgcgagagcgataaagaagatactctttgtgtgtcatggaaatatctgccgcagccccatggccgagttcgtgatgaaggacttggtgaagaaagcggggctggtgtcagagttccatatcgaatcggcggccaccagccgggaggagatcggcaacccggtctatcccccggtgcggcgcaagctggcggagcatggaatctcctgcgacggccatgcggcgcggcagctcaccaatgccgactacgaaaaatacgatctcctaatcggcatggacagcgcaaacctgcggaatatgcactgcatctgcggcggcgattttgccggaaaactgcacctcctgatggactataccgaccaaccctgcgatgtagccgacccgtggtacaccggcgatttcgaggcgacgtggcaggatgtgctggcgggatgtcaggggttgctgcgtgaaataaccggccatcatcatacgagggaatgaacacgaaaaaaacagaaaagccattcgtaacagtacagtcgatttcctcgttttcactaaggatgccggtgacgacagtattgaagtccgtgtgcaggatggcgaggtctggctgactcaggatgggatcgcacagctttttgatgtagaccgaagcgtagtgaccaagcacctcaagaacatctttcaggatggggagctggcagaaaaagaaactcgtgcaaaatttacacaagttgctgacaacggaaaacctatcaatatcattcaggacaaaaattatcagagtgacttcgaccgattgatggcggaaacggctgaaacaaaatatccgaattgaagccacttgccaaccacgcaatccttgtgattgcgtggttttctttatatttcaacgttttcagccgttttaggcggtaaaaatattttccattacgacaataaaaaactcaaaaaagacattttattttcgattttacgaacggaaacccctcgctgcaaaagtgagggggtttcttttgctttattcaattccagggactgtctccaccctctccaaatattcctcgatccatccctgttccgccatgacaatctctttcccaatcttctccgcataggcccactccaaccgtgccccggcactctcacgccagcacaccaggagaacatccgtcggcagcttcacctcttattgacttttgtatgcggcctgatagaataataaggtagaaagaggtgcatggaatggatactggtttgaaaatcgtctgctgcattagtctcggtattctttttctgtctgtgctcttgtgtttggctatttaagtccctccgtccggagggacttattttttacgctattccctcgtcacgcttctgtgctgcgctccgtctgccaatctgccccagtctccacgaatctgatcgtaccagacagcagatccttgcatcaaaaaaacagttcctgttttagcttcattggcgacagatttttgtcaagacacaaagaaagaagcccgaaaccggatggtttcgggcttcttgttgaaaagttcactcttcggcgcgtgatagaaatatcagcgcttggagaactggggcgcgcgacgggcggccttcagaccgggcttcttacgctccttcatacgaggatcgcgggtcaggaaaccggccttcttcaggatggcgcggttatcctcgctggccagcagcagagcgcgggccacaccgtgacgcagagcgccggcctggccggacacgccgccgccggtgacggtagccacaatgtccatcttgccggtgttgccggtagcctccaggggctgacggacgaccatcttcagggtctccaggccaaagtactcatcaatgtcacggccgttgatagtgatggagccggtgccgttggggaacagatggacgcgggccacagaggacttacggcggccggtgccatacagataaggcttcttagactgatacattctcttactcctccttactccagcacgatgggcttctgagcctgctgctcatagttggcgtcagcgtagatgtgcaggcgcttcagagaatccttgcagacggtgttccggggcatcatgccgcggacagccacacgcatagccgtctcgggcttctcctgcatcaggatgcggtacttggtctccttcagaccgccgatccaaccggagtgagtccggtaaatcttctgctcgggcttcttgccggtcaggacagcctggccagcgttgatgatgatgacgttgtcaccgcagtcagcgttgggagtgtaggtaaccttggtcttgccgcgcagcaggtcagcagcccgaacggcggttttgcccaggggcttaccggcagcgtccaggatgtaccacttgcgctcgatgttggccttgttcgccataaaagtggacatggatcgtttcctccgtatataaatttgatttctttacaaatcaagagctccggggtaaaatcggagcatggatagttataccatgattcctcatccatgtcaacacggtttttatttagctcatgtaaatctcttaaaatctacgtttttctcctattatctcccgaaatctaaaattgtatttttgaaaataccgcaggggcatgacatcccccgcggcaggacaagctatgtacccttacagcacccactgcgccaacaacagcagcacgaaacccggcagccccaaaacgccgacggtcagggcgttcagcaggttcagtcccagcgcaacaccggtaacggcagcggtggcgttcaccgcccacagagccagaaaccccagtgccgtattcatcagcagcttcagggcaaggcgcaggggcgtccggaagatccgcagcagtgtgatgagaaaaaaagccagcagcaagccggcaatgattttctgattcaggtccatacagcccctcccttggcggatcccgccgccacaggctcccgcgccttcagcacccggaggtagtaatcacaccgggccttggcagcgctgatgcggtaaatacaggactccaccagctccggggccgttgcctgatcgaattgccggtaagccagagccagctcactctgggccgcttgcagttccgcccgcagcgccagcgtttccgggtccggggcgtattttctggattgtttcatcataatctccctcccaccgccggggcagttcctgtctcggcactatcagtttacggaaagtcttgacaaatataccatttttcatacaggaggactcacatgacaaagccgcatgaatactatatgtctcaggccctgaaattggcccgggaggccgccgatgccggtgaggtcccggtggggtgcgtcatcgtccgggacggggccgtgatcggccgggggcggaaccgccgggaggaaaagcaggcggtctgctcccacgcggaaatggaggccatggctcaggccaacgccgcgctgggcagctggcggctggacaactgcgcgttatatgtgacgctggagccgtgccccatgtgcgccggggccattctcaacgcccggattcccaaggtgttctacggtgcacgggacagtgccttcggcgcctgcggcggcgtgaccaacctgtttatggagcagttccctcaccggcccgctctggtgggcggaattttggcagaggactgtcaagcggtactggcggaatttttcgagaaactccgtcagggaaagccgtcgacgcaaagtttttaagaaacgcggagagatttaaaacttttgtaacaattcctactggtttgcttaataattctcctgtatcttaatacttgcaagagacaaaacttcttttcatccaatcttcccaatcatatacaaagagaccgtcgaaagacggtctttttgtatgtctgctgcaaaaacatggccctgacggaagccgtcagggccatgcacttttttattcttccgttttgccctttgcagcgccggacattctcatggctctttggaagccatccagagcggcggcaccgcccagcggcagcagagcggcgctgtgtccgtctgccagcagcgtcacggccaggatagccgtcaggtcggcatagaacccgaacatcctgggtccgcccgcctgaacggcaaagccggagagccggtaggaggccaggatcagcagcatcagccccagcagctccaggtagtagttcgccagcaccgggtcaacggaatacagccggtaggcgaagatcagccgggccagcagcagcaccggcaccgccagcaggatctggggttccgtatccggcgttttgcggcagatggccacgcctgccagcaggcagatccctgcaacaacggccagcaggcccatcaccacaccggagcggccggcccccgcactgaccgtaacgatctccatgccgtccgcagaaaccgccgtgaccgtccgtccaaacgcattggcgatctccagcacaccggaaaatgccatgacgcagccgccggccaaaatcccaaacagactgcccttgtcattccagttcagcagctgtgacagcgggacctccaccggccccttgggcagcttgctgttcatccggaacaatatcaccgccgacagcaccagcagcaccggcagcaggattcccggaagactgccgggaacaggcagaccggtgcccggttcaaacccggtcatgttttgcagcagccgcaaggacatacccgcggcgccgaggcagagagtcaggagggactttttatcgcactgcttcatcgctatgatcctttcaaaaacagccgccgatccttaaatagagaaagcggccaaacgtatttttttattatagcatggcttgtttcgcttgtccacggcagtgcgatttttatctcctttttaagctgattgccgcttggtcaaccaacctttctttatcaggggtgcaaaacaggagcaaggcctctttcgcccttgctccgatttgttcagtatgtgctattcagtccgccaaagcaaacgcttactcaacactgttgtaaacttccatcccaagaattcttacgatcatcccttcaaggtattcatcctcaggcgcatccaccgcacccagcctatgtacgtcttcaacctgatacaagacagctcgatagacaactgtgccgccgtctttcagacgcatggggatcggtaccagaagaacgatcgccagcaagacgcaaatgccgatcattgctttctttttcatgcagccatcccccctcttttcaaatttgtcatttgccttataccaatatagacgctaaaaatcgcaaaatgttcctgtatgtatagcatacaatacttttttctgctttctcaagccctccatccgctcacgaggacaagcttacctgtatgcagatggcgcagaaaagcccgggaggaatgattcctcccgggcttctaataggtgcggttatattgcagtaattcaaggcatgtcagggcatggcccggaccagcccgcgggcgcagtccaccgtgaccatcgtgccatccgtcagccgctgaacagcgccggcggctcctacgatcaccggcttgtccagagccagtccgatggtggcggtatggcactccgcgctggcctcctcagtgatgaccgccgccgcctgtcggatatagggcaacagctcattggtggtatagggcaccaccagaacatcgccgggctggaatttctccgccacctcgtcagcgctgcggcagatgcacagcggaccggaggcttttttctccccgatgcccacggcgttcaccagagcgccgcccacctgctgaattcggatcatgttggtggttccggctacacccaccggcacgccggcggtgactaccaccagatctccctcgtggaccacacccgcctgagccgccgcctgaacagcaaagtccaccagttcgtcagtgctgctggcgtagggcatcataataggctctacaccccagtacagggccatctgccgccggacctgctgatccagcaagcaggcgatgatgggggtgccgggatggaagcggctcaccaaccgggcggtagtgccccgctggctgacggtgagaatggcatccgctccgatctcctgcgccgtggtgcaggcggcgtgagcggtagccgccgccacggaaagccggttccgtccgccggccatctgggccatgcgcttgacatgattgatgtcactctccgtccgccgggcgatggcgtccatggttttcacggattccaccggatagcggcccgctgccgtctcaccggagagcatgatggccgaggtgccgtcatagatggcgttggccacatcggtgatctccgcacgggtgggccggggattttccatcatggaatccagcatctgcgtagctgtgatgaccggcttgccgcaggccacacaccgggcgatcatattcttttggatcagggggatctccgcaaagtcgatctccacacccatatcgccgcgagccaccatgatgccgtccgccgcgtccaggatctccggaagattgctgacgccctcctgattttcgatcttggcgatgatccgcatccgagaaccggccttgtccagcacgcgccgcagctcccgcacatccgccgcggaacggacaaagctggccgccacatagtcgaagccctgctctgcgccgaagaggaggtcatcccggtcctgctggctcatgtagggcatattcagccgcacaccggggacattgactcccttgtggttcttcatatcaccgtcattttccacccggcagcggatctccgtctcgctggtctccagaacagtcagccgcaccaggccgtcgtccagcaggatggtatcccccgctttgacgtcaccgggcagttctccgtaggtgatggaacagcggtgcgcatcgccctccacctgaacggtggtcagggtgaattcctgaccggcggtcagatggacccgtccaccggcaaagtccttcagacgaacctcagggcccttggtatccagcatggccgccaccggggcgtccagttcttcccgcagcgccttcagcgcgtccagccgcgccttatgctccgcgtgggtcccgtgggaaaagttgaagcgggccacgttcattcccgcctggatcatctcccgcaggacgccttccctgtccgtggaggggccaagggtacatacaatctttgtctttcgcatctcacgcactccttccgccatttcaaaagaaacgccgattctttcccattttaaagtaatcgtttttctcagtcattttatcacaaacctattcttatgaaaagacagcaatctgtaaaattttcatttcatcttttgaagctctgcacaaaaaaatcccccaccaaatcccggtccagatgccgtccgccaatttttccgcacttcccgccggaaccgtttgcttctttccggcttctgctatataattgcatataagttaaatttctcaccgccctgcggggaacacatcaaggaggtaacgtatgcactacatcggcattgatctcggcggcaccagcatcaagggggccgttgtcacagaaggcggcacaatcctgaaggaagcctcctgccccacccagagggaatcagggcctgagcacgtggcccgcgagatcgcagggctgatcacagctctggcggaaggatacgatccccaggcgatcggcggcgtgggcgtgggctgtcccggcattgtggaggatcacagcggtatcgtccgctactccgccaacctccattgggaaaattttgatctccgggccgccgttcagaaatacagcggttataccgtccgtctggccaatgacgccaacgccgccgcgctgggcgaggtagtagcgggctgtgctcagaatgtggacagcgccgtgatcctgacgcttggtaccggcgtaggcagcggtgtggtgctgaatggaaagatcctgacgggctgcaccggcggtgcagcagagctgggacacatggtggtggaggacggcggcgcaccctgcgcctgcggaagaaaaggctgctttgaaacctacgcttccgccaccggtttgatccgcatggcgaaggaggccatggcccagcatccggaaagcctgctccacgccaccgccgcagaggttggtgatgtcaacggccagaccattttccgtgccaaggagcagggggaccctaccgccgtcgccgtggtggagcggtacatccactacctctccgtaggtatcgccaacgtcatcaactgcttctatcccgaggtggtggcgctctccggcggcatcgccaatcagggagaggcgctgctggctcccctgcgggaagccgttgcgccccaggtctatggcaatcagtatttgcagactcacacccgcatcctcggctgtacgctgggctaccacgccgggatcatcggcgcggccatgctgcccactgccctatgatcgcataatcatctgccaaaaaccgccccgggcttgccgtgaagcaaggccggggcggttcttcgtatgtttctattacagatttaaaattgaatgggccttctttggcagccttgttacttgttcttccgcatcatggccgcgtcagcatccaaaagctgctgagaggcatcctccaactgcgccgtcttctcgtagcggtccgccaagctgctctccaccagcttttcctgcggttcgccccggaaaaccagcttcagcaggatcggcgtcagaatcgtgccgcctaccacggtgatgaccaccggtgtcatcatcgcactgctgagaacgcccatggacagtccccggttggctacgatcaacgccacctcgccgcggcagaccatgcccacacccacctgaatgctctcccgctccgtaaagccgcagagttttgcgcccaagccgcagcccgccagcttggaaataacggagatcaccagcagcaggacggaaaatgccagcatcccgccgctgacgccgtccagcttgacgttgataccgatggcggcgaagaacaccggcgtcagcagcagatagccaagcggattatacttggactggatataggttcccttgggggtgcaggccacggccagaccggcggcataggcgccggtgatgtccgccacgccaaaaaactcctccgcgcagtaggccatcaccaggcagagcacaaaggccagaacggagttgcggtgagtggcccagcctccctgccgcttcagcatccagcaaaacaggcggttggcccccacaccggccacagccgcgaagataaagaagcccaggatcttcagcaggaccagtccaacgctctccccgccaccggccagactgctgaccagagtcagcgccacaagacccagcacatcgtcgatcagggctgctgccagaatggtgttgcctaccttcgtttccagcttacccatctccttcagtgtctccaccgtgatgctgacggaggttgccgtaaggatcgtgcccacaaatacattttccagcataccgttgctctcaatcaagcctgcggcggcagcgccccatgccagagccgtacccatgagcaggggcacgatcacacccagcagagccacccaaaagccagccttgccgctgtttttcaactcgttgatgtccgttcccataccggcggagaacatcagcacgatgacgcccaattcgctgagctgggaaataaattcagtttctgtcagaacattcaggcccgcagggccaaggatcaggcccgccagcaaagcgcccactacctgaggcatctgaaaccgctgtgtcagaaggcccagcagcttcgtacttaacaaaatcaacgccagatccagtaaataatggtatgacacaaaaaactcctctccatgcggttccaccgcatacacacattttttcacaaggtccttattctatcgctttccccgatttttgcaatggtcatttcgcacaaaacagccgttaatttttgttaagatttcctaagtaagcttttgcggaggtgcctgccgtttttccggacagcggcgctatgttctgtcctctgcaagtgtttaatatttgttaaaaattttttcacactttttctcgcagaaccgcctataatctccaaaatgtgatttttattttactgacacgccgcgttttttccgcggctgagaggatcctgattatgaagctgcctctaatcgattaccgtcagttccgtctgagccggctgaataccccgcagttccggcatctgaagctgctgctgttctggccgattttcagtctggtattctgttatctggaaaactaccgccctaccgtctactacgcccccatgcgctgtgcgctggatcattggatccccttctgcaagtggttcgtcatcccctacgcgttctggtttctttttgtaggagggatgctgctctacaccttattttataacattcccgctttccggcggatgatgtggttcatcatcctgacgtactcctttgctctggtgacctaccttctcttccccaactgccagcatctgcggcccacactgctgggcggcgacctgctgacgcggttcaccgcaaagctgtacgccgcggacaccaacaccaacgtctgcccctctattcacgtcatcggctcctttgcggtgtacttcgctgcccgggacatccggcgcttccgcgccaagggctggcggctgggctttctgaccatggccgtgctcatcagcctgtctaccgtattcctcaagcagcactccgttctggatgtgctggcggggctggctgtctgcgccgcagcctatcccctgatctatcgggtacctgccggagccgcttctctgatccccgccggaggtcttggccgaaagcggttcccggagctgtaacacctcttgcctttcccactctgtccctttataatagagggacagagtttttttgtcgcatcgccccattttcaaacgataccgcgcaggaggaagccgccatgcccacgatcatccccatcaccgattttgccgccccggaactggatatttatgcccggctgacggaaaatcagcttttgaaccgggcagacccggccaacgccctgttcgtggcggaaagtcctctggtcattggccgggcgctggacgccgggtgtacgccggtatccttcctgatggagacgaagcacgtcaatggcaagggtgcggagatcctggcccgctgtccggcagatattcccgtctacgcggcggagctggaggtcctgacccagctcaccggctttcacctgacccgtgggatgctctgcgccatgcggcggccgccgctgcccacggtggaggagatctgcgccaagtcccggcggatcgccgtgctggaaaacgtgatgaaccctaccaacattggcgccatcttccgttccgcagcggcgctggggatggatgcggtgctgctgactgccgccggcagtgatcccctttaccgccgggccagccgggtcagcatgggcaatgtgtttctggtaccctggacctatctgccggagggtgtggattggacggaaactttgcggcaatacggtttcaagactgctgccatggccctgcgggaggactccatccgtctgaatgaccctcagcttgcccgggagcccaagctggctgtggtcatgggcacggagggggacggactggcctccgacaccattgctcactgcgactatacggtgatgattcccatgactcacggggtggactccctgaatgtggcggcagccagcgccgtggccttttaccagttggggctgatgcgctgcccagaatgaatattccgcaaaatattcattctattattcaagcatttgccaattcgtgaatgaattatctattttccatgcaaatatggcgttttttagctatatcgccatttttttgcagcaattccgtcctgcggctgaaggacttcctctccaaggttttgtaaacacaaatctttcaatcaatggaaaaaagcagacgcaggataaaacctgcatctgcttgagactgtcgataaagtagtaaattctccgcgacggtaaggaagggtgtgcgcgggaaacccaagag

SEQ ID NO: 12178 - DNA, 5084 bp, Unknown
  gut microbiota DNA sequence
tatgacttcatctgggacacctactgcgactggtatatcgagctgaccaagacccgcctcaacggcaccgacgaggacgccaagctgacggcccagaacgtgctgtgctacgtgctggtgaccctgctgaagctgctgcaccccttcatgcccttcatcaccgaggagatctatcaggctctgcctaagtgcggcggcgcggaggatatcctgatgatggcccagtggccggaatacaccgaggcgctggacttcccggcggaggagaacgccatggaggccgtcatggacctgatccgggccatccggggccgccgggccgagatgaacgtgcccccctccaagaaggcggaaatgctgattgtcactgctcagccggagccttaccggcagggcctgcacttcatccagcgtctggcctacgccagcaacgtcaacttcccggagaccgctccggcggatgtgaccggccttgtcagcgtggtgacccacgacgccaccgcctacctgcccctcagcgagctggtggatctggcggcggagcgggagcgcattgccaaggagctggaaaaggcgaagaacggtctgcggatcaccgagggcaagttggccaacgagaaattcgtggcccacgctcccgaaaatgtggtgaacgccgagcgagagaaggttgccaaatatcaggagctcatcgccaagctggaggaatccgccaaggccatggcctgagcctaaataccgaaccgaccaaaagcatccacccgcccggcgggtggatgtgagactgtcgataaagtagtaaattctccgcgacggtaaggaagggtgtgcgcgggaaacccaagaggggtgtcccgcgccattaaaatcctaagttttcagaacttttatgaagttctgaaaacttgctcagcggggagaaaagactttttcgacacgctgacccggaaacacgttagatgtttccgggccttttttacacttttttccgggggaatgactgcgccagctttgttcccagccaacctgccagaatacccacggcggcgccccccagaatatctgtgggccagtgggcgtagaggtacagccgggacagggcgatgaccacggccagcgccagtgctggcttccaaaggcggctgttcgctgttttcagcgcggccaccgatgcgaaggaggctgccgtgtggccggaggggaaggaggcgtccacaggcgacgggatcagcaaggagacggtggggttgacggcgaagggccgcacccggccaatgagcggcttgagggcgaggttgcagagcaggagatccagagccagtccgcaggccatgcaggcccccagctttctggtctttggaatcgccagcaggatcgccgccagtaagatccatacctcaccgtggtcgcagatccggctgactggcaccatgacggcatccagaacgccgcagcgcaggtgagcctgtatccagttcaaaattgtcagttcaaaggcttgcatcgtttcggtcctttcctattcgctgtgggccatcataccatatccgccgcaaaaagaaaagtgcctttccacgaatggaaaggcactttttcaatgagtttacgcggccttgcggcgctccatgctgcggatgacgaacagaacgcacagcatcagcgtaaagctgacggcccaggtaatatacacgttctggacgaaaccggccacgatgaagccaaccacgcagacaccggccaccgtcagcacataggggatctgggtggcaacgtgctccagatggtcacactgggcgccggcggaggccatgatggaggtatcggagatgggggagcagtggtcacccatcacagcgccggcacagcaggcggagataccgatgatgagcagctcgctggaagcggggaaaatagcggtaacaatggggatcaggatgccgaaggtaccccaggaggtgccggaggcgaaggccagaatacaggccaccacgaaaatcacggcagggagcatggagtacagcgtagcggcggcgccttccatgaggtcatggacatagatgctggcgcccagagaggtgatggtagccttcagagagacggccagggtcaggatcagaatgggggagatcatggcgttgaagcccttggggatgcaggccatggcgtccttgaaggtgatgacccggcgagccaccagatagatgacggtaaagagcagagcaatgatgccgccccagggcagacccatgaaggcgtcggtattgccgaaggcgccgatgaagtctccggcgcagtcggtgccgccccaggcgtccacgccgaagaagccgcccacatagatcatgccggtggtgcacacggcgatcagcaccagaacggggagcagcaggtcgatgaccttacccttggggtttacggcttcatcctctgcgttttccagagcggagaggtcaccggtctcccgggccttgcgctcataggtccgcatgggaccgtaatcaaactgcatgaaggacagggcgatgataaagacgaaggtcagcagggagtagaggttgtagggaatggccttgatgaagagctggatgccgctgatgccggtgtccaaaccctcggcggtggaggaaacggcggcggcccaggaggagatgggggcgatcatgcacacgggggcggcggtggcgtcaatgaggtaggccagcttgggacgggagatccgatggctgtcggtgacgggccgcatgacggtgcccacggtgaggcagttgaaatagtcatcgatgaagatcagaatgcccagcaggaaggtagcaagggaagcccccaccttggtcttaatgttttttgatgcccagcggccgaaggcagcagagccgccggcggcatttaccagtgccacgatgatgcccagaaggacaaggaacaggaagataccggcgttgtctttgatggcggccaccagaccgtcgttgacaatcatgttcagcgcgccgatgggggaaaagccctgagagaacagagcacccactgtgacgccgatgaacagagagctgtacgcctccttggtgataagggccagagtgatggcgatgacggggggcaccagtgcccagaaggtaccgtacatgctgttggcgggcgcgccgtcctcaacagccagagcgctgacacacagcagcgcggcggcggtcatgaccagcagggccgtccgcagtaggggatgttttttcatggagattctcctttcatttttgggccgcagcccatgcaaccggagaatacgcgtgaactccatcctgtcaaagcacattgtgtttcagaacaaaaaatggagtcatgacattccgccatgactccatttgaaggtctcatttcaccaaacagatccatgacagcgccccgcccgtttccgggcgacagtccggcggatgttttccgacggcccaggcaccgacccgccaggcagcggtacggcccttcggcggctgaccctttccccatcctctatgcctgtctgccggatggttactcttatcagccgcgcctctatcatgcgttatccagttgtatcctaccctattataggtgaatttccgaacttgtcaacggtttcttcacaaaatgtttatattttgcaaaaagaacagggaacgccgcgtttttggcgttccctgttggaaaagtgctgtcagaaattagtagctgcccaggtcagcggacttgtcgccctcgacgctgatgccgaactcgtagtcattgccgggcaggatggcgttgaggatcacgccgcacagagcagcgatggccagaccggacagagtcacagccgcaccgcccacggtgaaggtcacgccgcccacggagctgaagccgaggccgctgacaaacatgacggcggcaatgatcaggtttcgggacttggtcagatccacctgattctccacgatgttgcggacgcccacggcggagatcatgccgtagaggatgaagctgacgccgcccacgatggcggaggggatggagttcaccagcgcgtcgaacttgggggagaagctgaggatgatggcgtagacggcagccagacggatgacccggggatcgtagaccttggagagagccagcacgccggtgttttcgccgtaggtggtgttggcggggccgccgaacataccggcaaaggcggtagccagaccgtcgcccgtcagggtgcggtgcaggccgggatcggcgatgaagttattgccggtggtggaggaaatggcggagatatcaccgatgtgctccatcatggcggcgatggcgatgggggccatgaccagcacggcggacacgtcgaacttggcgaggatgaacttctggaggccaatgaggtgtgcctcgcccacggaggcgaagttgacgaggggctgcatgacgccgttggcatccggcagctgggcaccgcaggcggtggcgatggccgccacaatgtagctgcctaccacgcccagcaggatggggatgatcttcaccatgcccttgccccagatattggccaccacgatgatggccatggccaccagggccagccaccagcaggtggcggcgtttttgatggcggagccggagaggttcaggccgatcatgatgatcatggggccggtgacgatgggggggaagtaacgcatgaccgtcttggcccccagcaccttaaagagcagagccagcaccagatacaggagaccggcgatgacgatgccgcccagagcgtaggccagcttcagctcgggatccagaccgtcataggcgggcatggaggccacggtggagaagccgcccaggtaggcaaaggaggaaccaaggaaagcggggaccttgaacttggtgcacacatggaacagcagggtgcccagaccggccatcagcagggtggtctggatgctcaggggcaggccgtagccctgaaccagaatgggcaccagcacggtggcgccaaacatggcgaacagatgctgcaagcctaaaatcagcatacggggggtgcctagggtgcgggcgtcggtcacggcttcctgaccgaggatgggtttctttttctcgttcat

SEQ ID NO: 12179 - DNA, 16600 bp, Unknown
  gut microbiota DNA sequence
ttctgcattgcaggctcttattctaccaacaaccgcatctatgatatttatatcattttgattttcggtatcgtttcttacttcctgcggcgcatgggcttccaactggtgcctattctgctgggcatcgtgcttggacctctggctgaaaagaacttccgccgtgccatggtcatttctgaaggcagcttcagcattttcttcacgcgtccgatcagctgcgcgttcattttgatcgcgattgtgtccgtggcaatttttggcatccggaactacaagtccagaaagctggcaaagcagaatactgctgaaacttccgagagaaaataatcgaacggaaaacgtccccgctcagtttggaaacaaagctctctgctttgagggagcgtgctgactggggatgacttggcagacgaacttaggccaacattaaaaacaaggggctttctttacgaaggccccttgttttgtagaaaaaaccgactgataccttgctactgccgatggcggcctaaagcgaatcgcggatatcatggaaaaagttgtgccgttcggctctgatttatattgtaggcggcttgggagtcctgatcatgcacatcagcgtagtaccggaaatgtttgccctgattttcaagagcgcctttacacctaaaatggacgatgaattggcatttctcttagcagaggcacatcataaccttggctagttagaaggactgattcaatatgcgcccaacagaatccctttttgtgacttgatggttttgaaggaatgcaccaattcttgctgtccctcaattatcatttttattatttcaagtatagcagatgattgagaataaaaagcactatcccgcaatttgtttcacaaaactgccaaatagtgcaattaatcactcaattcgagtttcacgatttatacacaccttcgccacgatggcgctccagaacggcgtggacatcaagaccgtcagcagtatgctcgaccactactcggcgggcttcacgctggatacatacgcccgcgttaccacggacgcgcagctcaaagcggcgcaaacgatgggcaatatcctatcccgtgctgtctgacggtttccgctacccgctctcgttggggtcagcgtctgcgcatccaattgaaatgtggcgctcaaataaacttgggatcaaagaaaaaataagtcgagggaatttcccccgacttattttttcgtgccctgtaccgtccggcctaccccataggtcacattgtgtacctatgaacatgaaccgactggtttccgcagcttttttgcttgcttggcgaatgtgctcaggagtctgcttcctccgggctttcttccatacgggcggccagctccgcttcgtgggcacgaagttcccggtccacctttcgggaaacgaagaaatagcagatgaggtgggtggtggccgtcaggacccaggagagaggatagacgatgtaaaccatctcgatccggtggtaggctggaagccgaaatacggtagacagccagatgagccgggaggcgcaggcgcccatcagcgtgaccagcatgggcagaatgttgtaccccacgccacgcagagaaccgacgatcacatccatgatggcgtccagaccatagaacagggcgatccagcggaggcgcaccataccggctgccaccacctcggcgctgggggaatagatccccagaagctgcgggccgaaatagacggccagaacactcagaagctctgtggtcacaacgccggtcacaacgctgatcatagcgatcttcttgatgcgtcgatagtcaccggcgccgtaattctggctggtaaaggccacgttggcctgatagaaggcgttgatgttggaataaatgaactgctcaatgctgatggcggcagagctgccggccataatgacctcaccgaaggagttgacggaggactgcaccgtcacgttggccagagagaacagcattccctgaattccggcggggatgcccacctgcatgatctgcttgagcttgatggggtagatcttcagctgccggaagtccagccgcagaggaccggtctccttcacgaggcagcggaccaccagtgcggcagaaatgcactgggagatcacggtggccaatgccacgcctgccacatccatgtggaagtagatgacaaagaccagattcaggatcacgttgacaacgccggatgcgaacaggtaatagagaggtctttgggtatcgccgctggcccgcagcagagcggcgccaaagttgtagagcatggtggcggtcatgccggcgaagtagatccgcaggtagagcgtggccagatccagcacattggcgggacactgcatccagatcagaatggtccgggcacccagaataccgaccactgtcaggaacacgccgctgtacagggagagcaggatggaggtgtggaccgttttgctgagttcctcgtcctcatgagcgccgaagtaccgggcagccagaatgttggcgccgatggacaatcctaagaacatattggtcagcagggcgatcagggaggtgttggaacccaccgctgccagggaattgtcaccggcccagcggccgaccaccaccacgtccgccgcgttgaacagcagctgcagcatggtggagagggtcagcgggacggcgaagcgcagcagcttcggcaggatcgcgccatgcagcatgtcgatctcgtaggttttctttgcgctccgcatcatgggaaacctcctgaaatactgtcaaaaatacagaaaagggtcgcccttcagggcagtgtccctattctaacaccgccatagcggaaaagccacccctttttctaaaaagttctaccattttttccgtagacacgcaagggcatttagcgaaagatcactatgccattcctaaatggggaaaccggggcttttatgggccaaatcttccaaaatcaccaaaattctcaaatcgttcacagtttcggattgcgcggaacggggaatgctgatatgataccctgtatacagtttgagtgaggaggtggaatatgacggacccatataaacaggcggatcgggcgcgctggctgcgggatctgctgtgcggtgcgctgatcggcgcgggggcgatcctgcccggcgtctccggcggcgtgctggccgtggtgttcgacgtataccgccctatgatggagacactgtcccatcccggacggggcatccggaaatactggcacattttccttcccttggggattggctgggccgtgggctttctgggtctcgccaaggggatcagcgccgcctatgccctgtcggacgccgctaccatctggctctttatcggcctcattgccggaacgtttcctgccctctggcgggaggcgggaaaggagggccatggccgggcggcgtggatcgcctgcggcgtctgcgccctatcggtgtttctgtcgcttttctatgtgcgccatgtgcttcacgtgacggtgacgccgaacttcggctggtacaacttctgcggcgcgctctggggtgccagcgtggtgctgccggggctgaccagctcctccattatgatggcattggggctgtacgagccgctgctgaacagccttgcggaaatgcggctgctggccctgtccgcctgcctgccgggaatgctgctggccatgctgctgttggcccggggcgttacatggctgctgaggacccattacgctgtgaccttccacgggatcttgggcatcgtggcggcctccacactggtgatcgttcccatccggtatgacagcgtgggcgaggcagtggcgtcgctgctctgctgcgccgccggattcctgctggccttttttctggaaaagctggatcgggccttaccccgcgcttgaatccgcacctgaacgtgcctgacaaagacccccgccgctcatgtgagcggcgggggtctttgtcatatacagtgggcttacaggtcaaagaagcccatgatggcgatgccaatgaccaccagacaaatcatggcatagtgcttccaagagagcttttccttcaggaagatgcggctccacagcacggaggcggcacagtaggaggaaatgatgggagcggacatggccagatgggcggtgtcagaaatggcgtagatgtaggcgaactgaccggcggtttcgcagatggcaccaaagtacttgggggcctccattttgggaaccagccgatccttcttgatgaccaccacatagatgaagcagaatgctgctgcggcaaggaacgtcaactcgtatgcgcagttggcggaggccgccgcctgatcggcacattctctcagcgtggcgaacataccggcgttcatgtagcggtccgtcaggatctccagcacccggttgtcggcaaaggtgccggcggcgtccagcagacagtaggctgcggggagggccagggcgagaaagctcttggcgtacttatagttgctggccttctgccgttccagacgaaactccgggtcctctgtggcatccaccacacccagaccgatggcacccgtgcacaccagcgcgatagccaacagggccagaggagagtaatcctcaccgccgacgaacagcagcgtcagcactgctaccaatgcgccggaggaattgcagatgggggaagaaacggacagctcgatataccgcaggcccagatagcccaaagccatggaactgatatacagcagggacaccggcaggtaggtccagatgacggaccagctgatggccgtgccgcctacgaagatctcaaaggcggcgtgaaggcccatcaccacgcccacggcgatgaccattttcaggtgactgtaacggtcgctgccgtcccggcagccgattttagaaaagaggtcgctgccgctccagcacaggagggcagtcagggaaagccaaagccacatggggaaggtctccttattggaaaaattgaatagatggaaggtgccgcggttttacagggtcacgataccggcgtccaccagcttttgcaggctcatgaggatgcccagcttggcgtgataccaggtgaggccgccctggaaatagacggcgtaagggtcgcggatggggccgtcggcggacagttcgatgctgctgccttgcacgaaagcgcctgccgccatgatgacatcggaatcgtagccgggcatggcccaaggctccggggtcacatagctgtctaccggtgcggcagcctgaataccgctgcagaaggccaccatagcctcccggctgcccagcgtcaccgcctgaatgatgtcatggcggctttccgtggcgttggggacgcaggcatagcccagcttttcatagacgttggcggcaaagacagcacccttcaatgcaccggataccacagtgggggccaggaacaagccctgatagaaggcgggcatcagacccaggtttgcgccgacctcctgccccagaccgggggcggacagccggtaagcgcaccgctccacgcactccttggtgccgcagatgtagccgccgatgggggccagaccgccgccggggtttttgatgagactgcctactaccatatcggcgcccatatcagaaggttcaatgcgctccacaaattcgccgtagcagttgtccaccatgaccttgacgtcaggcttgatctccttgcagaagcggatcagctccccaatttgctccacggagaagctggggcgggtggcgtagcccttggagcgctggatggtgatgagcttggtgcgctcgttgatcttggaacggatggcatcgtagtcgaaggtgccgtcggccttcaggtccgcctgggcgtaggtaacaccgtactccttcaaagagcacttgctctcccggatgccgatgacctcctccagcgtgtcatagggtgcgcccacaggggagagcagctcgtctcccggcagcagattggcggacagggctacagtcagggcgtgggtgccgcaggtaatctgaggccgcaccagcgcagcctccgtgtggaacacatctgcatagacccgttccagattgtcccggccctcgtcatcgtagccgtagccggtggtggcggcgaagtgggtggcatttacccgattcttctgcatggcggacaggaccttggcctgattgtattccgccgtctggtcgatggcgtcaaaccggtcccgcagctccgcaatgatccgctctccgtattcatagacagccgcgctgacgcccagctgttcgtacatggattccattttcatgtcttgtgttcctcttttcccaaaatttcatcagccagatcgttcagaatctccggccgggtcactaccagtccgctggcctcgttgccaaggatcagcagggtgtctcccggagagatgccgtaaaaccggcgggcttcttgggggatcacgatctgtccccggtcacccaccttggcggtgccgaagatccggtttttaccctgacctaagacgtgcttgcctccaggcatgggaccgcctcctttgtcatatttttcacacttgtatgaatatagcagacctgtttccaaaaggcaaggttttttacagaaattcccgttttctgctggaaaaaggcaaaaagcaccccggtacaactgtaccggggcgaaaaaacgaaaattttgtatagggtcagctcagccggagaccgcctacgaaatatgtattgtagtagccggaggtcagatcgctggtgatgacgccgccgtttctggaggaagaggcgtgcacgtgctggccgttgccgatgtagataccggcgtgggagcaggccttgcccttgttgcggctgggatcattgaagaacaccaggtcgccgggctgcaattcggaaatgctgtagatcttggtgcccatgccgctgagccactggctggtggcggaatgggggagattgtagccgaactgcttgtagatatacatggtgaagccggagcagtcgaagccgccggcggaggcgccgccgtacacatagcgggtgcccagatggctcagagcggtttccacgatagaggagcccttgccgctggtggcattgctggtcagtaccagcagatcgctgcggacatagccctccgtgccgtattggcaggtaacgtcataccagccgtttaccagaccgttgacggtgactacggtgccggcgtcgatggtggccaggctctcgctttcggtggtggcggcggcccggacgttcacagtgccctcgggcacgcggccgtaggtggtgaagatgttgtcctgatcgaggataaggtaatcggaggacacatagccggtgctgccgttataattgatcttgtaccagccggggacgctgtcatccagcagggccacagccacagacttgttcagcgtggtgacgatggcggaggaggtgttgggctcggaccgcatacgcagggaagtaccggtggtgcagccggcgccaatggccatctctccctcggcagaggcgaaggcggtaagcgccaaagtggtgagggcagcaaaaacagcggccttcacggcctttttcatcagatgcttcatcgaaacgcttcctttcctttgtgttagtcagtgcgggggtagggggttcttacttgccggctaacgcccgctccaaccagatggaagcgaaatccatcgcctcatacaggctgctcttttcacccttcttgaccacgcggtcccgtgccttcacattgggattcgtggactggagctgcaaggaaaccttggtagccatatccagaccgttttcctttttgctctccagaatctgcatcatgacgatatatggatcagccatcgttccgtagtagatcaggttgtcgatccgccgcagaggatggcccttataaatcaagccttctgtttttgtttcagacatgcaaacactcccttggaaaaattgtaaccaaattgtaacatcttttatccaatttgtcaacgttggaatggcggcaatcttttccatcagtccaaaacaacggcttttcaagatatttcggcagtttacacacataaaaaaagcatggagacaacgtctccatgctttgatcggctgatttactgtcccagatatttttttaccagaacctgcaacagctcgtcccggtccagcttgcggatcagggtgcgggcgcccatgtgattggtaatgtaggtggggtcctcagagagaatgtagccaacgatctgattgatggggttataccccttttcctccagtgcctgatagactgtggtcagaatgttataaatctccacatccttatcgtccacaatactgaatttgcgggtatagtcatccatacggacaccacctttccttcgaaactgtaatcagtatactcggttttcggggggaagtaaagggaaaaaaggaaatgtaacagaatggtaataaaatcaaggcggtgagaaacctcaccgccttgattgcagggaactgttcgatttaccgtaggaccgcgccgcattcctgctccagagcggtcaggatgctcttcacgtcagcgtccgccatcccacagactggccagccagtctgtgggaaccatgaatgatcgaaatgctcggcggaaatgaatcccgcctgcgccaagattccgctgcgcggaacgcttgtacgcggtgtcccgcgtccccgcactgcggggcgaagaggctggaaagccttaccgtaggaccgcgccgcattcctgctccagagcggtcaggatgcttttcacgtcagcgtccgcctcttcggcggtgaggctccggtcatcggcccggagggtcaggttgaaggccacactcttcttgccgggggcgatgcctacgccggtgtagatgtcaaacagggccgcgtccttcaaaaggcccttagcgcccttgcggatggcgtcctccagttcgcctacggtgacagaggcgtcgcacaccacggcgatgtcccgggtgacagcggggaacttgggcaggggctggtacacaggctgtgcgcccttgctttcatacagcgcgtcgaaccgcagctcggcggcatacagctcggcgtccacaccgtagttgcccgccacatggggatggacctggcccaggacacccagcagacggtccccgctgaaaaccttggcacagcggccgggatgataggagggattctcgctgtccgccaggaaccggacgttttcaatccgcagctgcttcagaacggcctccacagcgcccttgagggtaaagaagtccatattgtcaccgtaagcgcccaacgtgaggaccttgggctcgtcggcgaggccgtcggcccgcttgaagtaaacccggcccagctcgtagagcttggcggacttgttgcggaagttgtagttccgggtcaggatctccagcatggagggcagggtggtagtgcgcatgatggaggtgtcctcgcccaaggggttcagaattttcagagaatcccgcaggggggaatccttgggcaggtcgatcttatcataataggtggggctgatgaaggagtaggtgatgatctcgtcgtacccggcggcgcggcacacgctgcccagcagattttccgtctgctggatatccgtgaggccacggcgggcggtgagaccgttggagagggtgtcggggatgttgttgtagccgtagaaccgggctacctcctcggcgatgtcggagtagtgctccacgtcggaccgccaggagggaacatggatggtgtcgccctccaccttgaagtccagagactccaggatccgtaccatttcctcacgggaaacgtcggtgcccagcaggccgttgaccttctccggctccagcttcacggtgacggggttggagtccttggcgatgacgtccatcacgccctccaccacttcaccggcgcccagcagctccaccagctcgcaggcccgctccacggccttcagggtgttcatggggtccagacccttttcatagcgggaggaagcgtcggtacgcatattcagagcggcggcggtgcggtggacggaggtgccgttgaagttggcggattcaaacagaaccatggcggtgtcgcccacaatctcgctgttggcaccgcccatgacgccggccacgcagacgggcttgttctcgtcacagatgcagagcatagaggtggtcagcttccgctgattgccgtccagggtctgaatggtctcaccctcccgggcggtgcggacgatgatgtggttgccctccacgcaggagaagtcgaaggcgtgcataggctggccgtattccagcatcacatagttggtgatgtccacgatgttgttgatggggcggacgccggagttccgcagccgttcccgcatccacgcgggagagggctggatcttcacgtttttcaccatccgggcagtgtaccgggggcagagatcgccgtcctcaatgtcgatgtccaccaactccgcaatggagccgccgcagcccttcacttcaggggtgtgcagcttcagaggacggccaaaggtggcgctggcctcccgtgcaaggccgataacggacaggcagtcaggccggttgggggtgatctcaaattccaccacatgatcgtccgcgccgatgaccacagccatatcgtcgccgggcttcacgtcctcgttcagcacgaagatgccgtcggcgatgcagtgggggaactccttctgctccgcgtggagatcctccagcgtgcagatggaatcggtcttggtgttgtaggccaccagatcgcccgcatggaggttggagcaggcagtgtcgggagaggcggtggcgccgccgatgtccagcgtggtgtggtacaggccgtaggactgggtctcacattccagcaccttgccgcagaccacggggccgaacacattgtccccggccttgatgtcggcggggatggagggcttctccgggtccagaggcttgtagtcgttcagcagggcggcgggggtgatgacggcgtagggatagtcatgctcggcggtgaggctcagctccttcagagagcacagcatcccgttggacaccacgccccggagcttgcccttttcgattttcgtgccgttggggagcagggacttgtgctgggccacgggcaccagatcgcccacatggatattccatgcgccggtgacgatctgggtaggctccgcctgtcccacgtcgatctggcagatccacatgtggtcgctgtccgggtgcttttccatggacaaaatcttgcccaccaccacgtttttcagggactcatccagcgctgtgacggtttccaccttggagccggagagggtcatggcctcgtcaaactcccggtcgctgatgtcggaaacatctacaaattcatttaaccatttacgggaaagaatcattgtctatcctcctcttttattccgaagggaatcaggtatcccctcgccagtgagatccgctcactgatggtacgccgcagtcgatgtacggtcgatgcatgtttgcagcagcaaacatcagttgtaattgttttttgcggcggcgtgtacggcacaaaaaacaccgctcagagtgcaaacgtgcgagccgcttgcggcgagtgcactgcggcactctgcaaaattcgcataaaatggctgtgccattttggcgaggatggtcagaactgctgcaggaaccgttcgtcgttctcgaagatcagccgcaggtcgctgatcttgaagtggcccatggcgaagcgttccagacccatgccgaaggcgaagccggaatactcgtccggatcaatgccgcagttgcgcagcaccttggggtgcaccatgccggcgcccagcacttcgatccaaccctcgcccttgcaggtggggcagcccttgccgccgcacttgtggcactggatgtctacctcgcaggagggctcggtgaaggggaaatggtggggacggaaccgggtgacggaattggcaccgtagatggccttgatgacggcgttcagcgtgcccttcaggtccgccatggtcacgcccttgtccaccaccagaccctcgatctgatggaacatgggggagtgggtggcgtccacctcgtccttgcggtaaacccggccgggggagatcatgcggatgggtacgccgtgctcctccatggcccggatctgcatgggagaggtctgggtccgcaggaggatcttggaatcctcggtgagatagaaggtgtccgtccagtcacgggaggggtgggactccggggcgttgagcttggtgaagttgtagctttccagctcgatctccgggccgtccatgatctcaaagcccatgtcaaggaacacctgcttgatttcgtccagcacggtgtacatggggtgcttgtggcccagagccacctccttgccggggatggtgacgtccagcgtctcggccttcagcttggtttccagagcggccttttccagaatggcggactgggcctccacggccttttccacggcggcgcggacctcgttggccatctggcccatgacggggcgctcctcagcagagagactgcccatcagcttgaggacggcggtcagttcaccctttttgcccaggtacttcacccgcagcgcgtccagttccgccgcggccttcgtgccggcgatggcttccagagcgcccttgcggatggcttccagttgttctttcatcataaacgcaaaactcctttgtatggaatgggatgatcggatcggggtggcggaaaacaaaaaagccctccgtcccacattgggacgaaaggctcacttccgcggtaccacccaaattcgcgccgaagcgcacacttgtgccctgataacggagggtgaccgccatgtctccatggaagctccggggcgaaccaaaccaggcgtccacaggtcggcttgcagccggtgaccgaccctctctgcggcggcgtttcaggttattttcccgtttcacagcttataacataccaatgtataccataaaaacaggggaaatgcaagcgcgaaatgcacaaacctgagaaaaacggcccggaagcagaattttattgcacgtaagcagaaaatgtgataacatacaatcagtatcggccctgtcaaaagacgggacctgtgagggggagtaccatggataagatcattaccatcagccgggaatacggcgcaggcggccattccatcggccagcaggtggcaaaggaactggggatcccgttctatgaccgggatattttgaaggcaacagtccagaccagcggatttgatccggatatggtggagcacgatcaggaggatgtatcctccacgaatttcttcttcaagagcatctgctcctttgcggacgcctccttttctgacacccaggacgccatccacgatgtgcagaaggcggtcattctccatttcgccaaggagggaccctgcgtgatcctgggccgctgcgctgacgagatcctgcgggaagcgggcatggagagcctgaacgtgttcatccatgccgacgcggtgcaccgggcggtgcgggccagcgagcttaccggctgcacggacgcgacggagctgcagaagatcattgccaaaaaggacaacagccgtcatacctattacaaccactataccggcaaaaagtggggcgacagccataactaccatctggtactggatagcggcaagctgggctattccctgtgcgccaagcttatcatcgaagcggccaagggcgaataagggcgttaaaagcagggaacagtaatgttccctgcttttttcaaatacaaactgactggataacatagaaaaagggggactgaccatggaagtgacaacgcttatccggacggtgggattggatcttttgaaaccggcactgccgcagagacagctggacggccataaagggacctttggaaagctgctgatcgtaggcggcgcggtgggctacaccggcgcgccctatctcaccgcgtcggcggcggcacggaccggctgcgggctggtgtcgctgggagtgccaaagaccatctggcccatcgaggcagccaaatgtgtctccgccatgccctttccgctgccggagaaaaacggtatgctggcgggaaaggctctgccgcaaattctggaaaagctggacggctacgacgtgctggcgctggggccggggctgggccgcggccgggagactgcccgcctggtgtgggagctgctgaaaacggaaaaaccgctggtgctggacgccgacggcataagcgccctttccgggcatatagatctactggatgcccgccggggcaggcccacggttctgacgccccatgaggtggagttcgcccgcatcggcggcgatctgagccgtggggaccgggaacgggcggcacaggacttcgccatggcccatggctgcgttctggtgctgaagggccaccggaccgtcacggcgtcgccggagggggacgttctggtgaacacaaccggcggcagcggattggccaagggcggcagcggggatgtgctgaccggcgtcattgcttccctgatggcccagcgggccgacgcgcttcgagccgcggcggtgggagtctggcttcacggccgcgccggggatctggcggaacaggagctgacggcttacagcgtcacaccggaggacgtggtccggaaactgcccgacgccatccgggaaattctggaataacggagggaaacagggtgcgcatcgaaaactgcgtaccaatgatagccctgtgcctgctactgtgcggctgcgggaaacagacagcggagccggcggcggacctgcggtcagtctatcaggagatgtccggctgtgaaatgacggcggaggtcacctgtgaacagtccgggctggaatggtccgccacgcttcacggtacctatgtgccgggcggggagagcaccgtggaggtgctggagccgctggaactggcaggcgtccgggcggtcatccgggaggaaggctggacgctggaatacggcgatctctgtctggatgccggaacattgacggaggaagccgtcagccccgccacggcactggcccggatcgtgtatgcgctgcgggagggctggctgctggaacagaatgacgaaagccgggagggagtcccctgtacccggctggcgctggaccagaccggcgcgtcggacacggacatcgtgaccaccgtctggctccgtcaggcggacggaacgcctttcctcggagagatcgccgtggacggcgaaacaattttgacggtacggtttacgaaattcggattttgtgatacaataacggataattcgtaaaaacagcggggaggaccccgcaaatccacataagacaggtgaatcaacttggaggatacgattttacggcgcacctgggcggagatcgacctggatgctttggaacacaactacaatgtggcccggcagaagattggccccggcgtgaagtatctgggcgtggtgaaggcggacgcctacggccacggcgcggtgcaggtggcccggaagctggaacagctgggggcggactatctggcagtgtccagtctggacgagggccgggaactgcgccacggcggcattaccatgcccattctgattctggggcatacccctccggagatggtgtcccagctcatcgaatacaacatcactcaggcggtgtccgccaaggccaaggcggaggcgtacagcgccgaggctgtgaagtgcggcggcacgctgcgggtccacatcaaggtggataccggtatgtcccggctgggctttctggtccggggcgagcatttcgaaaccggcgtggaggccatcgcggagtcctgcgccttgccggggctggacccggagggtattttcacccatttcgccgtctctgatatggacggcgcggactatgaagcgtatacgagggagcagttcggcgtctttacccatgtgctggacgcactggccgccaagggccgcaccttccgcatccgccattgtgccaacagcggcgccctgacccgctatccggagatgtatctggatatggtccgccccggcatcgccctttacggcgtgggggatgacgcggagcggctgggcctgcggccggtgatgcggctgaagtcctgcgtgtccaccatcaaggtccttgacccggataccaccgtcagctatggccggaccttccgcacggagggaaagacccgtgtgggcgtactgcccatcggctatgccgacggcttcttccggggtctctccaaccgcatggcagtgcagacggcctacggcccggcaccgcagcggggccgcatctgcatggatatgtgcatggtggacctgacagacctgccggaggtaaaggtaggggacacggtggaaatcttcggccagacccagagcgtagacacactggcggcgattttggacacgatcccctacgaactgacctgtgccgtgagtaagcgggtccccagattgtatatggagaacggcaaggagaccgagcggagcttgcggctgctgtgagcaggtcagttcgccgccgcaaatgcggcgtacaagcgttttgcggagcaaaaccttgaaatgggccgaattcatttcggaccatttg

SEQ ID NO: 12180 - DNA, 5211 bp, Unknown
  gut microbiota DNA sequence
aagcctgcggctgctgtaagcaggcacctgcactccgtcaggcgcataggatgacacggggcgggacaccggaattttgccccggtggtataaattccggtgctgcgtgggagaatgaaagtggcctcaccgaatggtgacgggtacttctttcggcggagtgtgaactttgtggatacgagtgtcaagcgcggcgatatttactatgccgatctctctccggtggtgggcagcgagcagggcggcgtccgtccggtgctgatcattcagaatgacaccggcaaccgatacagccccacggtcatcgcggcggccatcacctcgcagacgggcaaggcccgcctgccgacccatatcgcccttccggtgaacgagaactgcggcctgaaccgggattccatcatcctgctggagcaggtgcggacgctggataaaaagcggctgcgggaacggatgggccatgtggaggaacaggtgatggagaaggtggacaccgccatcgcggtgagcttcggactgccccacgaccagtttgtataagagacagaatactgcctcccggcgggcggaaacgcccatcgggagggagccaagagacaacggaggtacatatgaaaaatagatgggcattgcgtctggcggcgctgacactggtaagctgccttgccatgagcggcgtttccctggcggtggagcccggatctgccaccgatccgctggtgacactgagttatctgaacgatgtgtttctgggacagatcatgaccaaggtagaccagaagatcactgcccggaacagtcagctccttcagcagtccgggggcgcgggcggaatgtccggcgtggaatttgccgtggtgaccctttccaagggacaggtcctcaccggagacatcggctgtgaagtgatgctccgggtgggtacggcctcctgcgtgtcgccctccaatccgggactcatcgacgagactaccgctgcctccctgaataacggcggcgcgctggcggccaaccatctctatatgatgaccattgagggccggggcgtcaaggccggctccgacaccacgaagctgctggtgcggggcagctacaccatcgcctgaacctgccatacatagcgttcatattgagatccgcctgtgcataaactgatgcacaggcggagtgttctattgataagaaagtggacttccagcggcggtaaggaaaggtgtgtgcgggactacgcccgcaggcgtgtttcggagcgcaaccgccgtaaggcggctcttagcgcggagataacccaagaggggatacaccgtcggcccaagccaaccagcggatcctgcgtatccgctggttgggagccttcctcgaaacaggctcgcttgatccgccactggcggcgcttcgcctgtttccctgcaccattgaaatataacctgtgcataaactgatgcacaggcgatttttttgccgggaggtggcggctcatggacaagtatccggtttttcgggaggagcagacggtgggggaattgaccgtcgccccggatgccctgtatacggccttttccgtctcctgccgggggcgggaggggctgtggtgcgcgtgggcggtgggggagacagggaatctccgtatcggtgttctggaaccggagaacggctgcctgcaaattcgccgccggttttccaaacggttgacagacccgttgggacccatcctccggggagaactgcgccctttaggagaggagcgggagcaatgggaaccgctgagaccggaactgctgagaagtccatacctccgctgccgcttgggcgggctttccgatgtgctgacctgtcggccggagcggggccgtctcatcgccgtcccacgggatgacgcggccccttttcctctggaagccatgttttgctttgcccgttcccggcgtttgcagggacgggcgtactgggtatttcgctttgatgaccgggaatggcctgttttttgaaaaaacttgaaaatagggataccacatttagaaggaatgtggtacaatatccgcagtatcctgtgctttccacacatgaaccgggttttcccggaacgtttatcaggaggtcaagcctatgaaatgcccctattgcggtcaccccgaaagcaaggtcattgattcccgtcctgcggacgaaaacgccagcatccgccgtcggagagagtgtctttcctgcgccaaacgctttaccacctatgaaacggtggagagcctgcctatggtggtcatcaaaaaggatggcagccgccagagctttgaccggcagaaggtcctgcggggcatgatccgggcctgcgagaagcggccggtacccttggccgagttggagcgcattgccgatgagatcgagcaggagctgcagaactccatggagcgggagatccgcaccgaagccgtgggcgaaaaggtgatggaccggctgcggaaggtggatcaggtggcctacgtccgctttgcctctgtctaccgccagttcaaggatctggataccttcatggcggagctgaataagctcctggcggagaagtgatcgtgcttctgcacgatccggaaattcctatgatggattctaccgcacaatgagcggaaaattgcggaaaaaggggaatggccgtatgagatcgaaattccggatcgcatttgacattctgctgattactgcgtcatgcatcatattcatttataatattttgatgcagcggaggatcgtgtatctgtcatcagttatagcagtatgcggcacgaccgcatttttggtaagagatataatggtgctgaaacaggaaaaataggcgggaggacaagcggccttacagcacattccggatgttcagcgcttccatctccgcgatgagccgcagctggtcccggaggtcggacagctccgcgtggaactccgaaagctcctccgtttccccgaaggcgatggtccggcggtacatggcctccgcgtcatccactgcgtcatggtgggagacgatgtgaagataggtctggctgtgggaccagtcatcgtagctttcccagagggcgtccagcgcctcggcccactccccggagagggccagccggtccgccccttgcagctgctcccgccagcggtccgtttctccttccatgtggcggatattccacagggaaaacgccaacagagccgccaacacgaaaatcggcggcagcagcatccgtttcatgggtcagcctccttgggaacgcagagcgtttttccgttttcatccaccgtcaggagaaagacctccttggcgctgcagtgctcctgcttcagaattttttgaagccacacctcatcccggccgcaaagacggagattgttccgcaaaacccggccgtcattgatgagaacggtggggagagcgtcctcctccagggtcaggctcaggtcctccgccgtgggcggcttggccttggcccatggcagcacggacagctgcccggagttttccagcacggcgtactgcacctcctccacggagagacacccttgcccccggagctgctccaacagctcgtccagcgtgtagcggtttttccgcatggccgcctgctggagcttgccgttgcggatcaggatggccggtgtgccgcacatcagcgcccggaaccgcagattcagcagggaaagctggctcatcagcagcgtcagggacaggagaattaaaatagggatgaccccggccagcagcgggatgccgaaatcctgcatgggcaccgtggccagatcggagatcatcatggtcagcaccaactcgctgggctccaattcgccgatctgccgctttcccatcagccgcagacccagcataatgagaaaatagagaatgaccgtgcggcacagtgcggtgatcatgtccgtcgccccctttttgttccagtatggacaactgatgggattttatacggccagctggggacagacggcttgaaaatttacattttgcctcttgtatctactgtaaaaaacgaatatgataggaacgatttcaaattaaaagacaaaggagcttattgttctgatgggtaaatattttggtacagatggtttccggggcaaggccggcgttgatctgacggcggagcacgccttccaggtgggccgttttctgggctggtattacagccggaagcacgcggaggactccgcccgcattgtcatcggcaaggacacccggcgttcctcctatatgtttgaaaacgctctggcggcgggtatcacctcctccggcgcggacgcatatctgctccacgttaccaccactccctgcgtcagctatatcacccgcacggagaatttcgactgcggcgtgatgatctctgccagccacaatccgttttatgacaacggcatcaagctgatgaacggcgtgggcgagaagatggacgacgcccttcaggcagagctggaagcattcatcgacggtgatcccgcttacctcccctgggccactgagggaaaggtgggcaagaccatcgatttctactccggccgcaaccgctatatcggctacctcaccagcctgccctcccggtcctttgaaaagcacaaggttggtctggactgcgccaacggcagctcctggatgatcggccgggcggtgtttgacgcgctgggggccaagacctatgtcatcaacgatcagccagacggcgtgaacatcaacacggactgcggctctacccacattgagggcttgcagctctacgtccgggagcatcatctggacgtgggcttcgcctttgacggcgacgcggaccgctgccttgccgtagacgagcggggccaggtgctgaacggcgataagatcatgtatatctgcgccaagcacttcaaggagcgtggccagcttcccagcaatacgctggtcactaccgttatgagcaacttcggcctgtacaaggcgctggacaaggcgggcatccgctacgaaaagaccgccgtgggcgaccgctatgtttacgagaacatgaaggaaaatgacttcatgatcggcggcgagcagtccggccacatcattttccggaagtacgcccacaccggcgacggtctcatcaccgccctcatgctcatgcaggtgatgatcgacacccaactgcccctgagcgtgctggccgccggcgttaccatgtatcctcaggtgctgaaaaacgtccgggtggacga

SEQ ID NO: 12181 - DNA, 2443 bp, Unknown
  gut microbiota DNA sequence
actttaacaaagttctgaaaataagagcagcgtggcgaaaatattttcgccacgctgaacgccgggggagctatgctcccccggcgtgtactttagtcttgatcctcggcgtccgcagccggaacgttctccggctgttcatgggttttctccccgaacaccgtcaggaaggcgtcccgctccatggtctcgtgctccagcaggtactgggccacctgctccagcttatcccgctgcgcttccagaatatcctgacagcggcggtaggcgccgtccaccagatccttgacctcctgatcgatctgggcggccacagcctcggaatagccccggctgtgccccatggtacggccaatgaacacctcgtcattgccgctgtcaaaggacacggttcccagccgctcgctcatgccgtacaccgtcaccatcttccgggcgatggcggtggcacgctggatgtcgttgctggcgccggtggaaatatcgttgagacaaagcttttcagccacacggccgcccagcagacccacgatctgatcctccatgtagtgcttggaaaggtaagagcggtcctcctccggcagggaaatggtcataccgccggccatacctctggggacaatagtgatctggctcaccgggtcttgtcccggcagcatgtgcatgaccaccgcatggcccgcctcgtgataggctgtcagttcccgctcgtgctgggggatcacccggctctttttctccggaccggcgatgaccttgatctccgcatccttcagatcctgcatggtgatgaaatgctgatccttccgggctgccaacagtgcgccctcgttgatgaggttctccagatccgcgccggtaaagcccgcagtgccttgagccagcttacggagactcacatcctccgcaaggggtttccccttggcgtggaccttcaggatctcctcccggcccttgatatccggcaggcctacatacacctgacggtcaaaccggccgggccgcagcaatgcggggtccagcacgtccgcccggttggtggcggccaggaccaccacgccctcgttggcggcaaagccgtccatctctaccaaaagctggttcaacgtctgctcacgttcgtcatgaccgccgcccagaccggtgccgcgctggcggcccacggcgtcgatctcgtcaatgaacacaatggcgggggactgctttttcgcctgctcaaacaggtcccggacacggctggcgcctacgcccacatacagttccacaaagtcggaaccggaaatggacaggaagcccacgccggcctcgccggccaccgccttggcaagcagcgtcttgccggtacccggagggcccaccagcagcacgcccttggggatccgggcgcccagatcgatatacttctttggattttttaggaactccacgatctcccggagctcctccttttcctcgtcggctcccgccacatcggcaaaggtgacctgcttatccttttcgctgagaccacggatctgtgcggagccaaactttgccatccggtccggccccatgcctccctgtgcccggacgctcatgaggtaccacataccgccgaacatcagcgccatcatcagataggggagcatgatccccagccagtcagtcccctccggagggggatagctgtaagatttgatgattcctgctgctttctgctcctttaccagatcgttgagatcgctgtaaaagagggtatagtcatggatccggcagcggaccggctggtcgctgcccttgacctgcagcatcagcgtgctggaatccgtaaagcggaaggcctccaccttctgctgctcaaaaagctgcaccatctcatcataggtcatctcatcccgctgattgagctgggtcagccagctgacacataaaatcacgatcagcatcagcggcagaatgctgacgccgggtcttctttttaccatacgggggatcccccctttctgtattatcgccgcatacaggcggctgcgacggttcccgcacctgccgggaatcgccggtcatgctcaggtgttttcgtaaacggcgggcttcagcacaccgatgtaaggcagattccggtaaagctgggcataatccagaccgtagcccaccacgaattcgtccggcaccacaaagccggacagatccgcttccaccgccttttcccggcgggagggcttatccagcagcgtcacgatagagatgctcttggcgccctttgccatcagatagcttttcaggaaggccagagtattgccggagtccagaatatcctccacaatgacaatctcccggcccgtgatgtcctgctggagatcatgggtgatctgcacccgtccgctggacacggtgccgttctggtaagagctgacagcgatgaactccacgtcgcacatcagctgggaagcccgcatcaaat

SEQ ID NO: 12182 - DNA, 1051 bp, Unknown
  gut microbiota DNA sequence
aggatctgcgcgccgaggaaatactcccgctcgtccccgtggaagcccagagccagattggcctccagagtgtccatgccctgctcctgcaattcataggcccgcagcttgttgatgaggccgatgccccggccctcctgccgcatatagagcaggatgccccggccctcgttttcgatctgggtcatggcggcggctaactgttgtccgcagtcgcaacggagagagccgaaggtgtctccggtcaggcactcggaatggacccggcagagaacgtccttcccgtcaccgatgtcgcccttcaccagcgcgacatggtgctcgccgttcagacggctcacaaagccgtaggctttgaaatcgccgtatttcgtgggcatattcaccgccgtgacctgatccaccagcttttcgtggcacttgcggtacgcctgcaagtcccggatggtgatgaacttgatgccgaaccgctccgccagcgccagcagctcggcggtgcgcatcatggtgccgtcctcccgcatgatctcacagcacaggccgcattccttcagccccgccagacggcacaggtcaacggtggcctccgtatggccctcccgctccagcacgccgtttttcttcgacagcagcgggaacatgtggcccggtctgcggaaatcctccgccttcgcaccctcctccacgcaggccatcgccgttacggagcgctcggcagcggagatgcctgtggaggtggaaatgtggtcaatggataccgtgaaggccgtttcgtggttgtccgtgttgttctgcaccatctgggggaattgcagcttgcggacaaaggcctccgacatgggcatacagatcaggcccttgccgtgggtggccatgaagttgatgttctccgtggtggcaaactcggcggcgcagatgaaatcgccctcgttttcacggtcagggtcgtctgtgaccagaatgatctttccctgtctcagatcttccagtgcctcgggaatggtattgaaattcatggtaaattctccttgtcaaaagccgcagcgcagca

SEQ ID NO: 12183 - DNA, 2286 bp, Unknown
  gut microbiota DNA sequence
agcacggcaagtgtagctacacttgcgaaaaacggcgtgggttgaccgggatttccttgcagagcagcaagcaaatccggtgagtacccacaccgaaaaaacagggcgttccggctgaccgccgaaacgccctgttttcatttttgggatagtcccaagcccttatgttcgtgaaaaattacgaaagctcaccagctatactctgataactggaatgtgtaggattcgccgggagtaatgtcatagatcacaacagagtcatccttgaatttatctccggcgctcagagaagataggtatatattgccggagtctaccagataacccgcactgtcatacagcttataactaatcatatcatacccggaatcactgctcccgctcttcttttctccggtaatcgtaatggttagttgtggagaatagtctttgtcaaacttaaattcggctccttgaatttggatcacggatgccgaactccccatgaagtctttcaccttcagatccagcggaaatgaatcaaacgtcacttgaacatcttcaataggcaagcaatacagagcatcgcagtttacttcgtcaaactgaactgcgttttccttgtacacggtgaaataaaccttcccgcttgcggattttccggctttgatctcagcggcagggattctcacattggcaagatattgctctccggcagcttggctggtatagtagctgaaatcatcaggagaaacggactttgtaccagcatagacctcttcatccgcatcatttacgattcgaatatccacatcgacatcggctgacagggacttatcatttttatcagccaagccaaagaaaaggctgtaatcacttgtcccctcgttatattggaaagaccagcttttcagtgtttcaacacgggatgctgacgatccgcacccacttaacaacaatgcaattacaagtccacacacaagaaagaatcgtttcatttctgcgtctccttatctgcctgtgcctttattacacggaacatttcttgtttgagcaaacgcttttgctttggatctatcatgcagtaattgcgattgcactgctcgcttagaaagcaagtctcgcagataagctgttcaacttcctgcataatcagttcatcatcgctgggaagctcgtaggcttcgatcttttggatgcctgtcgggttacgcagtccgtagtcaatcagttttccatttccggtttttacatagcggtagacctcggcaccgaatgaaacactgtcaccaacgttgtactcttcaaagccggatttgtccatccagacgtgatcctctttatcatcaaacattgtcccatcggtgtacattccactaatgaagacccgcttgaagcaaatatgttttggcttgactttctcaatctgtcctttgaattcaagcagataattaaatatgccgtttgcaaatccggaacgataagcgtgccctaaagaagcaagctggacatccagatattcatcataggacatcttttctgcgccaacaacatccttacgagaatccggattgaaaaatacgaggccgtcttcctcatctacgcatgtatcttctccataattgattgccaaaagcgattttttatctggatacttggcaatcagggcagctgccttttttagccgctcctgccgcttttgtctttcgcggcgttcgcgctcatgctgttccgcaagaatgcgatcctctatgtgtctgctttcggcttttgtcagcaacggcgatatgcggtcaacgcaatcgtaatcgccattttccatgcgcgttttgaagcggacaagaacttctttaagttcctcagtggtcagataccttgccttgctaatagaacagctatggtaacaccccgtgattatgttgccatgcccatcgccgtacataatggcggtattccatgggcaaaaatagtgctccttctggacgagccgtcctcgcttcaagccctcctcaaattccggaaagaccgccggattgccgcagccctcgtgatcctccacccaaaatccggaaggacccttgtccgcgtggcggatcatcacattgattgcatcgaccgtagcctttttcgtttgcttgttattcataacccaaacctccgttaataagtgccgccagacagcgacctgacatgttaacgtggtcttttagagtatttataaaaattatagcatgtttctttgtgcttgtctatcctacttacttggccggacaagcaaaaacagctttcaaatattcataggttttt

SEQ ID NO: 12184 - DNA, 14160 bp, Unknown
  gut microbiota DNA sequence
gctcctcctcgtaggcgctgatgcgggatgcgatcgtatgttgcctgtttgtgcggataaatcccaccggagcgggtcattccgccttcataatgacctttagccggtggaccagcagaccggttttcagttcctccagatcaatgacggcgatgcccagctgagcggcccggtgacgggcggcggcgttgcagacctccgtggtgacgatggccgccttggcgcccttgccgccgaagcggtcccggaggatggccagctcgttcagggcctccgtcttgatgtcgcaggccttgcagcttaaaaacagggggatcacgccccgggcggccatgacgtcgatctcgttggagacgctgccgtggcccagtacctcatcccaccgcaccacggcgctgctgataacgtcatggaaaatggcggaatccacgcaggccttgtaggcatacaattccagcgcgctgcccacgtcccgcagccacgcccgggtgttcagatcccggaaccggaaggacacctgctggcctgggacgatctccagatcctgaataaagccgatacgggccagctcccgcagcgcgtcctcgttggcggtgttgcgggagccgcgctcgcccttcacggtgtagccgccctgcacggacaggggcggggtctgaccgtattccgagggggagatccgctggatataggagatgatattgggccagtcccggcggaattggaggaagcagtcgaaaaacgggtcgaagtccgggaggtattgggataggatctgattgtccacccgtccgggcagcagcgtgccgccggccatgaggaagaaatcctcgatggaataggtcaggccgcagggcagctcgtcggcaaaggccgcgccggaaatgtcataaaagcggtttttcttccgggagtaggtgaaggcgggcacgccctttttcgccgcgaacatccctgccgcgaacagggccgcatcgctgccgccggtgacgtcgatggcgcagtccgggaaccgttccccgatggtaaacagctgccgcaggatgcggtctgccttgaagagactggtctccacaaaaatcagctccggctcccagccccgccgccggaaaaaggcggccagagtctcctgccgggtgcgatcctgggcgatctcaccggggcagaggtagacgatgcgccgggggcggaacatatccggtgccagaatattctcaatggcgcgctcgtcatacagttcgatcagggtgttcatgcgccgtccgcctttctttgtttttccccattatattgcgttccggcggggaacacaatagacaacccgcccggcttgtcggaaaagggacgttgaattcagaaaaaaacagcaccgccgaagcggtgctggataagggcgaagcaggggggatcactcctccgtgcggtccggcagggggacctccggcatcagctcccggctgaccaccgtgaggatctcctctaacttgccgcagtcctccggggaaaagcgggccatgatgcggtccatgacctccgacatatagttggaggagatgttgtagtaatcgatatacttctgggtgacctccagatggaactcccggcggtccgagggggactggatcttgcggatgtagccctttttcaccagactgttcaccttataggcggcgttgggaggggagatgcacatgaaggtggcgaactcgttcaccgtaggccgccccagcgccatgatgctctccatgcagaaggtctccaccgtggtgagactggcttcccggtcctgaaaccggcggaagatctcctgataaaagtgcagcttgaatttggtgtatacttcattaaaagcctgatgcagcatgacgcttccccttcccacggaacgaaaaaatctaagcttagtataccaatcctgacggaaaaaggcaagccgttaccggacggtgggggacagttttcccatacaggccgctgtgggtgttttcagcctttgtccagaacccgcagtcggggaagaacatgatgtggaaccacaaactcgcactccatatcgctgacacctcatggggtgaaatccgccgacagcttacctgcaaagccgactggtatggaaaggaactcgttgttatcgacaggttcttcccatccagtcagacttgtggttgctgtggttaccgcaacaaggaggccaaagacctcagtgttcggctctgggagtgcccggaatgcggggcgctccacgaccgcgacatcaatgcggcacagaatattctcaaagaagggctcaggaaacggacacccgctacctgatacaactctctcgtacacatggtagggtgggacaagcccgaacctatccgcttggggagaccatgtaagaccccgctagtgtgggctgcggccgctgaaccaagaatcccctgactccagtcatggggagtgtcaaggggtaacttctcccaacagaatgcggatgtagtcctgccgggcgttgatgatacggccaacagaaacagtttccgtttcaatacggtagagggcaatatagctttccaccaccagcatccgcagatcggtttcatagccggtctttgctccaatggaaacacccattttagggaattgtttgagctgggcacagccatcgaggatggcttttgtgatccgactggcagcggtggggttgtgaagctcacttttgatataccgtttgatctcctggaggtcgcatagcgactccggcgtatatcttagcttcattccgttaccccaagggtgcggtaagcatcttcctcagaaacccagccatccttttcagcggatttccagcctttttccgcttcatccaacaggcggcgcatggctttcgccttcatatattccgcattctcaggcgaagcaagaaacggcaggccctccatgtttagggattgctgaatgaagatattaacggcatcggtaaaggaaaggccctggcgggcgtaaatctcctccacacgctgtttgacttctggattgatccgcatttgaaaggttgcggtcttaggtgcagatgtgacattgatcgtgctcatagcattcacctcaatctcagtatataccaaaaatcggaaatgtcaatacaacgtcattacaatttggggcgagggggacttggacaacaactggatcgtagaaaatctgaccaacgcctttggcgtctggaccagtaaaatgacggaaatgtggtcgctgctgacggaatcgccccagaccttcaagggcggtaccatctggcagaccagccacattttttcatccattaaaaaattgcgttgttgaagtttttacttccgcatactaaaatgatggtaagcccctgctcttttttgagagcaatcaaacctataaagacgcgtcagcaacgtttgctctttttattagcccgattctgtgctgtggtagatataccacaagaaatgcttcgaccgggatgaacactgaacatagaaagcagaggtgctgtatatgtcatacccgaagccattatccgagaaatcactgaaacggctgtatacgcagacggggttatcaacggaagcatatgattttctgcattccctgtttgccgcctgcgcaaatctgtatggcgccatctcccttcgggatgtgtggtcggtttatcgggagctgaacagcgccgcgccccgtattcgccgacaggacctcattgctttttccgccatcgtccgccgggaggtacagccctatcgggtttacgaaatcgaagaactgtacacagaggagcctcacaacgatctggatcggcacatcgtatcgaaggaactgattggcaccggttatggcaagatgttttccttctatgcgttgatggaaggactcggcgatcattcgtactgtgttcctgacaatttcctctcttatgcggcaccgtccgcatcggcagtggaaaaatcactggtggattttatcggaaatctggaatctaccgcgacggaatgtgcgccaagacagcacaaagcgtatcccaacgaaaatcgcggaaaaaaactggggacgttttcgttcctcaatttgagcgagcggtttgatctggagtattataaaaaagtccctgccacatattccgctctgctggaagaatacagcggtacagaagcggaaaaaatcatgcgtcagcatagatgggatgaaaatattggccgtctgcacacaacggaaatcattcaaaacctggaaaatgaactgcatgaggtaggcgtccgcctgacggaaaagcagcaagatatgcttatgcagctcatcgtgcagtatcacaatggaagccgcttgtggtgtctgcgcggttggaagccaaatgaactggcagatatgcacggcaattccgacgttccaagcatctcgttcggtccgggcttgcagcaggcttttgctgacggaataatggacaagggtgatctcgttcgcaaaatacaggagctgggatggaaggtgatggaatgagtgccgcagataaagtcaaggaagcggactggagacttttcagatcccgtctcccaatttggcaggaagcctatatggagcggctgaaccgcgaatatatcgctctgctctcagggaccggctccgcgtccgagaagttctgggagctggaaagacgcatgcgcgaggacaaaaggcggggcggcgtggtgatgcgcatgagccgcagcaatatggaactgaacctattgagcctgctgtctgacggcgtaatttccatcgcggagctcgatgggttcagcgaggaactgcgggaaaagctgacctttgtgctgcgggatcatagagactgggaccatggcgacagttgagcaagtgcttgcccgtctgcaaagatccgccttccgtgcaaagttccatttgagcgaacaggacaggcagtacatagcggacaagggtatggagaccattcagcgccacgctgccgacttcgtcagaacgcggcttgcaccggcaagcatccccaatgacggcaagcagacgccgatgcgcgggcatccggtgtttatcgcccagcacgcctgcgcctgctgctgccgcggatgcctgcataagtggtatcacgtcccggtgggacgggagctgacggagaatgagcaggagcgcatcgtgaaactgctgatggcatggatcgcgcggcagcttgactgtgatatggagtgagaaggggagaccgcgggaatgtgcccgtgccggttggagcgggtttccgcccggtctgggcgggtttcctggccttttgacgcttccgtttctgctatgatcgcatacgatctgattttcggcgctgccgcgttcgccggtctgtgcgctggggtttccgacctttttttccacatcgagcagatcgattccggccttcccgcaaactggggccgtattctgaaggatcttgtcatgatcctcgttccggcgtttttcgtggctttgccgctcatgcttttgtgatcttcgcatatcatatatcccaattcgagcttgcggccccgactgtccaacccccacgttttcaaaggagggagggtacggaaatgcgaaatggaattgggagtatcatatggacaatacaataaggggggatgcctgctctcaatggataggggcagccgaaatttatgacgcgatgtaaaaactgtatgcgcacgcttgcgctggccctgacgctggccctgtctctgaacataagcgtccccgcgcgggccgccgtggacgagaccaacgcccaccggctcaacgcgctggggctgttcctcggcaccggcagcggctacgatctgggaggctccgccacccgtttgcatggcatcatcatgctgacccgtatgcttggcgaggaggacgccgcgctgtcctttgacggcccctgccccttctccgatgtggcggccggaaagcccagcgcctatacgggctacgcgttcgcgcaggggtacaccaccggcgtgagcgccacgacctttcaccccggcggcgctctgagcttcaagcactatgtcacgtttttgctgcgggcattgggctacgatgacggcgcgggagatttcacctttgccgcatcgctggataaagccgtggagatcggcatgatgacccgcgccagcgctgactgcatcctccagaagcaatacgcgctctatcgcggggatctggtggatctgtccgtcagcgccctgacgacgcctctggcggacggaagcgccaccctcgcggaaagccttgcgaaaaaaggcgtatttacatgggaagaaggccgggcacagggcctgatcggcggcgggcaggaggcctatgtccattcttctctgcggaataccggcgcaccaaagcctgagcagagtgccagttccggcgctgtgtcccgtgtgacaaagacctacgcgctgccctccggctccgtcagcgccgatgtgatcacggtggacacctccgcccccggcgtcagcgtccgggccgccatggtgaaccagaagctgggcgcttccgcgcctttcagcagcatcgtgtccgcttccggcgcggatgtgatcgtcaacgcgaatttctttgccgcctattccgggcaggataaattccccgtgggccacgttatggcagacggaacgttcctgtacggcgtttccggactgacctccttcggctttaccggctccggagcggtctatgtgggacggcccgccgtatttttctatgtcaggggcggcgggaactcctgggcctgctatgagatgaacagcaagacccagggaagcgacctgtctgtggtttacaccccggcgtttggcggaagcgtacccatcaagatcgacggcacggcaaccaccgttgcgggcggcgtgatcaccgatgtcagaactgtcacggcgggcgagaccgtggcgatccccgccgacggctacgtcatggtatttggaaatgactttacctctacctcttggtatcgtgagccagccgtgggaacgtctgtgaccctgactcccggactgaccgattccgacaccagcggcttccccatggaggagatcaccgccatggtcagcggcggtccccgtctggttgaaaacggcgcgatctgcaccacgctggagccgggcttccaggaggcgcgctttacctccgcggtaacgtcccgcaccgcccttggcaagctggcggacggcaagctggtcatcgcctctaccggctccgcttccattcagcagcttcgggagctgatgctccagttgggctgcgtggaggcggtcaatctggatggcggcggttccaccgcgctggcttatcaggggaagctgatccgctccccgggacgggaactgacaacgaccctgcaaatttttacccattgatccgttattttcaaagcctcgactccaagcgtcggggctttgttattgccgtagctcagcggcgcggttcggctttataggcgggaagcttttgccggacctctccgaaggatcacggcttcgaattgggtcggattgcaatatccctttgcggccagttcttctacaaacgaaccggcgttgactttcacgaccttggagacagtaccacaaaaataaaccttttcgctcacttgcggtagctgtcttgtttttcggcgctcaggccccggctgctcagcccagaaaggacatggcagccagaagaactgtcagaaaagcgaagctgatggcggaaaagaggatgagaaagcgcttggtgccgccgggaacgcggcgggtgtattcccggaaggtgatgaggctggccagagaggccaccagcgttccggcgccgccaatgttgacgcctaccagaaggccgcgggcatcctgcgtgaaacggcttaggaggatcgcggcggggacgttgctgatgatctggcaggtgagggcggagatcagcatggtcccgtgggataagagccggacaaacagcatccggacaggctccatccgggcaaggttgcccgaaaaggtgaagaaagcggcaaaggtggccagaagcccccagtccacggacttcagcgcatgccggtccagaaaccagagcgccagaacgatgacggccagaccgggaccgtaggggatcagccgcagcaccatagcgacggccagacagaagagcccgccgtagaccgcggcccggcggcggtctacgacgacctgcgcctccggcaccgtaagccggtccttggggaacagcaggcagcaaaggagaatgaggacggtggacaggatgaagggcggcagcatcacggaaaagaacgtcccggcggggatgccgtaatagctgaagaggtagagattctgcggattgccgaagggggtgatcattccgcagaggttggcggcgcagttctggagaatgaacagcagcgcggcgtgcttttcctgccctgtgacggagaggacgaaccagcccagcggaagaaaggtcagcagggcggtatcgttggtcaggagcatggagccgaacatggtgatgatcaccagcgccgtgcatacgccccggacggtggaaaaggtgtgcaccatccgttgggaaagggcggaaaagatatccagatcccgcagtgcgcccaccaccgccagaacgctgaacaggcaggagagggtcttgaggtcataataccccagatatgcgctgtcgggaggaacgaagaaagcggtcgctgccgccgccagcagtgagatgaccagcatggcgttagcgcggcaccaggatcggatcgtatgcatgaaaagctcctttatttgggattgtcaggaatcctgcgcggatacttgcctaaagaagatagcacatttcttcctgatttacaacggattccttatgagcggaaggcgttttccgccaaaaagcgctcgaaggggagaccttcgagcgcttgctatgatctgctttggctcattcgccgcagccggggcagccctcgcaatccgtgcaggctgcttgctttttctcatattcgtacagcgttccctcagtcatgtgtgacagcgccgcaatgcgctcattcagcatatcccacatacacatgggcaggtggtcacgatgcccgcgatggagcgttacgcattcaaagcagttgccatggtgcgggcacttctcctgacagggacagtgatccccgctctcccggacctgcttcagaaactcctgtttgatcttccatgcctcctgcttttgcccacggcgatcaagatcgttttgcagaatggccagttcatttccatcgattttcatgatcgtttccctcttttactcatttactcttttgctcgggtgaaatgattgtagcagagctttacaggatccgcaagctattcctgcatgacggacttccctgcgcttggagtgggaatgcgattgacaaagctgggccgataacctaaactaagtagtaagttcgttgtcacggccgcggttcgtggttgaccggatgaaggcaggtggcagagctgcgataacggatacccaaaaaccgacacagaccgaaaaggtgagcgttcatgatacaaattggcttttgcgacgatgatctgtccatattgagtgagctgcgggtgctgctggaccgctaccgggtggagcggaacgtggaaatcacctccgcagcctttcagagtcccctggagctgctgacagagatcgagcgggggacccgctttgatattctgctgctggatgtgatgatgccgggggagaacgggatcgataccgcccgggagatccgccggtatgaccagagcatgaaaattattttccttacctcctcggcggaattcgccgtggagtcctacaccgtgggggcctatttctaccagctcaagcccatctggcaggagagttttttccgcttgctggactccgtgatcgcggaatgtgccaaaagcggcagtatgagcctgatcctccgctgcaaaagtggcatcacccgggtggagctggacaagctggaatactgcgaggtgctgggccgggccctgtggctgcacttgacggacggcacggtgctggagagcggcggcggtatggatcatctctgcgagcagttgacggaacatgacaatttcctgcggatccaccgatcctatctggtgaatctggatcacatcaagtccatcgtgcccaagaccatcactatggattctctggcggaactgcccgtcccacggggaaaatacgcggaattgaaggatctgtatttggaatacgccttccgcagaaagcaggtgtttctgacatgacggcggatacgatcctttatgcgtgtaataccgtggcggtgggactgttcggcatcgtgctctccgccgccttctgcaacatccggtggacccggcggaacgtctgctgcatggttgcttccaccctggccattttcctgatccaggggatcgtctatctggggatcgacccggcgctggggccgtatctctaccccctccatactcatcttcctctggcgatcaccctctgcgtgctgagccacgagcggctctggccggtgatctctgtgctgacagcctacctctgctgccagctccggcggtggctggcgctggtctgcgtgtgggtgttttccggtggagatcggatgcagtatgcggtggagctgatcgtgacgctgccactgctgctcctgctgctgcggacggcaccggcagtgcggtccgtttcccgctattcggtgaccgtccagtgccagttcggctgcacgccggccctgtattacgcctttgactatctgacccgggtctatacgaatctccttgccgacggagatccggctgtggtggagttcatgccctttgtgtgctgcgtggcgtatttgatgtttctggcgcggctgtcgaaggagcaggaggcccgggcccatctggagcagctgcaaaacagcctgaatctgcaagtcggtcaggcggtgcgggagatcgaagctctccgggaatctcagcagaaaaccagagcctaccggcacgatctgcggcaccatctgcaatacctgtccggctgtctggaaaacggacagtacgagcaggcccagcggtacattcacgagatcaacgcggaaatcgaggcggcccgcgtggtgacctactgcgagaacgaggcggcgaacctcatcttctccgccttcgcggcccgggcggaggctcagggcgtgaaattctccctgcaggcggtgctgccgcacatcctgcccatctcggagagcgatctgtgcgtgctgctgtccaatgcgctggaaaatgcccttcacgcctgcaagggggcagacgacagcatcgaggtacagacctacgagagaaacgaaaaattcttcttgcaggtggtcaacgactgccgggaggccgtgcggttcgaggatggaattccggtaacggaccgaccgggccacggcatcggcgtgagcagcatctgcgccattgtggagcggtatggcgggctttacagcttctccgtgaaggagggaaagtttgtcctgcgggtctccctctgacggccaaattacatttcatgtcattttggggacgtttcgtgcagagacgtccctttttcatgcttcccggtgtatcatgaccatatcaagaaccaacagcagcttttcctgtagccgtagctatgttgataagaaaaggagggccatgatgggagcattcagtgataacaaagagaactgtccggtctgcgaacatgtcaacgagcggcccttaacagaatctgagccgcacgccgccgcgcttcaggagaatcaggctttgcaggcggcgttccagtccacatactgcttccgcgccgaccagggggacggtcccctgtttctggatgaggagcacggactgctgcgcgtaggggaggacggctgggtcctggaggggaaggcgctgcgctccttccgtatctccgaggacggcgcgccgctgtttgaaagcggcatcggtaccttgaagtgcaccgtcagcgatgtgcccgaccaggtgaacgttatggcggcggagatcgcccggttccatctggagcgccagaaatttgagcgctgggaggccatggatggcctgcaccgcgcggggaccgagagcagcgaggagcgccgggaacgggagcggaccaacgatctgcgccggccccggttcgatgtgcctgcccccgtcagagaattccgggtggagctgaccttggatcacccttaccagcccgccttcgacgcgaggatcgccgctccggcctttgatcggaactatccgcggacggaggattatctgaagtcctaccgggaacagacagaggagctgcatctgctggccgcaaagctgatgcacatgatcgcccccggcgcgggggagacccagagcggttttggctgggtgcgttccatgcagatggcgctcagccggatgccgcggacgagagcgttcctcttctgatgtcgggcccagccgccatggcggcggaggttgatcgagcaaaaacgaatactattggagatacaaaaacctcgggcgctgtgcttgcacagcgcccgggttcgtctccctgctgaaaatgaaacgagcacttgccggaagacacagttttccgacaaaaaggggatacagacgaaaccggcgagatgaccaaaggtggtccacgtatcacttagaatgcccaaactgaaaagttttttgttttagaccttaaaaacttgttgaatatacaaactattttgggtatactattagctgtagggaggcgatacgatgatcaacagaccggactatatcgcggcaatcgagccgtttatcgacaagccgctcgtcaagatacttgccggtatccgtcgctgcggcaagtctacgatttttgagatgctgagagaggagctgctgcggcgcggcgtaggggaggaccagatcatctgcaagcggtacacggagatggatattcccgagaacatcaccgccaagcagatgtatgacgagctgaccgctgccatggcgggcaagggacactgctatcttctgctggacgagattcaggaaatcaccggctgggagaaggcggtcaacagcctgttggaaagtgcggatgccgacatctatgtgaccggctccaactccaagctcatgtccagcgagatctccacctatctgacaggccgctatgtgtccattcccgtctatacgctgtcgttcaaggagtatctggacttcaaggccgacagcactttatcccgcagggaactgctggaggagtatatccgcttcggcggttttccgatcatcgcgctcagcgagtacgatgaacagagcgcctatcagatcgtcaacggcatttaccataccgtagtctcccgcgatattgtcaagcgtcaccgcatcaacaagcaggatctttttgatcgtgtggtgaagtatattatcgaaaatatgggtaagaccttctcggcaaactcaatctccactttcttgaaaagtgagcaccgcaaggtctcggtggagagtatctacaactacctgcgctggctggagcaggcgcttattatctacccctgcgaacgctatgacctgcaaggcaagagtatcctgaaaacgcaggagaagtattatcttgccgatgtctccctgaagtacgcgctgctgggttataaccgcaaaatgctggacggcgcgatggagaacatcgtgtacctcgaattgaagcgccgcggctacgatgtttacatcggcaagaacgatacaaaggagatcgactttgttgcaacgcgccgcgacgagcgcatttatgtgcaggtctgcgtccggatcccagaagcatcggaccgcgaagtgaggaacctgatggagatccgcgatcattaccccaaatatgttgttaccctcaacgagatggataccggcatcgaggacggcatccggatcgttcacctcgcggattttctgcttgccgaacaatggtgatcatctttcggctcattcggtaaccgtagaacccagtcatgttattttagaaaagcctacttgataatcgttacttcgcagtttttttgccattccattcatctgcacctctcaatctgctgccaaagatacaaaaaccccgggcgctgtgcttgcacagcgcccgggttcgtctctcctgctaaag

SEQ ID NO: 12185 - DNA, 9635 bp, Unknown
  gut microbiota DNA sequence
aaaacgctccgcgtttcaaaagctgattgaaataacggcgcacagcgccggctcgccgctttgcggctcgcaggaaggcaaaaagagattattcatccagcttgaggacagccaggaacgcctccgtgggcatttggacagtgcccaaggcccgcatcttctttttgccttctttctgcttttccaacagctttttcttacgggtgacgtcgccgccgtagcacttggccagcacatccttccgcatggccttcacggtctcgcgggcgatgacccggccgccgatggccgcctgaatgggaatttcaaacagctggcggggaatgttctccttcagcttctcgcacagacggcgggcacgggggtaggccttgtcccggtgggcgatgaagctcagcgcatccacctgatcgccgttgagcagcaggtcaaccttcaccagatcgctggggcggtagccggaaagctcatagtccagagaggcgtagcccttggtgttggccttcagggcatcgaaaaagtcgtaaatgatctcgttcaggggcatctggtaatgcagctccaccagatgggtgtccagatactgcatatccttgaactcgccccggcggtcctgacacatgggcatgatgttgcccacatactcgttgggggcgatgatgttcaccttgacgtaaggctcctccgcccgctcgatgagggaggggtccgggtagttgtgaggattgtccaccgtcaccagttcaccgttggtcttataaacgtggtagataacggaggggagggtggtcaccagatccaggtcaaattcccgttccaaacgctcctgaatgacctccatgtggagcatccccaggaagccgcagcggaaaccgaagcccagagcggcggaggactccggctcgaagctcagggatgcgtcattcagctgcaatttttccagcgcgtcccgcaggtcggggtacttggagccatcctcggtgtaaatgccgcagtagaccatggactgcaccggccggtagcccggcaggggctccgccgtggggttcgccgcgtcggtgatggtgtcgccgatccgggtatcactgacggtcttgatagaagctgtaaaatagcccacctcaccggcagacagggaatcgcagggctccagacccaagggcagcagatgaccgcactccacgatctgataggacgctccggtggccatcattttgatggtctgaccggtgcgcatggtgccctccatgatgcggaaatacaccaccacgccccgatagctgtcatactggctgtcaaataccagcgccttcagcggggccttgggatcacccttgggagccggaacattgcggacaacatcctccagcaccgcctcgatgttgatgcccatcttggcggagatttccggggcgtccatggcgggcaggccgatgatgtcctctacctcctgcttggacttcagagggtccgcagcaggcaggtcgatcttgttgaacacggggaggatctccagatcgtgctccatagccagatacgtgttggccaaggtctgggcctccacgccctgtgtggagtccaccaccagaacagcgccctcacaggcggccagcgaccgggaaacctcgtagttgaagtccacatggcccggcgtgtcgatgaggttcagttcataggtctcgccgtcctgagccttgtagttcagcttcacggcacgggccttgatggtgatgccccgctcccgctccagatccatgttgtctaaaagctgattttccatctggcgctgggaaacggcgccgcagatctccagcagccggtccgccaaagtggacttgccgtggtcgatgtgagcaatgatggagaaatttcggatattggattgcttggtcatagaaaaaacctccgtaggcaaacgtcccaagggacggaattctcaggtttcatgtgaaacggtcaggtctttgcgcctgccggtgtatggaactgataccagtagtaatcgtcccagaatttatcgtagtcgtagtttaccacaaagtcatgccagttggcgagagtttcccgataatttttctcggtcagccgatcggtaccggaatggatcttttccagcgccagcgcgcccgcctcgtcggagtgatgaacgtagtcacagtagtagtccaggtgctcgatgatatcccggtcaaacagcagtccgtgaagggtaacgttctcatagggcagcagcgtttcacaggccagctccaacgccgcaaacacggcgtccgtctctcccatgcggccgatcttgtcccaatagaggatgctgtaaggggaaaagtaaaaatcaaattccacctctgggtaccgctccgcccagcttgccgccaccgccagatttttggcggcgtccgccagcaggccgtcccggggcatcggctccggggcgatgtccggtcgggtatattcctccaaggcggtcatgtggttccaccagacggtatccatccacgaaaatcccttgtccagcgtttcgccctcgtcccagcgctgggccatcagggcgtagaggctgtaatagagcacgtccttattcaacaggtatttcacgtcattgatggtactggagtcatagagataatcgggcattgcaccggtaacaccgtcaggagaccgggtgaaaatattggtatccatggcgaacagcacccgcttgggcgggtgggtccgcatcagcaggcccatcacctgatcgaattcactgaaatagccgtcaggaatggtgagccgcaggcccgtgccgccgaaaacggtctcaagctgactgccgtagcagttggcggtcatggaggagccaagcagcaccacgtccgccgggttgttgcggacgatacccgccgtttggtagcgttcactgaagaagacaggctcccggtccgtgggcatccggtagtaaaagcaggggtccaccctgtataccacggcggcgcaggccgtcagcacaagcacaagccccaaaagcaggccccgggtccatttttgataggcgcgctgttccatggcggggcctcctttctttagaagttggaatagatgaatgtcaccacgccggtgaaagacaaaatggcccataccgtccacgccagcacatacaggccgctgcgccagttgggacggaacgtatccatctgacggatgacgttccgaggccacaaagccgccagcagcccgatccccaagatcagcgccacccgcaggtaggctgtataggggccgatgaccgggagcagcagctccagcgcgctgatctcccggcggaacaagccgttcaccagccacagacggatcccgcccatcccgccggtaacggcggttttcagcaaaagcagggcagaggacacatccggcgcccggaaaaagacccacgcaaggttgataaagaggaaggtcatggcccaccggacccagcggggcagagcgtcccgccgttttccccacaggcgttccagaacctgcgccagcccgtgaagcaggccccataggatgaaggtccaccccgcgccgtgccagatgccgctgacgaggtacaccaccagaatgttcaggtatgtacgtccccggccctttcggctgccccccaagggaaagtagacattttcccggaggaaggccgtcagggtcatgtgccagcgtttccagaactccgtaacggaaaggctccggtagggagagtcgaagttgatgggcagccgcagtcccagcagccgggcgcagccggcagcaaggtcgcaatacccggaaaagtcgaagtaaagctgaagcgtgtagccaaggatcacgcaccatgcggtcagggccgtcagctcagagaggctgccccagccgttgttcaccagcacgcccagattgtccgccagcagcacctttttggcaaggccgagaccgatggcgtacaaaccggctgcggtatcctggggcaggggagaggcctcccgcagctgggggaagaaattctccggcttcaagatgggaccagaggacaccgtggggaaaaagaagctgtaggtcaggtattctgccggagtggggacctgtgaaaaggtcccggcatagacctcccgaagataccagatctgctggaaggtgaaaaagctgatacccaagggcacgaagggcatccgtaccgcgccgccggtgaaaaaaacggtgtacttgaaaatccccaataccgcgatgtgatagcagacgacggcaagaaggacgctttttcggcggtgctttcgcagcgtgttggctgcaagatagctgacaaaagaggacaccgccagcagtccgcagccccacagagccgctggagcgccgccccagaggtaaaataccagactggccgccaaaagcacccaggttcgctccttgggcagcaaacggcagacgcagacggtgacggtcaaaaaggccagaaaggccagagactgcacattcatttcaggccggactgattcaggcggttgagttggccgtccgccgtgctgaggacttgaatcataccctgactccggccgggaaaggcactgttaagcgtctcatgagacatatccgggaaggcggccttttcacgggacagtttcgccagcgcacgggcgtagtccgtccgggccagagaggccccggcggaggcggcgcctgcagcgcagtcctcctcgggcaaagcaaaataggcggtgctgcctccggcggcccggtggagcagccggtaaagcaggtagatgtggcagcccagactgtccgccgcggcgttgatagcatccttgtctcccagcttgcccagcaggccgaacagcacgccgctggcgctggtgatgagcttgccccgcagggtggccagcacgctgccctggagcacattgcccggctcagcggcgttcaaaatttcctcggcggtgagcatactgccgtcccgtgccagtgtccggcccagcatatagtctgcggagacatgatagtagtcgcagaccttggacacaaaggcaaggcccggctcccggatgccgttttcataatggctcaaaagggcctgagacactcccaaatccgcagcggccacccgctgagaaaccccccgctctttccgcagcagggacagggttctggaaaattctgttgccatggataccctccgtgaaacagccggggcgctgccccggctgaattgattcaatacacagcgtatagtttaacagaaacgatactgtaagtaaagagattttcccggaaaaacagaaaaaaccggcgcattttctgcgccggttttccgatcattcagatattccgtgttcagaacagccccacctgattgggaagcacatcgccgccgatgctgcggagctggcggttgttgacctccagcagccggtcggtgatggtcattttccggaggatgtcccggacggtgcggtccagctccatgccctcccggtagtctgccgggaaaatgaaatccacccgtccgtctgccagcagcttttccacaccctgccggttgctggcctgatagacggcgatggcctgtccgccgtaggcccgcatcattttcatacaaggcacgtcggaaagaccgtctcccatatagatcatgttggtaaaggggacccgcttggaatcgtccggcatggagtcgttcagttccttatcccgggacacatccagaatccccttattgatcctgtagacaaactgggtcttattggtaaagttgacgtccagtttgggccagcaggcgtcgccattttcgttgtagtagaactcgcaggcatagatctcccggaattcctgagcgattccgctgccctcgatgatctcccggagaccggaggaaatgacatagtgctccacctgaacgcccagactctccccaaaggcgttgatccgggcaaaccactcccggacgccggggaacagttggatggactcaccgcagtggttcaggaaggcccggtccagcttgatattctgcgcggcgcactcctggatcatggtgtacatataggccagcaggccgtccatccggttttcccagccaaaggcgttggccctgccccagaattctgccggggtatacccaagggaggggatgaaggcgtagtcctccatgtccgtggtgcacagagtcttgtcgaagtcatacaggaaggcgatgatcggcgcttgcgtttccatatagctacctcctgaaagagcaaaaagcggccttgcaggccgctttttgtcaagtattgtaattacggccgaatttcagttcgtccagattgatctggcgtgtgctggaaaggtcgggaaaatccccaaaggggtcgctggtgtcagcggcgggatccgccgcttcggcaacaggctcagacgcttccgtctgggtctccgccgtgtcgccgtcctcctccggcgctgcttcgctgaacgcggccatgacgctgtcctcgatctcctgaacggagtcctccggtttggcttcctcctgaggcagctccaccggggcctgaggcagctcattcaaaagctggatctccttatcgcacacagcccggacggcagcagagaacttctccagctcctccttgcctttccgcagacgttcctccgcggcggcagcctcgtttttcaggcagttgatcctcagcttggcgtcgatctccgcctgcgtcatcatctgatcccgcttctgttcggcttccttcacaatggaatccgccatccgctgagcggtgagcagggtggcccgcatggaatcctcggtggcgcggtattcctccaccttctccaccaggaccttcaatttggctttcagcgccgcgttttctttgtagagagcggtataatcgtcagtcagctcatccagaaattcgtccaccatggccatgttgtagccgccaaaggacgccttggcaaaggaatgggtcgaaacctcctgaggtgtcagcatatccaatatcctccccgcttagaaatataagccgttgttttccagctcgtcgatgagatcgccctccagctccacgtggtaaggcgtgatgatataggtgtttgcggcaacctttttgatcttgccctcgccggcataagccacgccggaaaggaagtcgatgagccgccgggccacatccttgttggtggattccagattcagcaccaccgtccgcttgtccttcaattgatcggcgatctccgaggcgttctcaaagcggtccggcttcaccagcaccaccttcagctgcgtggtggcatggatgtttaccaccttattccggcgatcctccgctttgttgcggcggtcatcgaaggagcgctcacggggttcctcgaaatcctcatattcctcatcctcgtcgtcatagggatgggtcagcttcttcagctcgtccaaaatacccataagccaaaacctcctgcaatcaagtgggataataccgggcaccgaaaatcgcggtgcccacacggaccatggtggcgccatttcggatagcatcctcaaaatcgccgctcatgcccatagaaaggcactttaattcattatggaacaatttctcgttgatgtcaacataaagtgcccggacttcctgaaaatagcgaatattggtgtcccggtcgctgtctgcggggggaatcgtcatcaatccccggacccggacatgggacatggcctgagctgctctggcggcgtcctccaactgagcaggggcaaagccgctcttggcctcctcgccgccgatgttcacctccagaagaatgtcctgaacgatgtcctgtttttccgcctctttttcaacggcttccagcagggggagagaccccacggattggatcagggccaccttgcccaccacctgcttgaccttgttccgctgaagatgaccgatgaagtggagcggcgcgccgtcataggcgttctggctcagcttctccgtcatctcctggacccggttttcgcccagcacgtcgatcccagcggcgatggcctcccggcaggcggcggcgtcattcatcttgctggcgcctaccagcgtgatctccttggggtcccggccgcattctccgcaggcggcggcgatccgctgacggacctcctgaatatttgtctgaatggacatagaacatccctctctttctttatgaaacaacttttccgtcatacagatcccgtgcggcaacgatgatctcgtcaccgggccgcagccgcagcttctccgtggagccggcagaccggaccacagcgtaatcgtcaccggtgagcagcacctctaccggcttgaaccgggcctttgcgccggagacgcagtaaacaccggtgacattgacctccttgctggcagtctcctcggtttccgggtccttttccgtaacggtctgggtggccacacgcagcgcagccagagggacccgcagtccatcggtggtatccagaatgatctcggcgctctggcggcgcaggagcgtcagttcctgcaaatatgtattcccctggaaagtcaccacacagcggccgttttcctccgcgcccacggacaacagcgtgaccgacaggtcccggtctacattcttggtaaaccggagggacaggctctctccggttcccagacggttctggcgggtctgaagggtctgggcctcctgtgcggagaccacgcccacataataccagttgtcccccaggatcagctttccggtgttggcggggatctcggcaggggacagcttattcagagcactgggagtcagcgcggacaaactgtccggcgtcagaacggattcgtagccgtccaccacggcggaaaacaaaccggaccggggagaccggatggtctttacggagttagcagcctgagaccgcagggttttcaactgatttttcagttcctgcagctgtccgctgagatcctcggtgccggaataggtataatcccgcttgaggaccaaagaccgcagctcctgcccccggctctccgccgcgtccagccgtcccgccgccacaacggtccggtaatccagcagggaccgggcgatctggctgtccagcttcagcgtgacctccgcgcccagcatggattcctgagcgtattccagctgctcgatgcggttattcagggtttcgatctcgttctgccggtccaaggacgcctgatcggcgtagacggtggccacggccccgccggtgccgacccgctcgccctcgtttttccgcagccgcataaggccgccggcatcgccggtgagcacctgctcctgccggaccacatagccgctgatgtccaccgtatcctccacctgataggtgtaggccagggtggtggaaaaggggtcgcttacatagccgtagatctgatagccgaaataggccagcaccagaagggtgataaccggcgtgagcagcttgcttacaaaggatgatcgattcatgtacgcctcgtatcgttacagggcggcttcctcctcactttcccgcagggccaccggacgaagggggaccactgtggaaatggcgtgtttgtaaatcacctgctgcctgccgtcgctttccagcaccaccacaaagggatcgtagccggtaacggtgccccgcatctggaatccgttcatcaaaaacacggtgacgggcagcc

SEQ ID NO: 12186 - DNA, 35103 bp, Unknown
  gut microbiota DNA sequence
ctgtaaattgatttttttctgcatagtattccgctccttctttatttgggagcggctgtgccagcggtacgctgtctctgttggtcgatgaccgccgcccctggtcttatcctaagccagaagcggtcaaaatttctgtcgaaatctggagggcacgggcaaaatcacggtctttttcccaatagatccagtgaatagccggattccgccgcagccaggtgagctggcgcttggcatactgccgggagcggagcttgaccagctccagtgcctcctgctccgtaagggtcccgtccagcacgcccaaaaactccttatagccgatggcctgcatggcggtggcattccggggcagccccatggccagcagagcttggacttcctctaaaagcccctcctccgccatcttgtccacacggcggtcgatgagcgccttcatgtcggcccggtctgcgaattgcaggccaatccatactgcgtcataccggggaggcagttggcgggtggcagcattgtgggcggagatggtctcgcccgtttccagatagacctccagcgctcggagaatgcgcttggtgtcggcgggatggagccgtgcggcgctttccgggtccacctgccgcagctctgccagcagcggctcaatgccgtcccggtcaaaccgggtctccaattcccggcgcacctctccgccggcgtgtccgccggcgaagccgtgtccccggatcagggcgtccatccacaatccggtgccgcccaccagaatgggcagcttcccccgggaaaggatgtcatccacgatgggcgtggccttcgccacgtattctgcggcgctccactgttcgctgggctccgccacggcgatcatgtggtgggggactccctgcatttccgcctccgtaggggcggcggtgccgacggtcatgccccggtagatctgcatggagtcggcggagactacctctccgtgaaagcgctgggccagcagaacgcccagtgtggttttgccgcaggcggtggggcctgcgacgcagacgatcttcggtgtcacacgccgtctcctttctgatgtgtcaaatgttctcagcggtgatagagccgcttggtctcatacttcggttcacagctcacccggacacccagccgcttgaagatcttcagatcctcctcgctgatgatgacggagaagtgggcctcgctgtcccgcaggccgggcagctgccgcttggcaaggtccgccagcgggttggtcagggcggagatcgccagggtcagcagtacctcgtcggtgtggagtcgggggttacggtgatccagataggtggttttcagatggcagacaggctctaagacctgcttggagatcagctcaaactgatcgtcgatatttcccagcgccttcagggcattcagcagcagcgccgccgcggcacccagggtgccggaggtcttgccggtgatgacccggccgtccggcagcaccatagcgccggcaggcgcgccagtggcttccgccttgtccagcgccgctgccacggcggggcagatctccggcgtcacgccggcctgctgcatcaccagctccagcttgcggacagtctcctccgcccccttaccctggaccagttcggttttcgcggtgtaataccgccgcaggatctccatgcgggaggcggcgcggcatacctcatcgtctacaatgcagttccccgccatgttcacgcccatatctgtgggggatttatagggggatttgccctgaatcttctcgaaaatggcgttcagcaccgggaagatctccacatcccggttgtaattgacggtggtaacgccgtaggcctccaaatggaagggatcgatcatattcacatcgtccagatcggcggtagcggcctcataggcaaggttgaccggatgcttcaagggcaggttccagatggggaaggtctcaaacttggcatagccggcatcgacgccccgcttgtgatcgtgatacagctggctcaggcaggtggccattttgccgctgccagggccgggagccgtcaccacgatcagggaatggctggtctcgatgtagtcgtttttacccaggccctcatcgctgacgatatgggccacatcggagggatatccggcgatgggatagtgccggtagcagcggatccccagcttttccagccggtgaaggaaagcgttcgccgcatcctgtccgctgtaacgggtcagcaccacgctgcccacatacagccccatgtcccggaaaatatcaatcaggcggaggacgtcctcatcataggtgatacccagatccccccgcattttattcttctcaatgtccccggcgttgatggcgatgacgatctccacatcatccttcaactgctgaagcatccggatcttgctgtccggttcaaagcccggcagtacccgggaggcatgatagtcgtcaaacagcttcccgccgaattccagatacagcttcccgccgaactggtggatccgctttttgatttgttcagactgcgtagtgagatatttttgattgtcaaacccaatggctcccatgatgaacgccccttatcttttgtttttaaacacataaataaaagtatagcacaggccgtcggttttggaaagatgccggggaagaaaaggtaaaaaaaaccgcagacagacccaagccgccggacggagccgtatttgtgcagtttaccgtttgacagggggacggccccgtgatacactcagtttcatattgtgagatttttcaatgtttttcttgcgtttacatgaatttatggtaggataaacttgatattttatcgtcttgaacggagggaccgccatgagcgaactgaaactgcccgaactgttcggcagcagagtattcaatgaggaaaccatgaaggagcggctgtccggcgcctgctatcaggcgtggaagcgctgcgtcaccgatggagcatctctggaattggctgccgccaatgagattgccggggccatgaagacctgggcggtggagcggggctgcacccactatacccactggttccagccgatgactggcttcacggcggaaaagcatgacagcttcatcgcccctgccgagggcggccgggtgatcttggaattttccggcaagaacctggtgcggggtgaggcggacgcctcctccttcccctccggcggcctgcgggccacctttgaggcccggggctacaccgcttgggacccctcctcctttgcctttatcaaggagggcaccctctgcatccccaccatcctgtgctcctacggtggtcacgcgctggacaaaaagacgccgttgctgcggtccatggaggacgtgagccgtcaggccatccgtatcctgcggctgttcggagacacggagacccgcaaggtcacgccctgtgtcggcccggagcaggagtacttcctggtggataagaagatgtacaaccagcgggaggacctgcggatgaccggccgcaccctcttcggtgccaagcctccccggggtcaggagttggacgaccactattacggcgccatccgtccccgggtagcagccttcatgaaggatctggacgaaaacctctgggctttgggtatttacagcaagaccaagcacaatgaggcggcccccgctcagcacgagatggcccccgtctatacagacgccaacacagcctgcgaccacaaccagctcaccatggaggtcatgaaaaagatcgcagaaaagcacgatctggtatgccttctggatgaaaagccctttgccggtgtcaacggctccggcaagcacgataactggtccctgaacaccgacacaggcaagaacctcttcaagcccggcaagactcccagccagaacgcccagttcctgctgttcctggcggcctttgtcaagggcgtggacgagtatcaggacttcctgcgggctacggtggcatttcccggcaacgatcaccgtttgggcgcttccgaagcacctcccgcagtcctctccatcttcctgggtgacgaactggatgccatcgtgcagtccatcatccgcggtacggagtttaaagaggccggcaagcgcaccctccagatcggcgtggacgccatgcctcccattccccaggacaacacggaccgaaaccgcacctctcccatggccttcaccggcaacaagtttgagttccggatgctgggctccagccagtccatctccggccccaacattgctctgaacaccatcatggcggaggaattgcagcagtttgccgaccaactggaaaagtccaagaatttccagtcggatctggaaaagctcatcaaaaaggtctttaccgaccatcagcggatcatattcaacggcaacggatacgatgatgcctggatcgccgaggcggaaaagcgtggcctcagcaacctgaaatccgcggcggatgctctgccggtctacaccgccaagaaaaacgtggacctcttcgtcaagcatgggatctacacgaaagaggagatcaatgcccgtgcggagatccacatcgagaactacaccacggtcctgaccatcgaggcccggaccatggccgatatgctgcggcggcagatcctgcccgccgtatccgcggtgacggcagagctgtgcgagcgaggctggaaaaaggagcagatgggcgtcagccacaaggcggatgacgccgtggcccgtgaaatgggccagctgacagataagctctatgccgccacggaaaaaatggagcgagacctcagtaagatcccggcagacgctaagaaggccatggcttacagccacgatcacctgatccctgacatggaaaaggcccgtgaactggcagaccggctggaggagctgacccccgccgagcggtggcccttcccggtatacagcgacctgctgttctctgtgtaacatcaggatcgacgcaaaaacagcaagaaacgaccccctgcggaatggatgcgtccattccgcagggggttctcgttttgggggttccgtggctactatgtcagatgccctttctgtgaagtgcgtaggaatagacggcagggatcagaaccatcaccgccagcagcgccccaaacagccaaccgctccacagccgcagcagggagagagggatcatcacaagaccgcacagcacccacaaaaagccgctcaatcggtgggtccgggtccaattttcctcgctttgcagcgtccacggcagcttgatgcccatggtgcggttctgccggatcttcggcaggtagttaccaaggatcaggaacagcagtcccatgaacaccggtaccacggtgctgatgggcatctcatagcccagccctgtgccgagggtgaccgccccgccgagcagcgatacggccgggcagaaccacagcagcaccgtccgcaatacaggattcctatttttcttcgtctcacggctctcggcgtaaaagcagacgagatgcagtgccaaaataaacagcggcaggccgaacacagtggcggcacgcgatgaccagccgtttgcgttgccggaaaagtcccaatgtgtcgccatggtctccggcaaacgcgggtagagcgccgcgcccgcgaacagcggcagcaggcagaccagcgaagtcagcagcatttccctcttgttgttcttcatttttttccttcccccttcaagtcctgtaaccacagcaagacttcctccagcacagaggcattgaggctgtaatagataaaattcttctcccggctctcgaaaatcaaaccggcttttttcagcagggataaatgataggacacggtggccgccgtcatgtcaaactgcccggtgatctcgcccgccgtcagacgcccgcccttcagcaggttcaggatttctcgccgcaccgggtccgacagcgccttgaaggtctctgcaaaggccatccgcagccctccctcgcatagtatttagaaaattttctaaatagaaaatagcacatgtcccgcaggctgtcaacaggtatttagaaatttatctaaatgctttcccctttgcggacactccaaaggcagaaggagtgaaaaatatcagcgccgcccaaaagggcggcgctgatagtggatcaaatctgattatctgtggggaacgtcccagatgttgtcggcatattccgccacagcccggtcggcggcgaagatgccgctgcgggcgatgttgtggaggctcatgcggttccaggtctcccggttttcataggtctctgccatgcggcgctcggcgtcgcaataggcccggtagtccgccagcaggaggtactcgtcctggctgatgagccgctggtagaggtcctcgtagctgacgccgtcccggaagcccttccgcagggcattcaggcaccgctccatctggggatcgtggctgatatagcgctggggcacatagccctcccgcttcagtgtagcagcctgatcggcatggaggccgaagaggaacatgttctcatcgcccagcacatcgtgcatctccacgttggcgccgtccaaagtacccacggtgagggcaccgttcatcatgaacttcatgttgccggtgccgctggcctccttgccggcggtggagatctgctgagagacctcgctggcgggcatcagatgctcggccagagacacccggtagttctccaggaacaccacctgcagcttgccccggcagcggggatcatgggaaatatcatccgccagagagttgatgaggtggatgatccgcttggccacggcatatcccggcgcagccttggcgccgaacaggaaggtgtggggccgggtgatgcagttgggatcgtcctgcagctgctgatacagggtgatgatatgcaatacgttcagcaactgacgcttgtactcgtgaagccgcttgacctgcacgtcgaaaatggcgttggggtccagggtcacaccctgagctttccgggcgtagtcggcaaacttcaccttattctgccacttgatctcgtccagacgcttgaggacagccgcatcgtccgcataggcatccagctttttcagcgcctgaggatggagcaggtagtcgtctccaccggccagatcccgcaccaggccgtccagacccggattgatctcactgagccagcggcggtggtcaataccgttggtgacgttggtgaatttccagggctccatggcataggaatttttgaatacgtcctttttcaggatctcggaatggaggccggacacgccgttgacggacaggccgcctgcaacgcacaggttggccatccgtacctcgccgccccagacaatagccatcttttcagtaacagagggatcgtggaagaaattctccaccttttcctgccagcggcgggcgatctcctgaatgatctgccacacgcggggcagcagggtctccaccagctgctggggccagcgctccagcgcctcggaaaggaccgtgtggttggtataggccacggagcgggaggtgatgtcccacgcctcgtcccagttcatgcccgcctcgtccatgaagatccgcatcagctccgggatcaccagagccggatgggtgtcattgatctgaatgatgtttttctcatggaagttcttcagggtgccataggtctccagatgcttggtgacaatggactgcaccgtggcggaaacgaagaaatactgctgcttcagccgcagggacttgccctcgtagtggttatcctcagggtagaggaccttggcgatggtctccgccatggcctcgtcctcggaggctttcagatattcgccgcgggaaaacagggccatgtccacagggcgggtggaccgagcgtcccatagccggagcgtgttgacgtggtcggtatcatagcccgccaccaccatgtcgcagggaacggccagcacggtggtggagttctcgttgacgatgtggagatggccgtcatgccagaattcccggagggtaccgccaaagtggacggcctgagcctcgtcgggcttgggcagcagccaagcggagccaacgcccttccagtcatcaggcagctccacctgctgaccttccacgatcttctgcttgaaaatacccagctcatagcagatggagtagccagtagcggggatgtccagcgtggtcatggagtccagatagcaggcggccaggcggcccagaccgccgttgcccagacctgcgtccggttccagttcaaacaggtcaccggacttgaagcccaggttgcccagagcctccttcaattcgggcagcacgcccagattgtaagcgtttttcatcaggctccggcccatgaggaattccagagagagatagtggacctgctttttctgctcctttttcgtttccttggcggtctgtacgccccggagggccatcacatcccgcagcaccagagcgcaggctttcagcatctcctgatccgtggcttcccccggctcggtgccgaagttcaaggccagcttggcggtcagggcgtcttgtaacgattgcgtggtaaatggtacggtcatacgggtttactttgccgcttttttagcggctcctttctttttgggttgaacaggctgcgtggtttccacggtgtccgcaggcgccatggtcttcgcggcagttttcttaacaggttcttcggccggcttctcaacgggcttctcagctgctttttcagtcggtttttccactgctttttcggccgcctttttagtcgtggccttggctgcggtctttctcgttgttgtctttttggccgcaggcttctttacagccgttttccgcgccgtctttttggccgcaggctttgcagcggtctcactgaccggctccgcagcggaaacaacagcttcctcggcaggaacctcgatcaccggtgcctcagtgggggcggcgccctccgcggcaggtgcttccggggcagacttttcccaggaaaggccggtgacggcgccgtagatccgcaggtagtccccggcgctgcggttccagctgaaatcctgtgccatggcccggtctctcaaacgggcaaaggcgtcgggataatccttgtagagatacaccgcctcccggatcacatggagcatatccgcgctggagtagttggcaaaggtgaagccggtaccggcgtcacgccaggcctcatagggctgaacagtgtccttcaggccgccggtctcccggacgatgggcaccgtgccgtagcgcatggagatcatctgggagaggccgcagggctcgctgcgggagggcatcaggaacagatccgcacctgcgtagatagccatggacagcgcctcgttataccccagacgcacagccatacggccgggataccgctccgccgtccggcggaagaactcctcatatccggcatcgccgctgcccagcaccacaaattgagcaggcagctccatgatgtcgcccatgacctcccgcagaagatccaatcccttatgggataccagacggctcaccatggcgataatgggggtgtttggctcctcgttcagacccatcaggttctggagagcggttttatccgcagccttgccggacagatcctccgccgtatagttggcagtgatgcgtccgtcagcagcaggatcgtagagcttcatgtcgatgccgttgagcacaccggacagcttatagccgcactgggtcaaaatgccctccatccggtgagcaaagtagggattcttcagctcctgcgcataggtgggggacacggcgttcaccgcgtcagcggtgaggatggcgcccttcagcaaattcagatcgccgtccagcagcagggtgccgtcatccacccagccccggtccaggccgaacaggtcgcccaggcaataggggtcatagcgtccctgatactcgatgttgtggatagtcagcaccgtccggatagagcgataccggtcctcccggacgccgtcatccttcagataaatgggaatcagggccgtctgccagtcattgcagtgaatcacatccggccagaactccagatggtccagcatcttcaccacggcccgggagaagaagccgaagcgctctccgtcatccacatagccgtagagctcgggccggtcaaaatactgctcgttatccaggaaataccaggtcacgccgtcctttttcatggaaaacagaccgcagtaggtgtgccgccaggccagatccacataatcgtagcacaggaacgtcagctggtcggcaaatttttctctgacccgccggtacagcggcaggatcacagcggtctcggctccctgctccgccagagcgggaggcagggaaccggctacgtctgccagtccgccggttttacagaagggaacggcctcgctggccgcatacagaatcttcatatattgttactcctttcctgagaagaaagaccagagattttgcggaaccccctcaggccgtcttgctcagatcacactgcccttggcaatgacaatgggatatgcggtatggcccaccatggtgcggcccggcagcagctccacatgcttatccgtgatcacatgggacagccgcgctgcctcccggacagtggtgccccggaagaggatgcagtcctctacctttgcgcccttttccacagtgacgccggggaagaggatggaattcaccacagtgccctcgatgcggcagccctcagccaccagggagttcaggcacacgccgtcaggtccgatgtatgtggacgccttatcggcacccttggcccggataggccggtccgacgtaaagaggtcctcccggatctccttatccaaaagctgcatggagcggtcatagtactcctgcacggagcggatctgcgcggcaaagccgctgaaggtatagctctgcaaatgcagcagatcctgcttggcctgcagcacatcccggcggaagctgtactggtctcttgcctggcactcgtccaccagagaacgcagcaggtccgtggacatcacaaacacgtccaggctccggtagcctctgggctggtgcatattgaacagcacctcccggatgcgtccgtccgggtccttttcaaaataggtgccgttttccgtggcgaaactgtcatctccgcagacggcagtgatgtcggcatgggtgcggatatgctgctccagaatatccgccagcgggaggttggccaccaggtcgccctccatcagcaccacataatcctgccggatctcgttcaggtagtcccggacgccggccagggcttccattttgccccggaagggcgtgacgccccactcgtgaaggtagttgaagggaggcagcagatgcaggccgccccgcttccgggacatatcccacaccttgccgctgcccacatgatccagcatactctgataccggccgtggagtaccatacccacatcggtaacgcctgcgttcagcagattggacagggcaaagtccaccgcccggtaccggcctccaaagggcatcgacgcggcagtacggcgctctgtcagctcccgcagttctccgcgctgttcataggcgaaaataatgccatgcatccggttcatttcagcacctccttaccatggtggtccagcataatgccgggggccacctctcggccgtcctccaactggcaatctggggccagcaccgtcagatcccatttcccatcgagagcggaatccggcgcgccgcccacccggcagtccttaccgatgtggcagccctcgccgataatggcgtattcgatcacagcgcctgtctccaccgtaacgccggggaggagcacggaatagctgaccttggcgcctttttccacggtgactctgggggagagcacagaattttccacggtgccctcaatgtcacagccccggttgatggcactgtggctcacacggctgtcgccgcccatgtaaatagggggcgcgtccacgctgcgggcgaagatgggccaggactcgtcagacaggtccaggccggattccggagagagcatatccatgttggcatcccagagggaggtgagggtacctacgtccttccagtagccctggaagcggaaggctgccatccgctggccgtccgccagcatcttggggatgatattcttgccaaagtcattttcggaacccggatccgcctcatcctccgtgaggtagcgccgcagcgctttccaggagaacacatagatgcccatggatgccagattgctcttgggctgacggggtttttcggcaaactcggtgatcatatcctccccatccaccgacatgatgccgaagcggctggcctcctcccaggggacctccataacggaaatggtgcaggcggcgtccgattccttgtgacggcggagcatttcggaataatccatcttatagatgtggtcaccggagaggatcaccacatactccggctgatactggtcgatgaagccgatgttctgatagatggcgttggcggtgcccttgtaccaggtgccgcccttgctgcccatatagggcggcaggatgtgaacaccgccgctgctgctgtccagatcccatggctggccggagccgatgtagctgttcagctccatgggccggtactgggtcaggacacccacagtgtcgatgccggagttggtgcagttggacaggggaaagtcgatgatgcggaatttaccgccgaagggaacggcgggcttggccatggcgccggtgaggacatacaggcggctgccctgtccgccagccagcagcatagcgatacactcttttttcatgggtggatcagctccttttcctatttttcacttttttcaccttggttgccgaaccgcgctttgtaaagctgccctctccccggaggaataccgccccgaacgcggggagccggagagtgacagactgttcttttccgtgggagggtgtgccctttaccgtcagcggcttcgtatccgcaagcccgctgccgccgaattccggcgcgtcggtggtaaaggcggggacataccgcttacggggcggtacgcctacccggtagttttcataatcgttgggggagaagttcaccgcgcacagcagctcgttccctgcctgatcccgccggaggaacaccaccacgttgttgtgattgtcatccggcaccagccactcaaagccctgccagtcaaaatcaatgtcccacagggcactctccgccttgtagaaggcgttggcagccttgaagaacgcatggagctgctgattttcctcatgctccaataagtaccagtccaactgaccgttggagtcccattcgtgccactggccgatctccggtcccatgaacagcagcttcttgccgggatgggccagcaggtacgcataaaagccccgggtgcagcggagctggttttcgtagtctccgggcattttccccaccacgctgcccttcatgtggaccacctcgtcatgggagatgggaaggacatagttctcggaaaacgcgtacatcatggagaaggtcagatcccggtggtggtcctgccggaaccaggggtccagcttcagatagtggcacatgtcattcatccagcccatgttccacttcagattgaatccaagtccgccgacgtcggcaggcttggtcaccagaggccaggcggtagattcctcagcgatcatcagcacgttgggatccacctcaaaggccatagtgttcagcttccggagaaattccaccgcttccagattttcccgcccgccgtggatgttgggggtccactggccgtcctgccgcccgtaatccagatacagcatggaggccacggcgtccacccggatcccgtcgatatggtacatttccagccagaaccgggcagaggagaggaggaagctcaccacctccggccgcccgtagtcaaagacccgggtaccccagccggcgtgttcccgtttccggggatcggcatattcataacagcaggtaccgtcaaactcgtaaaggccctgctcatccttgcagaagtgcgcggggacccagtccaaaatcaccggaatgttgttttcgtgaaggtggtttacaaaccacatgaaatcctccggcgtaccgaatcgggaggtaggcgcaaagtatccggtgcactggtaaccccaggaatcatccagaggatgctccgtcaccggcagcagctccacggcggtgtagcccatctccttcacataagccgccaactgccgggccatatcccggtaatccaggaactcgccgttttcatgcttccgccacgagccgagatggacctcgtaaatattcagcggctgatggtacaccggctgcttattacggcggaaatcctcatccgtccaggaaaaatgctcaatgtcatagagcttgctggcggtgccggggcgggtctccgtatggaacccgtaggggtccgccttgtagtgaactctgccatcctcgccggtaatggcatacttatagctggtatagacgggcaggtccggaagaaagccctgccagaactcgcccttttgggtaagtggatcaacggtcaggtcccagccgttaaaatctccgaccacggaaacagcctttgcatgaggcgcccaaacgttgaaccaccagccgtggacgtctccctctgtggcaggatgcgcaccgaagagccgccagccgtccgtcaggctgccgctgtgatacagttgagtctgatctgccatgagtccccctttctgctgccgtattattttttctcatactgagggtagcattttaaaacgattacgtcaaggcagccgcaagtcattttacaaatgtcatactttaatttcatattataccgccggatagccgaaagcgtcaaggtaagagggtgtcgaaaaggaaagacactctttgtccgatttgtcttatttttccagtttttgttcccgcttcttgtagaatatgccggtgcacaaggcgtttaaggtctgttaagatgagtacattccatctgtcggacccactggcctgacagcaaaattcaggccccgcgggccgtaaacaaggagttttcatgatttccttcctgactgacatcacggtggacggcgtagccctctgggtggtactgctgatctgcgtcggcgttttcttaggcgcgtttatggacgccatcgccggaggcggcgggatcatcaccgtccctacctatctcatgggcctctcaaaccttcccatttataacgctttggggacgaataaactctcctccggcatcggcacgattttttccacagcccggttcatccatcagggactggtggactggaagctctttgccccggcggtggcgttatccctgaccggctccgtctgcggcacctggctccagcaccacacccctgcggtagtgctgaaatacctgctgctggtggtgctgccggtggtagcgttcatcaccctgcggacccggaagtggccggatgaaacagcgccgctggacccttggctgcggcggctcatcatctggggctcggcctttgtcatcggcggatatgacgggtattacggccccggcaccggcaccttcatgatgatcgcgctggtgcgtttcgccaagctggatacccgccacgcggccggcggcgtaaaggtggtcaatctggcctccaatctgggcagcctgttcaccgccctgcgggccgggtatgtgctggtgggcgttggcctgatctcctccgtggcgtccattctagggcactatatcggtgcgggtctggctatcaaaaacggcagcaagatcgtccggcccacggtgatcgcagtcctgcttctgctgaccgtaaaggtgggcagtgagcttttattcccggaattctggagttgaggtgcgtaatatgtgtgagaaaaagaccatcggtattttaggcggcatgggccctctggccaccgccgacctgtttcagaagatcactctgctgacggaggcggaaacggaccgggatcatatccgggtgtacatcgacagcaatgccaacattcccgaccgcaccgccgccatcctcagcaacggcccggacccggtaccggaaatggcaagtgccctccggaatctggaagcctgcggtgcagactgtgtcatcatgccctgcaacaccgcccattacttcctgccccggctccaggctatgacagagatccccttcctcagcattctcaccgccgctgcggaagcctgcaaagcccagttccccggaaaaaccgtgggaattctggccacaaaggggacgctttccgctcaactgtatcaaaatgccctcggggaagccggtgtgccgtacctgatcccggagacagaagagcaggatgccctcatgcgggtcatctatgacggcgtcaaagccggaaaaggtccggacgcttaccgggcggatcttttgaccgtggtggagcatatgatgacccgtggggccggtgtgttcctgctgggctgcacggaactgcccttggctgcggaggccgtgggcctgacggtccccgtggtggatcccactgcggagcttgcaaaagccgccatccgtttctgcggcttccgtgtacgggcaaaataagcaaaaaacgcccatagaatctctattttgacgaatgatccagtgaaacagatgggattttgcacaaaataaacaactttattagtgcggactttacaagttcccggcataccgctataatatctccaatcatatttgcgtaaatttctgtgaattttacgcacagcgtattaaaaagtgtgaaagagggagcgtattctatggaaaaaaagaaaaaactgtccctgccggtacagatctttattgctctggtactgggtatcgttgtcggtctgatgttctacttcaccggcgcagccggcttcaccaccagctacatcaagcccttcggtgatatcttcgtcaacctgctgaagttcatcgtggtgcctgtggtgctgctgtctatgatcgacggcatcatctccatgggcgacatgaaaaaggtaggcgccgtgggctggaagaccattctctacttcatggtcactaccgccgtggcctgcgtcatcggtctggttctggcaacggtgttcaacaacgcgggcctgttccccaacctcagcgaggctgcccaggctgccgagtacgaggccaaggaatacgccggcttcatggcgactctggttgccattttccccaccaacatgtggaaggcgtttaccgaagccaatatgcttcaggtcatcgtcattgccctgctgttcggcggctccattctggctgccggcgagaagtccaagctggtccgggacatggtgacctccgcttatgccgtggtagagcggctgatggaattcatcatctccctgagtcccattggtgtgtttacctacatgacctgggtggttgccacccagggcgctgagattctcggctctctggcgctggtcattctgtgcgcctacatcggctacattctccacgccctgctggtctattctgtttccgccaaggcgtttgccggcatcagccccgtcaagttcttcaagaatgcttccgcggctatgatcttcgcctttacctccacctcctccgccgcgaccctgccggtctccaaggagtgcgccgatgctctgggcgctgaggacgatatttcctccttcgtgctgcctctgggcgccaccatcaacatggacggcaccgctatctatcagtgtgttgccactgtgttcctggccacctgtgccggtatgcagctgaccctgagccagatgatcctcattgtggtcaccgctacgctggcctccatcggcaccgccggtactcccggcgccggtatgatcatgctggccatggtgctggaagccatcggcatccccgtggcttacattggcctgatcgtggctgtggaccgtctgttcgacatgggccgtacctgcctgaacgtcaccggcgacattgcctgctccctgtgcgtcaccaagtgggagagcaagaagaagtaaatcaaagtacacgatccacaaaaggaaaggccgcataagcggcctttcctttttgtcctcttattctgttttctggccccggcggcccaggcggatggcctcccgggtatagctcaccgacagcaccgcccagatcaccagcaccacggcactgggcaggatgccgtagtgaaagaccatgttccccagaagcagcacgccccagcagtaaggacaaaagcggctcaccgtaacgtaggccttgtagctggcctggccgatctggcggcgctccgcctcgtcgcagctttcccaccagcgctcctggaacttcatgtcatatacgctgccccgcttttccggattcatcttcttggtgaggtccaccgtcttctgttggagcagagtggccagtgcgatgactaccagaaagatcaccagcagcgtgatcgtattaccatcggagctctgtggcagcttcgcggtgccggcattgaaaaagaagaagctgacgatcaccgtcaggctgtccagcagcaacgcccagctcaggcgctcctccgcccgctgcatcacgtcctcatcctcgccgtcccagccatggaaggcagtgtcggacttgcggtactggtacagtccaagacccagcagcacggcggcacaggcaaccatagcccagggggatgcggcgcccagcaggtgggcaaacgccgcaccgaaagcagtatggtccttccagaaatacccggccacaccggacagaccacccagcacaccgccgataaggctagccaccactaagatccccaaaaatctgggaaatgccttttgattctcacttttctgcttcattgcgcacatcctcctcatagctgaaaatatcctccacagagacctggcacagctttgccagcttcagcgccagggtcacagagggggagtagtccccccgctcgatctggctgatggtctggcgggagacccccgccagacggcccatttcctgctggttgactcccagccgggcccggtattccttcaatcggttatacaggggcataggcccctcctttctgttaggttcgcttgtcaatttgacaactatctttgtcatttatggatgataccattgacaaggaaagttgtcaatatggaattgaaaatttttcgcactccgttgataggaaaaacggttcttccctttttgcgtgaaatatgctatacttattccgcatttttgcgggaaacgggaaagaagggaggcggtccaatggaatttgccaatgaccccattgcccggcggatccgggaagccgccggacggggaacactttcccacgcgctgctgttttccggcagcggggaccggatcgccgccgcgcagtacgctgctgcggccatggagtgtcagggcggcggacaaaagccatgcgggacatgtcccgcctgccgcaaggtgttctccggcattcacccggacgttatcaccgtccgggacgaggcccataagaacctctccgtggacaccgtccgccagatccgcgccgatgcctatatccggcccaacgagggtgcccggaaggtctatatctttccggactgcaccattctgacagagcaggaccagaacgtactgctgaagatcgtagaggaaggcccgccctacgcggcattcctcttctgtgcggaaaattcttccgtggtcttgcagacgctccgttcccggtgcgtggagctgaagctccatcccgccgtcaccgtggaaaaggaaagctcggaggcgggcgtggagttgtgccgtctgctggcggcagggaagagggggactgtcacagagctgatggtccgtcttgagaaaaaacggctggaccgggacggccttgcggccatgctggatcaggcccggacccttctggcggcagccctgctggcccagtacggtcaatccccggagggaccggacgcggccctcattgtccaacttgggaaacgcttgacaaaacagcggatcatgggcacaatagaattgttacaaacgtaccgcggagcctgctcctacaatgtgggcgccagccatgtgctgggggctttggcggtggaattggaggaaatcctttgactgaagtgatcagtgtccgctttcgtggcggatgcaagaattattattttgaccccaagggacatgcggtgaaaatgggcgatcaggtcatcgtggagaccgcccagggcccggaattcggcacctgcacccaggggaaccacgaggtggcggacgaagccgttgtccagcccctgtgcgccatgctgcggctggccactgacgccgaccgccgcaccgtggattacaaccggaaaaaagagagcgaggccttcgacatctgcgagaagaaaatcgcggatcacggtctggaaatgaaattggtgaacgtatctgccagctttgatggcagtaagatcattttcttctttaccgccgacggccgggtggacttccgggagctggtgcgggatctggccggcgtgttccgggcccggatcgagctgcgtcagatcggcgtccgggacgaggccaaaatggtgggtggtctcggcatctgcgggcggcccttctgctgctcccagtttttggacgggttcctgcccgtctccatcaaaatggccaagactcagaatctcagcctgaaccccaccaagatctccggcacctgcggacggctgatgtgctgcctgaaatatgagcagaacgcctatgaggacgcccagaagcggatgcccaagcaggaatccttcgtccagacccccgacggccccggcaatgtaaaagccgtggacctgctgcgggaaactgtaaaggtcagtctggacagtgctccggagacccagaagtgctaccacaactgcgagatctgcgtcctgcgcaacggcaagggcagccgtgagggcattgagatccccacggagcggcccgagcggtatgtggaggagcaggaggacgatttcatcgcgccggtgatctcccggcactttgaagcggaggaaccggcggagacgccggcccctgtccgggaacgtccccgcgaggagggcggcgagagcaagaaccgccgccgtcaccggggcggacgccgcagaagcggcggcagcggcgaggggacacccaacacttccgcaccggcgaagaaggaagctcccaaggcccccgaaggccagagccgtcagggcggcaagcccgcaaaccggtctcagcggcctaagcaggaccgcccccggaccgagcggcccaagcaggaccagcgtcccaaacaggatgcggctcccgcccgggaaaaggtcatcaatccggaaaacggtgaagctgttaagcgccgccgtcaccggggcggacgccgccatcgcggcggtggcggcggaaacgccggcggaacaccctccgcagaataagcgactatctcaggcggagcgggaatctttccgctccgccgttttttaggagaataactatgggaaaatttgacggcgtcctgctggccagcgactttgacaataccatcctgaatacagagcggccccgccgcaccggctgtcccattccacctatttcacagcggaatgtggaagccctccgctatttcatggacaacggcggccgctttgccgtagccacaggccgggcgctgcccgccttccggatattcgcggagcaggtgcccatgaacgcaccggccgttgtgtgcaacggcggcgcgctgtacgatttcaaaacggagcgctatctggaaaccatggagctgccagagaccatccgcccgcagggtcaggatgtgctggaccggtttcccacagcggcagtggaggcctatcacatggacaatgtgatccatgccgtgcggcccaacgagtacacccggcagcatgagcacgtgacccatgccggggtgcagcctgtcccaaccctgctggaggtgccgatgcccctcatcaagatcatgtttgaggatgaccatgagcacctgctggctctgcgggactatgtgagcggacagccctggtcagcgaactacgaggtgtttttctccgacaggactctgctggaggtcacccggaagggcgccagcaagggagctatggtagctcgtctggcaaagcgtctggggatctccatggatcatgtctactgcgccggggacgaaaacaacgatctctccatgctgacgatggcggcagaggggtttgccccggctaactgcgtagaaaccgtgcgaagctgcggcgctaccattgtggcggactgcgaccacgatacccttgcggagatcgtctccattctggacaaacggtactgagatccggcatatgtattgacaaaacagacatttttctctataattccatctgaccgcagaaaactgaacacaggggtgctggagagaactccggctgagatgcggggctgtgactgccctctttcccttaaacctgatccgggtaatgccggcgtaggaagtgaacgatctgtctttccgtaccgcaagcccgttcatgtggcctgcggtactttttttcaggagggacgtttatgtccgcaaagaataccgactctcatctccgtgtccggatgctgtgcgagggtgccatgatggtggccctggcccaggtactcagctacatcaagctgatggagctacccaacggcggctccctgacccccgccatgttccccatcatcctgtttgccgtccgctggggactgactccgggcctcatggccggcttcaccttcggcctcttgcagctcatttttgacggtgcttacgcctggggctggcagtccatgctgctggactatctggtggcctttactcccttgggtctggctggcctgttcaagggcaagaagtggggcatctttgtcggtaccgtggtaggctgcctcggccgctttgtcgttcactacatcagcggcgtgaccatctacaaaattctggctcccacggagttcatgaagtggaccttcaccagtccttccgcctattctctggtctataacggctcctatatgctgcccaataccatcattgcgctggtcatcgcggcggtgctgtataagcccctgaaaaagtacattctggggcaggatctcggcaactgaagaagaaccccacaacggcggtctgcgtacgcagaccgccgttcgatcttcctcagaataccttcgtttcgcataaacgattcatctaaaagcggccctctgcgctcacttttgcagcatacgtttgaaaaaccgcctttttctttatcgaaaacgtttaatttcaaaagaaaatcttgtaaaatatattgattgtattttctttcccaatctactataatacaaaatggttatatccggagccgcaggccgccggttttccgcattgggcgtccaccggctccatgttgttctattctgcctgttccgggcaaaaatcgaaggagagtttctatgagcaagaagtattgttacctgttcacggaaggcaacgccaacatgcgtgaacttctgggcggcaagggcgccaacctggctgagatgaccaacatcggtctgcccgtgcctcagggcttcaccatcaccaccgaggcctgcacccagtattatgaggacggccagaagatcaatgacggcatctttgccgagatcatggaatacatcgagaagatggagagcatcaccggcaagaagttcggcgaccacgagaatcctctgctggtctccgtccgttccggtgcccgcgcctccatgcccggcatgatggataccattctgaacctgggcctgaacgaggacgttgttgacgtcatcgccaagaagtccaacaacccccgctgggcttgggactgctatcgccgctttatccagatgtactccgacgtggtcatggaagtgggcaagaagtacttcgagcagctcatcgacgagatgaaggagaagaagggcgtcacgcaggacgtggatctcaccgctgaggacctgaaggaactggccatgcagttcaaggccgagtacaagtccaagattggccaggagttccccgccgaccccaaggaacagctgatgggcgccatcaaggccgtgttccgttcctgggataacccccgcgccaatgtctatcgccgcgacaatgatatcccctattcctggggtactgccgtcaacgtgcagtccatggccttcggcaacatgggtgatgactgcggcaccggcgttgctttcacccgtaaccccgccaccggcgagaagaagctcttcggcgagttcctgaccaacgcccagggcgaggatgtcgtcgccggcgtccgtactcccatgcccatcgctgagatggctgagaagttccccgaggccttccagcagtttgagggtgtctgcaagaccctggaggaccattatcacgatatgcaggacatggagttcaccgtggagcacggcaagctctatatgctccagacccgtaacggcaagcgcactcccgctgccgctctgaagatcgcctgcgatctggtggacgagggcatgatcgacgagaagcaggccgtggccatgatcgagccccgctctctggacaccctgctgcatccccagtttgacgctgaggccctgaagaaggccgccatcatcggcaaggctctgggtgcctctcccggcgctgcctccggtaagatcgttttctccgctgaggatgccaaggaatgggctgagcgcggcgaaaaggtggtcctggtccgtctggagacctctcccgaggacatcgaaggcatgaaggccgctcagggtatcctgaccgtccgcggcggcatgacctctcacgctgctgttgtggcccgcggcatgggtaagtgctgcgtctccggctgcggcgacatcaagatggacgaggagaacaagaagttcgagctgtccggcaagacttaccgcgagggtgactggatctccctgaacggctccaccggcaacatctatgacggcgctgtgcccaccaccgatgctgtcatcggcggcgagttcggccgtgtcatgggctgggctgaccagttccgccgtctgaaggtccgcaccaatgccgacactccccacgatgctgctcaggcccgtaagttcggcgcgcagggtatcggcctgtgccgtaccgagcacatgttcttcaacgaggaccgtatccccgctatccgccgcatgatctgctccgacactgtggaagagcgcgaagccgctctggccgttctggagcccatgcagcagagtgacttcgagggcatctatgaggccatggagggctgccccgtcaccatccgtttcctggatccccctctgcacgagtttgttcccaccgaggaggccgacattgagaagttggccagcgacatgggtaagaccgttgccgagatcaagaacatcatcgccggcctccacgagttcaaccccatgatgggtcaccgcggctgccgtctggctgtcacctatccggagatcgccgccatgcagacccgcgccgtcatcaaggctgctctggctgttcaggcccatcatcccgaatggaccatggtccccgagatcatgattcccctggtgggcgaggccaaggagctgaagtatgtcaaggacattgtggtcaagactgctgacgagctgatcaaggctgccggttccgacatgaagtacctggttggtaccatgatcgagatcccccgcgccgctctgactgccgatgagatcgccaaggaagctgccttcttctccttcggcaccaacgacctgactcagatgaccttcggcttcagccgtgacgacgccggcaagttcctgggcgcttactatgataagaagatctacgagaacgatcccttcgccaagctggatcagaagggcgtcggcaagctggtggatatggcctgcaagctgggccgcggcgtgaaccccgacctgcatctgggtatctgcggcgagcacggcggcgatccctcctccgtggagttctgccaccgcaccggtctggactatgtgtcctgctctcccttccgtgtgcccatcgcccgtctggccgccgcacaggccgccatcaaggagatgtaattctcccgcaagggcgtcaagcaaccgtatacccgcaagcctccggtcattgaccggaggcttgttcttttcagcgtgtcaaaaaagtctttcctccccgctgagcaagttttcagaactttataaaagttctgaaaacttagaattttaatggcgtagggaaacaggcgaagcgccgccggtggtggatcaagcgagcctgtttcgaggaaggctcccaatcagcggatgcgaagtatccgctgattggcttgagccgacggtgtatcccttcttgagttatcttcgcgctaagagccgccttgcggcggttgcgctctgaaacacgcctgcgggcgtagtcccgcgcacacccttcacccgcaaggggtatgcggcatccgtaaagcggtaaagccgctaacggctgccctaccttaccgtcgcagagaatttaccactttattgaccggaggcttgttcttttctccgtggcatgttaaactgaaagggaagcagaggtaactaactgtttgacataggtgtgtgatggtatgaaaaaaatgataccgtggatcattgcatcggccgtgatcatgctggtctttccttggcttgcggtcaccttcgtaaaaggcgacggcggaatggccgtttgcttcatcctgttttttgcgctgaaccctatttatgccatatttgccggagcacaggctggaaaagatgtcaaacgcttctgggccttgccgatgatcaccgcgatcttgtttttagccggtacatggctgcatttcgatatgggcgaaccggcgttttttctctatgcgctgatctacttgcttttaggggccgcggccatgctgctctccgcgtttataaggaaaatacttgaaaagcgctgagccaactccaatttctcttgcagccgcctcagccgtcctcttttggcactcttgaaaatttctgtcaatcgatctgtggatacctgccgggatctgttttgccccatcactgaaaaaagtccgtctggaatactccagacggattttttatcgcattttcaatgctgttttctcattcctcagaaccgtgggtacaggtctgaatatcaggatcattcaagattctggctttcttatcggcattgctctcctctctccaagtcccggcaacgccctttccaatgatcagtcccaaagatccccaagccgcaagggcaaacagaataacgaaatatttcatagcgtctcctttcccgcagtccaaacttccatttctattattaacataacagccaccgcagaaaaaatcaattcactttccgcacagaattttttctataattctgtattttttcacaggaaaccaatttgatttctctcgaaaagtgcaaaaaaagcaaggaatcagttttctgccgattccttgcttttttgattcaattaggtctctgccgtgggattttcctcatttgcggagatctctgtggaaacctctgcttccgcggacacgtcctccgtgtcctcatgctccgccagcgccatggagatcacctggtcgccctcttccttgaagcgcatgacgatcacgccctgggtggcccggtttgcggtctccttgatgttctccaccggcgtccggatcaggataccggactgggtcatcagcagcaagtcctcggtgccgtccaccaccttgacgcccacgatcttgccggtcttatcggtgatttggtagtttttgatgcccagaccgccccggttggtgatgcggtactcctccacaggcgtccgcttgccgtagcccttctccgtaatggtcagcacgctcttgccctctctggcccgggcagcgcctactacatagtcgccctcccggagacggatgccccggacgcccatagcagagcgccccatcggccggacgtcattctcgtcgaacaccacggccatgccgtcatgggtggcaatgaggatcttctggctgccgtcggtctcccggacagataccagctggtcgccctcgtccatagtcaacgcccggatgccgttattgcggaggttcttcagagcctccaccggcagacgcttcaccgtaccgttccgggtcaccatcatcaaatagagctgctcctcaccggtctcccggtagtgaagcatggcctgcacccgctcaccctgctcgatctgcaaaatgttgatgaggttggtgcccttggcggtcttgccggactcggggatctgatagcccttcttccggtagaccttgccggtatcggtaaagaacaggatatgatcgtgggtagaagcggtaaacacatccaccaccgtatcctcttcccgggtggtgatgcccttcttgcccatgccgcccttggactgagcggtatactcgctgacgggagtccgcttgatgtagcccgcctccgtcagagtaaagacgcactgttcctcctcaatgaggtcctcaatgtcgatctcgtcctccacgtcctggatttcggtcttgcggtcatcgccgaacttctcggcaatggcggtgagttcttccttcaaaatctgacgcacaaggctttcatcggacagcacacggttaaagtaagcgatccgctcttccagctccttgtactcgctctccaatttctcccggtccagaccttgcagcgccttcaagcgcatatccagaatggcctgcgcctgaatatcatccagaccgaagcgctccatgagcttctgcttggcatcgtcataagcgctgcggatgatcttgatgacctcatcgatgttgtcctgtgcgatcagcagaccctccagcagatgagcccgctcctgagcctttttcagatcgtagcgggtccggcggatgatgatctcctcctgaaacgccagatattcgtcaatgatgtgccgcagggacagaatcttgggctggtgctggttatccaccagagccagcatattgatggaaaacgtagtctgtaactgagactggctgaacagccggtttaggaccacctgaggattagcgtcccgcttcagctcaatgaccatccgcataccgttccggtcggactcgtcccggatgtcggaaatgccctccagccgcttatcctccacctgatccgccagactcttgatgagcgtccgcttatttacctgatagggcagctccgtgatgacgatgcgggtacggtcatggccgaattcctcaaactcatgccgcgcccggaccacgatgcggccccggccggtggcgtaggccgcccggatgccggaccggcccatgatgatgcccttggtggggaagtccggtcctttgatgtgctccatcaggtcagccagagaggcattgggatcgtccagcacacagatgcaggcgccaatgacctcccgcaggttgtggggcgggatgttggtggccatgccaacggcgataccgctggagccgtttaccagcaggttggggaaccgggcagggaggacccggggctccttccggctctcgtcaaagttggggtcccagtctacggtgtccttttcaatatcccggagcatctcgtcggagatcttgctcaaacgggcctccgtatatcggtaggccgccggggggtcgccatccacggaaccgaagttgccgtggccgtccaccagcatatagcgcatggaaaagtcctgtgccagacgcaccagcgcgtcatacacggaggcgtcgccgtgggggtgataccggcccagcacgtcgcccacgcaggtagcagacttcttaaagggcttgtcgcttgtcagattgtcctcgtacatggcgtacaaaatgcgccggtgcaccggcttcagaccgtcccgcacatccggcagggcacggcctacaatgacgctcatggcatattcgatataggattgctccatctccggcaccagaggagattccacgattctttgttccggataccggatctcctcggggtcatattggggttttttactcattttttctcctccttgagggatcaataatccagattgaccgcatactgggcccgcttctcaatgaactccttccggggttccaccttctcgcccatcaagatcgtgaaggtctcgtccgcctgtacggcgtcatccaaagtgatccgccgcagggtccgcttctccgggtccatggtggtctcccacagctcatgggggttcatctcgcccaagcccttgaaccgggaaatgtcgatcttcgtgttgggattgccgccacgcagctcagcggacaccgcgtcccgctcctcatcggagaaggccacccgtgtggtcttgccgcgggtcagcttgtaaagcggcggcacagcggaatacacatagccctgctcgatcaggggccgcatgaaacggaagaagaaggtcagcagcagcgtccggatatgggcgccgtccacatcggcatccgccatgatgatgattttatgatagcgcagcttggcgtcgtcaaattcgtcaccgatacccgcacccagcgccgtgatcaccggctggagcttatcgttgccatacaccttgtccgcccgggccttttccacgttcagcatcttgccccatagtgggaggatcgcctgaaaccgggaatcacggccctgggtggcggagccgcctgcggagtcaccctcgacgatataaagctcagtcagttccgggttattctcgttgcagtcccgcagcttatccggcatggccgcgccgcccagcgccgtcttgcggcggatggactctctggccttcttggctgcctctctggcccggttggctgtgagggccttgtccaagatcatccggcccacctggggattttcctccaggaaggtatccagcttttcagagacgatgttgttcaccagcgtccggatctcgctgttgcccagcttggccttggtctggccctcaaactgggcgtccgtcagcttcacggaaatgacgcaggtaagcccctcccggcagtcctcgccggagaccttctcatcgtccttcagcatcttgatcttccggccgtagttattcagcacggtggtcaacgcccggcggaagccttcctcgtgcataccgccctccggggtatgaacgttgttggcgaaggagagggtggtctcgttgtagccatcgttatactgcatggcgatctccgccatggaatcgcccttctgcccgctgacgtagatcacctgctcgtgcagcggtgttttcgtgcggttcagataggtgacgaactcccggataccgccctcgtagcacatggaatggcggcgctcctcctccggcttctcggcggaagccaaacgctcgtcggcaatggtgatccgcaggccggcattcagaaatgcctcctcccgcatccgggtatggaggatgtcatagctgtaaaccgtttcctcaaacatctccgggtccggcttgaaggtcacggtggtaccggtgtgatccgtggtgcccacgatcgtcatcggctccgtcacatggccccgggcgaacttcatctcgtggatcttgccgtcacgatggacctggaccaccagccactcagacaatgcgttcaccacggatgcgcccacgccgtgcagaccgccggacaccttgtagccgccgccgccgaacttgccgccggcgtggagcacggtgtacaccacctccagagcgggttttcccgtctgggcctgaatgtccacggggataccgcggccgttatccaccacggtgatggtgttgccttcgttgatggtcacggaaatttccgagcagtagcccgccagcgcttcgtcgatggcgttgtccacgatctcgtaaaccagatggtgcaggccggaggaggaggtggagccgatatacataccgggccgcttccgcacagcctccaagccttccagcacctggatttccgatgcgtcgtaatcattggcggcatccaccgccgtggattgcaggatctcgttttctgccatgtaggttctcctttcatcgcgggaccagaagaatcaagccggagccatttccggctcggttcttcttgccccgaagaaattcttacttctattcaacggcaagccgttcccggcccgccccatttgtctcacagtaccagcttttcactctccgcccggtttttcagggtggaggtattcaactggctcagatacacgatctgcgggtgataggggtggtcgcacaccacaaaggacttcggcaggtcgccggacacatccagcaccacgccatccttttccgcccgtgtcaggtactcccgggtgcgcttttcatagctgcatttatccagatcaaaaataccgatgatccgatggtccggtacgatttcattttgtcccaaatgcaaatacacggtattcctccgttccaaaagcaacgtcaatgcgcacaaagcccgtccttacatcagccgtatcgcaacatccatcacacgggtaatgagaaagatccaatatacattcttgctctttctgtcctcctccggatctgagatcccaagcaggcagctgagcagaatggcaaagtctatcgtgaacagcatccactgtctttccaggaagagatacgcaatgaacatccccagcgcgaccacccatgccgtcacactgatcaggctttttacctttatttttcggttctccatagcaccgctcctctactcagccatccagccctctttaatatggaagatttttccccctaacaactgcggcaactggtcatcttcgcagcaggtgatgcgccgcgtaacggcgcggcatttcaaaacgcgctgacgtgcggctccgttcgttgcgctccgtcgcggtattcatcaccgcacagtgccatttttgacatggaagatccttcctcccaacagctgcggcagccggtcatcctcgcagcaggtgatgaatacctgcccgccccggatgcggttcagtacaaactcctgccgccgggggtccagctccgagagcacatcgtccagcagcagcaccggatactccccggtgtcctgctgaaagatctcccgggccgccagcttcaaggagagagccgccgtccgggtctggccctgtgaggcgtagctttttgcggccttttcgtcgatctccaccagcaggtcatccttatgagggccggacagacattgccggctggcgatctccgccgcccggtgctcctcctgatgctgtaaaagctgctggaagatcacctgcggccccgcctccgggtccgtcaccgtagacaccgtttcataatgtagtgtgagccgttcccggccgccggaaaaatctccgtgaatggccggggccgcctgacacagccgcttgataaagtgcgcccggtaatggatcagcagcgctcccgccttggccatgctcatggaaaactcgtccagcgcgtccagcaaggagggcttttcctcgctgtctctcaaaatgcggatcttgtgctcgtgaagccgcttatattccgcaagtgcttgcgcgtaccggggccgaagctggcagatgcagtcatccagaaagccccgccgggcggcggctccttcccggatcagatacaggtcctccgggcagaacagcacactttgaaaaataccggacagctcgccgccgtttttcagcttgacgccgttagaccgcagcacccgccgcgccccccggtgcagctccgcctccagcagaaactctcgatctctggcaaacacatgccccttcaaaaaggcgtgatccacgccgaattggatcagctcccggtcatatctggcccggtggctgacgccggagagataggccaccgcctccagcagattcgtctttccctgtgcgttgtcaccgtagatcacattgatattcgggtcaaacgtagcgtctaaatgaacgtaattacggaaaaaatccaggcttaacccgtcaatccgcataggccgccgcgtattcctgtccccggaaggttaccacgtctccggggcggatcttcttgccccgcatggtgcacacctcgccgttgacctgtacttcgccgctctggacgcactccttggcctcgccgccggtctctaccacgttcgccagcttcagaagatcctggagcttgatatattcggttgtaatggtcattgttttcatatttgtttactccgcgctcttcagccgtacaggcaataccatataaaggaagttctcctcgccctccacagggacgataatggcaggggagacccctgtgttcagctcgatcttcaccttgtccgccggggcataccgcagcgcctccatcagataccggttattgaagccgatctccaacttgtcgccgtcgccgctgacacggcacacgtccttggcctcaccgttgccggtcttggcggacagcatcaccttatcgtggtcaaacaggcagcgcaccgggcttttcagcttgtcggagattaccacggacacgcggtcgatgctctcgatgagtgccttggtctctgccacgatctgaatgggattcttccgggggatggcgttcttataatccagaaactcaccctccagacggcggcagatcagctgggtatcaccgatttcaaatagaatatgccgcttgcccagcgtcaccgtcaccagatcctccgtatcgccgcaaatgctcttgacctcactgagggcggagccgggacagacgaaggagaacgcgccgccttccagcttttccagcttctcccggcggaaagccagacggaaaccgtccacggccaccatgctgaggctcatatccgcgatctcaaagagcgcgccggtatggaccgggcggctttcattggtagagacggcaaaagccacctcctcaatcatgctccgcagcaccttctgctgcatagaaacggcatattcatcctcaacctccggcagatccggataatccgcggcggacaggcccagaatgtcaaaatccgcatcgccgcaggagacatggaccatcattttttcatcagcggtaaaggtgatcatatcgtcgggcatccggcggatgatatcg

SEQ ID NO: 12187 - DNA, 1631 bp, Unknown
  gut microbiota DNA sequence
tcccgcatgaaggtgttctgccccacccccggcccgcccttgaggatcatgatgtcaaaggccgtttccgggtccatgatctcggaaaataaattctgaaagccgctgccgctgttggcccctaagaagaaatttgtgatctgtgccatagccgcccctccccatttgatttcattcccaagctatgcagcagcggcttgaccggtccggttttccctaaaaaaggaacagcgtcccgtgacgggacgctgtttcgctatattccgatggactttccttacaggaacacctcgttctttttcggctcggtgaaggtctgctccagcatggctacatgggataaaaacgccggatcgtcaaagtacttggcatgtttcgtgcatttccgcacacaggcttgacacttgatgcaggtgccggggacgctgtacacgtcctccgggtcaatggcccccatggggcacagccgggcgcaggcgccgcagttcgtgcacttggtcaggtcggtccggggcttggccttcaggaacttggcaggctcgccgtcggtgcccttggggatgtaatacggggcctccgggtctccgggaacggtgacaggcgcggggttttctgtcaagttttttaccttgtctgcggttgcagccgcaaagtttttcaattccttccggtcatcccagtcaggccggtcctccgccagtttgtccgtaaaggcgtgacggcccacaaaggcgcccccggccaccgtatggaatccgtcaccctccaaaaccgcacacagctccgccaaagcgttgtcataggaccgatttccgaaggtcacgaaggccgccgccagcgcaccgttaccatgaaggcgggccttgaggtccggcaggatcttgttaggcagctttcccgcgtaggtgggcgtgcccaccaccaccagatccgtgtcggcaaacatatagtcccgttcccgctccgcaggcttggtgaacggcagccgctcccatgggacgcccaactgctccgccagcgtctccgcaaaggcggcaacggttttttccgtatttcctgtggcactgaaatatagggcgcatacacgtttgatctccatagtctcctccttttgccaaaacaggcacccttgcgggtgcctgtttgaaattcacagggaaaaatcttcctctttcagcttggcggtgtccagagaagccggacggggcggtacacgtttcaggggatcgtagtgaaaccctctgcaatggtgctccaccggaacgatgccgtgcttcacgcacatgacgtccgtttcgctgatctgctgcccgcgctggcagtaggcgcagcggggatcgatattcttccgaaacagcttcaccgtacctctcccctttcttacagcgcgtccagacggatagcttcgttctccgcggcagcgtggatccgggataccagatgctcgtagctgtcgatgatcttggtggccatggggtcctccagctccttctggatggtgcgccgcaggttccgggcgccataggtccgggagaaggacttttccaccaggaactctaccaggctgtcatcataggtaaaggtgatgcccttgtcgcccaaggaggtgaccagctcgcccagcatgatct

SEQ ID NO: 12188 - DNA, 5532 bp, Unknown
  gut microbiota DNA sequence
cacagtgccgccgtcctgattgccgctgccggcgttggaggtcatgacgatgatggtattttcaaagttgacccggcggccgtgggaatcggtgatctcgccgtcatccagaatttgcagcagcacgttcagcacgtcgggatgggccttttcgatctcgtcgaacaaaatgacggcgtagggcttccggcggatcttctccgtcagctggcctgcctcgtcatagcccacatagcccggcggggagcccacgatccgggatacggagtgcttctccataaattccgacatatccagccggatcagggcgtccggggtgttgaacaggtccacggccaactgcttcaccagctccgtcttgcccacgccggtggagccgacgaaaataaagctgacgggcttgtgcttgggagagatacccacccggttccgccgcacggcggcggacaccgccgcgatggcttcgtcctgtccgacgatgtggctcttgagccgctcctccaactggctgagccgctggaattcctcctcccggatcttggaggccgggatcttggtccacagctcgataacgtgggcgatgttctccatggtcaactggggatcgcccttcaaaagcagggtgttcagctccgtctgacgctggaggatcttgcttttcagcgtggcgatctgctcgtaatccggctccgcgccctcctgcgccccctgctcctccagcatggcccgttctttttcaaagtcatcgatctcccgctgaagctgcatccgccgggagatgtccggatccttcaggttcaggtcggagcaggcctcatcgatcaggtcgatggccttatccggcaggaagcggtcggtgatgtaccgctcgctcagcagcaccgcctgacgcaggataccgtcggagatcttgacgccgtgatacgcctcgtagttgggggccagacccttgaggatcttgatggaatcctcgatggaaggctcgttcaccgtcaccggctggaaccgtcgctccaaggcgctgtccttctcgatggacttgcggtattcattaaaggtggtggcgccgatgacctggatctcgccccgggaaagagcgggcttcaggatgttggcagcgttcatgctgccctcggcatctcccgcacccacgatgttgtggatctcgtcgatcatcaggatgatgttacccagctttttgacctcgtcgatgaggcccttcatccgctgctcaaactggccccggaactgagtcccggccaccagcgccgtcaggtcgaggaggtagacctctttatcccgcagcttgaagggcacatcccccgcaacgatccgctgggcaaggccctccgcgatggcggtcttgcccacgccgggctcgccgatgaggcaggggttgttcttctggcggcggttcaggatctggatgacccgctcgatctcctccgcccggccgatcaccgggtccagcttgccctccttggccttgcggttcagggagatgcagtagccctccaaaaatttacgttttccgttgggcttcccctcttttttctcccggcggccgccgtcctctgtggggacgtcctcctttggagcaggctcgccgccgttgttgaacaggcggttcagaaacgggaaggtagcggtcttgccggcttcctcgtcatcttttccgccgggcagatcctccacattgtcgatggagtccagcgcctgcatcatttcattattcaaattatccaggtcttcatccgtgatgcccatgcgctgcatcatctcgttcacctgcggcagtcccaggctcttggcgcacttcaggcacagaccctcgttaacggtcttgtccccctccatccgggtgatgaacaccgtggcaatattctttttacatctggaacaaagtgttggctgcatagttacctccgtaccccacggagcgcgcggcgctccatagggaaattatgatagggatgacagcaggcccattggtccgaccgtcatgaaaaagtgaagcagataggtgttctccgcgggaagggcgataccaaggcggggggccagccagatcagcagccacaccaccatcatgccctctaacaagcccagcaaagcgccgcccagcgtgttgaccccggagagcaccggcaggcgcaggaccagattgatggccagcgccgccagccgcagcaggatcaccagcgccacaaaaatcagaatgtacaaaatggcataggcaaaggtctccaccagttcccgggccacagccgccgcaatggccttggccgtggcggcaacgctgtcctctgcacggcgctccagcgtcccccgcagcgtatctaagagtcccgtccggtccaaaaggcccttcagactgtccggcagcagttcttccagcgtttgaccgctctcctgccctttcttttccaaggtcttttccgccgttccggcgattcgctcctcgatttttggcgtcacccaatcggagaccggccgggtcagggccttcgcccccagattcgcgccgatcatggccgcgatcagaacaaggatgccggatagggacaggaacagcccccgccagcagccccgcaaagctgcggcgatcaaaagtgccgcaatcagaacgtctaatattatagcaggtgtcatgggacttgcctacctttcaccgtgaaaacaatttgtaaacatcgctgtaaatcctaccttttatggcagaaacagttctgcggaatccgcaccgatcattagaacggagccatccgcccgggtcagcacctcgcgggtgtgctccgggccgtggagggtagcataggcctgtaactgacggttgtagactaccagacggtccgcgtacagcacggagagataccgtccgcaggcggaaacgtcccggatctcctctgcaacgtccagactggcgatctcctcgccatcgtcatccaccgtcaccagccgtcccacactgccggactgataccggttcagctgcagcaccgtgtagtcctcgcccccgaggtcatattcccggaggtactcaccgttgtaggaataggtgccaacgagctttccggcggtattccccaccgccagacaggtatcggtgacggtgaggatccgatctccccggcctgttatggccgtcaccagaccgtccggcacagagtagtccgccacggggtcctcctgggtcagatcgtagatcaccagatcgctgataaacacgctgtccgcctgccccatggtcacagcggccagatagccgccgtcctccgtcacgcaggcatccgccacaaagcggcggtgggcgttgaaagcgaacagcacctgcatatcggcgccgtacacgtccacatggcccttggtgccgctgatctgggtggtcacagccagcatcccggagctgttgagattggcggagaccagcggcccgtcggaggtcagttccagccggggcccggtctcgtccagcacgtagagggccgtgccgccgatgtcataggctacggccagaccgcccccctgtcccagcgccggagcgttcatcttcacgttggcgctccatacctcgctgccgtccggtcccagcagccgcagggacgtatccgacaggatgaccagtgagccggtccccacccgggcgaagcggttggtattgtccgtatcgtagcggtagacggtcttttcccctcctaccgcctccgtaccgtaggcaaaataccggcggagagcgtcgaacccggtgccgtcccgccacgccgctacaagcacgaggcccagcacagcgatgagcaccagcaggaaaatcaggaacttccgcagcatacgccgctttttcggcggttccttggctccgtcatcgtcattccaaatgtcttttgtcatattttcagccattgagccgttcatcctcataccaaagtcttgtcaggtacagtccccccggcggcaccgtgggtcccgccagcgtccggtcccggctttccagaatggccggaatatcctccggcaggaacttcccttcggcggcgtagagcaccgtgccggtgatggcccgcaccatgttatagaggaagccgtcggcgcagaccttcagttccagcagctccccgctgcgggtcacgtcgcaccagtagatcgtgcggacagtggtccttgtctccgtgcccacgctgcggaccgccgcaaaatcgtgggtgcccacaaactgatgggctgcccggttcagaaattcctcgtccagacgcttggggtagaaatacgcccggttgacataaaacggattcttcacccgggaattgtaaatgcggtaagtatactcctttttcaggcaggaaccgatggcgttgaaatcctccgccacctccagcgcctcgctgacggcaatgtcctccggcgtgtgggtgttgatggcaaagggcagccgttccagcggaatccggctctccgtgcggaagttggcgatgtaccgctccgcgtgaacgccggcgtccgtgcggccgcagccggtgaggtgcaccggcgcgccggtgatcttctccaacgccttttgcagcgtctcgcagacggtgacggcgtttttctgcacctgccagccgtggtaggccgttccattatacatcagtttcagtgcgatattacgcatattggctcctttgacggcgtttgccgcgtgattaatcccaggacacttccacgttgtaatctgtgaccggccagacctcttccactatcgtcccatcctgatcgatctcataggtgcagacggtaaaatcataggaaaggccgaagctatcccggcagagcaagtgcagctccacggtgtcctccggctgacaggagaccgcgatgccgccattctccgaagccggggtatagtagaccacatcgggatcgctgctgacggtagactccgaaatctttaccggaagggtctggacggtctctccgtttttcagcacctgaaaaacaggggcgaccacctctgtgccgtactgctttctgacgcccagatcgtattgaagctgcaagcttcctccccgataagtgggatcgccataaccgctgccgtcattcgtcaggggcagcagcatggcaaggtcactgtaactggtgacctcctcccggctggtctgaccgccggcggtgatattcgccgcgaaggacacttcgccggtatcctccaccggcaggctcaccggtgtggtgaacacgccgccactcccggacataggctgctccgttatccggccactctgggtcaccagcagcgtcacctccgtgtccgccgtccagcggcggagggtgatgctcatgtcggcttgcagcgtatggctttccgggtccaggccggtgggttcaaaggaaaaatccgacagatcctccgtctgctcccgctgtttcgcggacaggttcgtgatctgatcatccatatcggaaagccgatatgcgatatcgtccaatttgcttttcaggatcgtctgcttatccaccagctccgcccgggttgcaaacagagcaatcaacagc

SEQ ID NO: 12189 - DNA, 917 bp, Unknown
  gut microbiota DNA sequence
cagcgctatttttccagctctttgccattggtcatacataaaaggcttgttttgaccccggcatcatggcattactttagccgtgggggagggtcaatcctgaaagaagatcctgtcgaaccggtccatgacgtcctccatcgtatcgctgatctcctgctcattgaccggaaggcgggaatccagcacagtctgaatggagtcaggcgtgtttccaaggtcatcacggatgctgtggagatggtgctctgtcaggatcgtctgcccttctttggagaggatgtagtcatagaggagccgaccgtttcgctcgttgggacagccagctaccagccccatgggactgtagatcggcaccgtatcccgctccggaaggcggaaggagataggctccccggcttcttccatgttgctgacgatatagtccatgcagatccccacggcgtacgtcccgtgtgcgacctgcagatgggtggcggtggagttgctctcaagcatgcagccgttttcccgcagacgctcaaaatacgccgttccgtaggcaggggaattcatcagcgcgccgacgaagtatttgatgctgccggagctgcccgggtccgtcatcacgatctgcccgttccatctgggatccagcagatcgtcccaggtccggggcgcgtcctcctcggagaccagatccgtgttgtaggcgatgaccgccgacatcagccgtccgccgatgtagtaatggtgctcatccatgaaggcctcgttgatattgatggcctgcggcgagatgtagggggagagataccggttttccttcagctttctgtaatccgacggagcgccggtccagaccagatcggcggcgatctctccggactgcatttccgtggccagcttggtcaggaccttgttggttcccgcgaaga

SEQ ID NO: 12190 - DNA, 1447 bp, Unknown
  gut microbiota DNA sequence
gcgtagagaacgcagcgctcttcataaatctcccgcagcggcgttcctgccggcacggcgatgccccggtcatacaggtccgccggcatccgtttttccagctgagaaaagggcgtctggagccagatcactatgctgttttccttcaaatgggccatggcctccgggtagagcaccatactgccgccggtggcaatgacggtgtgggtccgatttagatccgtacctactttattttcaatttcgaaaaaggcctccagtccgtcctgccgcaggatctccggcagtgttttgccggtggcctggacgatgagatcgtccgcgtccacaaattcgtaaccaagcctctccgccagcgcctttccgacggtgcttttccctgtgccgggcataccgatcaatacaatatttttcataggcagagcctccatggtaaaagtatttttataatacgcgatgcgcggacaaatgtacatagtaaaaatacacgaaaaatttgacaaagaaagatcgacctttcatgacagggcggacaagactgccccgaaaatcaccgttgaaatctgttaaatatgtgcattgtcaaacggtgggccattcggtacaatgtctaaaaatggtaatacctatttggggccgcttcataatcgaaacaagcggtgaaacggaagggaggaccgacatgagtcagaatccaagacagtccaaaagcatccgggcgcagttgctcaccgctatgcaggtgggggagtatgcccattgtgaccggcttccccgggaaagcgtattgtcggaaatgctgggcatcagccgcacacagctgcgggatattctggcttctctggaccgggagggctttattacccggcgtcatggagttggcaccattatcaaccgtcatgtgctgggtgcaccggccagaatggacattgaagtagagtttctggatatgatccgccagagcggacacactcccggcgtggcctttgtccgggctgccgatgacaaggcggatagtaaggtggccgcccagttgggcatccccaccggaacgccgatccttcggatctcccggctctgcaccgccgacggccgtcctgccatctactgtgaggatgtggtggaaaaggcgaaactccagcggccctatacagcggaggaactgcgtcagcccattttcgatttcctccagaatgtctgcggaatttcgtcctatctggacctgacggacctgcggcctgtggctgcggacgctgctctggctgatgtttttcaggtgccacagggaacaccgctgctgaacatggacgaggtggactacgatattgagggcgcgccggtgttcgcctccaacgagtattttgccgacggcatcttccaccatacggtcctgcggaaaaagctgtgacctgcggaccgtcagcccgacgtgaccgtgccggtctct

SEQ ID NO: 12191 - DNA, 11365 bp, Unknown
  gut microbiota DNA sequence
atagcccgtggttgcctgttttcaacaaagcaaaagcctccgccgtttggcggaggctttttatgtgctgccctcttgatttataatgtaagcggttacataaaacgcagctgaaaaggacttttacatggcggatgcctctaatatttttcgccagtattcgcagtcatttgtgtatgtgccaaaagcaaaagccgtgcggtcgcaagccgcattgtccattttgtacaaagcacacagggttctttttgcatcagatgtagaaaaagtacattcttcattgacgcatttggaaatatgtggtattgttgtcaatgtaaacggttgcacatatgtgttcattgtttacactgccataagttggagtgtttgcgcagcgtctgaccggatgccgcctgtccatgctaaactgcgaaccgcctacatagaaatggattgcgggcccggatagaagtcaggacaactggtgctataagttggtccgcagcttgtttcccgcaaagaggaactgtccaagtttcccgcaaagccgtgttttctcttccgcagtgcggaatggaaataaataatggatgagaaggagaaacgatttatgaagaaatccactaagcgcctgttcgccgctctgctggctgccaccagcctgctggccctcaccgcctgcggcggcggcaagaccgaggctcccaagactgacgattccaagaccgagcagcccgccgaatcctccggcagcaaggaactctccgtttacaccgcattccccgaaagcgaagtcatctactatttcaacaagtttgagcaggaaaccggcatcaagatcaactatgtccgcctctccgccggtgagatgctgacccgtgtggaagctgagaaggacaatcctcaggcaacgctgatgttcggcggctctacggataactacatcgccgccgtggataagggcctgctggaagcctatcagtctcccaatctggacaagacaccctctacttatctggatcccaccggtacctggaaccccatctatgtgggttgcatcgccttcgcctgcaacgccgactggtttgccgaaaagggtctggaatatcccaccagctgggaagacctgctgaagcccgagtttaagggtgagatcatcatggcccaccccgccacctccggcaccgcctacaccgttctggccacgctggttcagctcaagggcgacgatcaggtctgggactatctggaaaagctgaacaccaacatgagtcagtacaccaagtccggctccgccgctcccaatgccgtggccatcggtgaggccgccatcgccctcaccttctctcacgacgccctgcagctgactcccgagggctatcacattgagctgagcttccccaccgacggcaccggttatgaggtgggcgccatggccctcatcaagggcggcaaggccgacgagcaggagaacgccaagaagttcatcgactggatgacctccgaggccggtcagggctgctacgccgaaaacgactccttccgcgttcccaccaacaccgccgctcctgtggccgacggtctggtgacgctggatgaggttcccgtgattgattatgacgccgtttgggctgccagcgtcaagagcgagtactgcgagcagttcgagaataagatcgccaccaagcccgagggctgatcccaatagatttctgattgatttcccgcaaacgggcctcctcccccaaggggagggggcccgcataccaagacagagaaggcggaactcccttgcgcagctttcccgccgcttttgacactctcactcaggaggaacgctcatggcaaatgccactacccgcgcaaagcgcctcaatgaaacgaagatgatcctgcgccagcccctgctgctgattgccatcatcctctcgttcgcgctgttgctgctgttcgtcatctatcctctggccaaaacgctgatctacagccttacggatgagaccggtgccttctctctggccaatctcatcaccatcctgcaaacgccccggtacggcaaggtcttcggccgcaccatggcgctgggcctgattgtggccgtcatcgccaccttcatcggctatgtctttgcctataccgtcacccgggtcaacgtaccggccaagggctttttcaagaccatggccacgctgcccatcctctccccgcccttcgtgctgtccctgtccattatcttcctcttcggcaagcagggtctgatttccaagaacctgcttggcatcaccggcagcagcgtatacggcctcaagagcctgattgtggttcaggtgatgagcttcttccccatcgcctacctgaccctctccggcattctggcctccatcgacgcctctgtagaggatgccgcctgcaacatgggcgcaggccgctggaaaaccttctggacggttaccttccccctgtccctccccggcatcatctccggcgcgctgctggtgttcatccagtctctggaggacttctccaacccggctaccatcggcggcgactacaccaccctctccattgaggtctacaacattatcaccggcagctatgatatgcgaaagggctccgtgctggcgctgctgctgcttctgcccgcagtcatcgcgtatcttctcaataaatactgggtcaacaaaaagagctttgtcacagtcaccggcaagcccacccaggcccggaagctcattgaggaaccccacatcaagtggcccctgtttgctttctgcctaatcgtttccgccatcatcattctgttctacggcacggtgatttttgcctcctttgtccgcacctggggcgtggacttctccctgacgctggatcagtaccgcaaggcgctccagtacggctgggacagcctgaaaaactccatgacgctgggcctgatctccgccgtgatcggcggcctgctgggcatggtcatcgcctatatcaccgccaagcggaactactacggcaagcgttttatcgaggtcgcctccgtcctgatgttcgctgttcccggcaccgtgctgggcatcagctacatcctgggcttcaactccaagccgctggccctcactggcactggattgattctggtgatcgtgttcaccttccggaacatgccggtagccatcgagtccggcaccaccaccctgctgcagatcgacaattccattgaagaggcctctaccattctgggcgccgacaccggctattccttccgccgcattacgctgcccatgctgaaaaacgccttcttctccggcattgtctactccttcaccaaggccatcactgccgtcagcgcggtcattttcctggtctctccccggtggaagctggtcaccagcaacatctactccctgtttgacctggcgaaatacgggcaggcagctgcctttgtcacgatgatggtaggcattctgctggtgtttatcggcctgttcaacaccgtcatcaaccttctgctggcgccccgttccaaggtgcctcaggctaaatcgaaaacggaggaatcaaaatgagccaagagaagaacgagaagctgggcttcagcaagaagagttccggcgtagtcctgaaggacgtgaccaaaattttccagcagcccgataccggcaaggacttcgtggctgtggaccatatcaaccttgagatcaaggacggcgagatggtgacgctgctgggcccctccggctgcggcaagaccaccaccctgcggatgatctccggttttgagtatcccaccagcggcaacgtgttcatcggagaccgggacgtagccaagatcccccccaacaagcggggcatctccatggtgttccagtcctacgccctgttcccccacctgaacatctgggagaacatcgcctacggtctgcgtgtggccaagatccctcaggatgagatcatccgccgcaccaatgacgtagtggagctgatgcagctcaaaggcatggagaagcggttccccaaccagctctccggcggccagcagcagcgtgtggcgttggcccgcgccgtggtcatcgagccttccgtgctgctgtttgacgaacccctgtccaacctggacgccaagctccgcgagagcatgcgggatgagctccgcgccctccagcagcggctggggatcacctctctgtacgtcacccatgaccagtccgaggccatggccatctccgacaaggtggtcatcatgaaggacggcgttatctgccagcagggcactcctcaggagatctacgagcagcccgccagccgctttgtggcaaacttcatcggcaaggccaacttcatcgacggcatcttcaagggccgtgacggcgaggccgcgctggtggagattggtggaaagaccttctccatccccgcccccggcaagatggagggtgtggaagtgggcggtgcctgctgcctgacggtccgccccgaatccttcctgcttaccaaggatgccggtgctctccccggtaccgtttcccgtgccacctattacggcgccaagatcgagtacgaggtcatgctgaatgagcagcccatcatcgtggaggtctacaacccccagctgacggagcgtttcagcgtgggcgataccgtcaccatgagcctgatcgagggctgcgtccgggtcctgaagtgatccgatcgacaacaacgcaagcatcataatgataaaaaggacactggcttgttatacaagccagtgtcctttttgctgtcattttgctgttatttgcgattttcgtcgcgttttacagcttttccatgtgttttccggtgccgctttgctccaccggcagtccagtcaggcagcggcgcagcatatcgtaggcgtggttggcagccagatcctgaatgcgatcccggcggcgcttgcccaactccagcttccggcaccacgtcccatcgggggacgccagacccacatacaccagtcccaccgggttgttgcgctcgtccgggtccggaccggccacgccggtgacggacaggccaatgtcagctccggtgatccgccgggcattttccgccatggatcgggcacattcctccgacacggcgccgtattggtccagaagcgtctggggcacccccagcacctctgcctttacgctggtccagtagctcaccacgccgccccgatacacactggaggccccggacagggccgtgatccgggcggctatctggccgccggtgcagctttccgccgtggcgaaggtccagcccttttccttcaggtgtgtcatgcagacggtttccagattagggacatccacgccgtacaccacgtctcccaaataatccgtcacctctttcaccaccggggccagcatggcctccgccgccgctgcgctgtccgccttggcggtagcgcggagccggacctcgctgggcttggcgtaggtggcgagggagggattccccatccgggagatccgctcccgcatcagatcctccatagggctttccccaaggccgaaggtcataatgtcatgggacacaatgacctccttggaaagtccccgcagataggggaccgcccagctttgcagcatggtccgcatttcaaagggcggaccgggcagcatcagcacgtgcaccccctccgcttcaaaggcgcagccgggagcggtgcccaccggattgtcgaagatcacgcaatcggcgggaaactccgcctgctggcggttattttccggcatggtcaggtggacgttccgggcaaaataagtccgaatatgctccagcacatcctcccgcaggaccagcggcttgccgaaggtctcgcagacggtctgcttggtaagatcgtcataggtggggccaaggccgccagtggtgaggatgacgtccgcccgcttccgggcgatgtccagcgcctcccgcagccgttccgggttgtcccctaccacggtatgccagaacacattgacaccaacagcagacagcgcccgtgagatctcgctggcgttggtgttggtgatatttccaagaagcagttccgtaccgacggcaatgatctcagcggtatgtgacataacagatgccttctttccgatccggtcagggctttacccgaacccaggtctcgccctccagggccttggccaccaggccgtcaatatccagaacggattccgcctgcaccacatcctccagcaccggccgggtggcggggtggcggggggtaaagaccgtgcagcagtcctcatagggcagaatggaggtctcgtaggtgccgatctcccgggccatgcggatgatctccaccttgtcggtgccgatgaggggccgcagaacgggcattttcgtcacgtcctccgtgacacccagggccttgatggtctggctggccacctgacccagagattcgccggtaaccagcgcagaggcgtgggacttccgggccactgcctctgccagccgcatcataaaccggcgcatgatgagggtaaagtattcctcggggcactggcggcggatctcctcctgaatttccgtgaaggggatgatgtggacgatcatccggccgcagtacaccgtcagcagccgggccagctccagcaccttgtccagcgcctgctgggaggtatacgggggagaaacaaagtgcaccatttccagctccacgccccggcgggcaatcatataggaggaaacggggctgtccagaccgccggaaagcaggctcaccgcccggccgcccatgccgatgggcaggccgccggcgccggggacagagggcgtgtggatataggcgtacttctcccggatctccacataaaccgtcagatcaggatggtgcatatccgctttcacgttgaagaactgccccagctcaccgcctacatactgggagatctggatggagttcatagggaactgcttgtccgcccggcggctctccaccttgaaggttctggccttggcaaattcatccgccagataggtcttggcggtctccacaatggcgtccatctccttggcgcaagggacggcgcgggccaccgtcacgattccgaacacctgacgggcagccttgaaggcggcctccatgtcgcagtcctcggtctgaggctccacatagatagtgctctggcgaatgtagatctggaagctgccgcagggcttcatccggcggcggacattgctcaccagcttatcctcaaagctgcggcggttcaggcccttcagcaccacctcgcccagctttaaaagcaggatctcgttgttgttcataatcaatcctccgtaagagttcataaagcgcatataggataccacatttttctgctcagcgaaagaggtcccttcggttttttccctgtttttcagccagttttccctccggatttgacgaacaggccgctgtctgctacaatagatgggagtttttcccaaaaccgtctaataaagtccaaaaacggataccctttccataaggaggcagatagatgaaacgaacgattttgaaaaagctgaccgcctgcctgtgcctgtgcgcggtgctgagcggggcgcttaccgttcccgccggggcggcttcctttcaggatgtgccgtccaaccactgggcggcaaccgccatcgaccgctgcgcggctcagggatggtttcagggcaagaccgccgataccttcggcgtgggccagcccatgacccgggcgggcttcgccgtggcactcagccgttttttcggctggcagagcggtgagacctactaccggatcttttcggatgtgccgcagggcgcctggtatgagccggccctccgggcctgctatgagcacggggcagtcacccgtcagaccggcgatttccgtcccggcgatcccatcacccgggaggaattggcagtcatgctgatccgggccttgggctacgggcccatcgccggtcttgcggaagatgatccgcttcccttccgggacgtgaccaccaacaaggggcatatcgctatggcctacgagctgggtctggtcagcggtatggggaatgatctgttcgtgccggatcggtacgccacccgggaacaggctgctgtcatgctcagccgcctgtatgacaaactgcaccctgctcagaccgcaaatgaggccatggtccttctccgctccggcgaggaagcggaggacctttccggatatcagaccgtcatactcatggcaggaacgctgaccggcggtcagaaccctcggctggctttgagtgtcagcaatacgcagaaacaggtcatggaaacagcaaccgcctccggccagacggtcctgctgggtatttccggtcagtccggcgttttgaagagcaccgccgccgcagccacggcagttgccgaagcattgaccgacagcagctatgacggcgtttatctgaacatcaccccgtccgctgaaaatggcgacgccctggctgccttcgtacaggcgctccgggccgctgtgccggagaaaaagctgtatgtggcggcaagcgccccggcccgaagggaagcaattccggactatcaggctctcggaaaggccgcagaccggatcgtgctgcaggtgtccggacatgaggacacggacggcgctgttcccgtatatgccatggagcctttggagaccgtctactacgcgctcagcactctgaatgaccagatccccggtgagaagctcgccctgcttttgacggcggagggccacggccggaagggtaccggaaaacccaccgccttcaacggagacgctgtggccgcactggaagccaaaggccgcacctactattctgaccgctacgcctgcgcctatctggagacaaaggatacggtggtctggtatctcagcgaaaaggcgctggaagcccgccagcagctgctgcgctgcttcggcgtatcctcctgctgtctctccacccccaacggtactttacacgcccaagaaagctgagctttcaaatccggacagcaaaaaccgccttgcttttcagcaaggcggttttcttttattcaattacaggtactttcgcataccgtcggtagcagtttccacgtcgccgctgatggtgacggtgaacttgatgttgttccgctcgccgaatacatccagccagttgaggaacttctcggtctccgcatccacatcggtgcccacggtcttgcacaggttgtcgatgaacacctgagaaatgtcgtagttgccggcatacagaccgctgatgaagccacggaatacctcatagctgtgcagatcgtattcctgcgcgtcgatcaggcggatgttgtagtgaatattgtaggacatgtcacgcttcggctcaatgcagaccacattgccggcctcatcctttgcggcagcgttgatgagttcgatgagctgcttggttttgccggaacccttgacgcccataatcagtctaaccataatagatcactcctgtcatagttcgtctccgtaattaacgggacctttcgtagtcatagcataccataaagaatggaaaaagacaatcccaaaaagtaacttcaaaatttgtttataaacacggcagagcaatgtatgctctgccgtgtttttttgcatattccgcttttcgtattccgcttttctcaatgcttttcggtcagcttggcttccagctccgccttacgatcctcgtagccgggcttgccgaggagggcaaacatattcttcttatacgcctccacgccgggctggtcgaagggattcacgtccagcagatagccggacaagccgcaggcatactcaaagaagtagatgagccggcccagctcacggggacccttaccgcccacattcacaatgacgttgggtacgccgccctgactgtgggccaagagcgttccctccgtggcccggtcccggatgtggtccatagacgcacccgcaaggaagttcagcccgtcgccgtccgtctcgtcccgaggaacggccaactgccggtcggaggcgcccagccgcacgatcgtctcaaagaggatgcggcggccctcctgaatatactgacccatggagtgcaggtccgcggtaaactccacactggcggggaacaggcccttgccgtcctttccctcgctctcgccgtagagctgcttccaccactccgtcataaaccggaaggccggatcgtagcagcccagaatttcaatggcgtacccagcccggtacagctcataccgcagggcggcatactgccatgcgggactatcgtaggagccgtcggcacagacgttcatcatctcagccgcgccctccatcagggcctccacatccacaccggtaacggcgatgggcagcaggcccacggcggtaaggacggaatagcggccgccgatgtcatccggcaccacaaaggtctcccagccctcggcgtccgccagagatttcagcgcaccccgggccttatcggtggtagcgtagatgcgcttaccggcttcctccttgccgtatttctcctccagcagctcccggaagaaacggaaggccacggcaggctccgtggtggtaccggatttggagatgatattcacggagaaatccacatccctcaccagatccagtacctcgctcagtgcgtcgccggagagaccgttgcccacaaagtacacgttgggcgtctctttctttttcaggttataattgggagaacacaggcagtcgatcacgccgcgggctcccagatagctgccgccgatgccgatgaccaccaatgcctgagaatcgctttggatcttcttagcggcagtccggatccgggtaaattcctcccggtcatacgcctgaggcagatgcacccaaccggtaaattctccgcccagaccggtgccggtctgaagtttttcatgggcttttttcaaacggggcagcagtgcctccttgtaaggcttcggtaaaaatgtatgcagatcaaacaactgaacatccagcatgtgattcaccctcatgtatcaaatttcagccagagggcacattttccctctgtttgtccagtatagcattttttccggggtacggcaagagaaaaagggcggtgcgggagccgttcactcagccaaacaagcgatccgcagtacccgcggcagcatttggaggaaggtgatccgggggacttcctccccggccagcaagggcagttctgccaaaacctcctccccggaagtgacggtcagcgttcccagccggtcccccaccgccaccggggcctgcacggaggattccagcgtcacggactggcccagttcccccgtccgggccttttccagcagcagctgattttcttccccaagaattggctggaccgtggcctgcgtccctaacttcaccggcaccggcggcagcggttcgtc

SEQ ID NO: 12192 - DNA, 14252 bp, Unknown
  gut microbiota DNA sequence
gggggttccaaaggtgaaagcaccaaagcgccgccgggggcggataaagcggcccgcttccgaggaaatggcacgattggcggcccatcagggttgggaatcgtgttgccgtgacggtgctttcgggctgctgccccggcctctgggggttggtttccaaaggcgggggccgaggcccccggcctttgtgtcgttgggggtccagggcgaagtcgaaacgccctggtgcttttcttccggggtgtggggcgggttcttttccagaaaagaatgcgccccacgtccctgcggtggaaaccgtcccttgcgggagcaggaaactatgcgaaagcgcacggcgatgccgtgcgctttctctttagccgaaatcatgacggctgcccgtcgaaattccaagctcttcgtaaagggaaatgatcgcttcgatcttatgaaagcaaatttcgtcacttagcgtatcgtcccggatgatctccaatatctttttcaacgtgcggcccgcggcgtcagacaccagacagcgataaaattcctgctcattctgcataaaactccctcctttatttacctgatacaaggatatactaaaatcaggtaaatgtcaatcagggttatccttgctaaaatggatagagcgaggaggggtcatatgcgtgagccaaaaagcattgtcagctatcagacaacggaatacggtcatgtgaaagtcacccttgcgaacgtgatggacgcacggggaatcacccgtaaccgtctgagaaccctgacgggtgtaaaatatgatgtgatcgaccgttattataaaggacaggacatcgctttggtggatctggattttttggcgaaggtctgctatgtattggattgcacagttgaagatttgcttcaatatgagggaccggatcaataaatagtaaggagggcgaggccctccttttttctttctttttttcccggtttatgatagactgaagctactttgagaggaggcgcctatgaaacgctttttggccgcgcttttggcggcattgactttatttacccttacaggctgcggaaaaacagagaatcccgctgaaccggtgacgccgggacaggcagaggaacccgccgcgcccacggaaccggagctgacaccggaggaaatcgcggaacaggagcgtctggcggcggaaaaggcccgtgaagaacggctgcaaggactgctggactccatgaccttagaggaaaaggtgggacagcttttcttcgtccggtgcccggagaccaacgccgtggaggatatttccacctaccatttaggaggctatctgctgttcggacgagactacaaggacggcgacagttggctgacgtgggagcaattcatccagaaaatcgagagctaccaggatgcggccgctatccccctgtttattggaagcgatgaggagggcggcaccgtcacccgggctagccggaaccctaacctcttctctgaacccttcaaatctccacagaagctgaactacatcggcggcattgaggaaattctccgggatacagacacccggagccgggaactgcgggcgctgggcatcaatgtgaatttcgcaccggtgtgcgacgtgtccactgaccctaaggatttcatctatgaccggacgctggggcaggacgcaaacatgacagcggattatgtgaggctggtggtgccggccatgacagagggcggcacgctgcctgtgctgaagcacttccccggctatggcagcaacgcagacacccacaccggcatcgctgtagatcagcggcctatggagacctttgagactgcagacctgctgcccttcaaggcggggatcgaagctggagcgcccttcgtgctggtgagccacaacatcgtgaactgcatggacccggagctgccggcgtccctctcccctgctgttcacaaaattctgcgggaagaatgcggctttgacggcatcgccatcaccgacgatctggcgatggacgccgtgaaggcctacgccaaggacggcgctgtggctgtgctggccttgcaggcggggaacgatatggtcgttaccacggactaccggacccagatccccgccgtcatcgcggcggtgcaggagggcacgctggaggaaagcgtcatcgatgacgcctgtctccgggtactgcggtgcaaggacacctttttggggatccccgaaaacaatccctgattggatattccatgaaaacagcctgatttgctacgattttttgaggttgtgcaaccaaaacgtcccttttttcgtctttccttgtgaacagctattagaaagaccggtctatgggaaaggagcatttctatgaaaaagtctctgcgttttttcgttttgttggctttagccgccgcattgctgacggtctccgcctttgcggacacggggccaaaggcgcagttaaaggtgctggtgaaaaatgccccggaggagccatactacctcgaccttttggaaaagggggattatcaggggcacacctatggctccggagacggggatgacacatacagcgggctggattggagctactccgaggaggagatcgctgcactggacagcgagctgctggacgcgctgcgggcggcggtgccggagggctggcacgcctgcaccgcgcagggcaccaacggtgcacccatgtggggcgacctgatcggcagtgacgcaggcggggtgcggctccattccttccgttaccatggcgtaccggatacgtatcggatcattctcgtaacaaaaagcggcgaaagctgggtatccggagtcctgcaccgggcaacgctgcaatccagcgcaacggtggattgggcggcaaggatcgccaacgcgcccagtccggccatggcctatgcgctgcaattcctgtgcaccctcctccctaccctgctgatcgaggggctgctgctgtttgccttcggctaccggagcaagagaagctggctggtatttctgctggtgaatctggtgacacagggcggcttcgccgtctatctcgccgtgacggtgttgaatcacggtgtaagcggctggtctttgatcttctatattcccattgaggtcatcatcacactggtcgaattgctgctgtaccgccgtctgctgacggaaaaaaacaaggcgcgagccgccgtgtacgccatcgctgccaacctctgctcggccgtgtttgggctctggctcattgacccgctgtggcattttatcgtgtcgatctcttaaaaacgaaaggaattttccccatggaaactgaaaagctatactacgcggacccgtttttgacggacttcaccgctacggttctggactgtcagccgggtaaaaacggctatttagtcacattagaccgcacagccttctacccggaggggggcggacagcctgccgatcatggcgttctggacggagcggctgtgacggacgtccacgaaaaaaacggcgtgattctccacaatgtggacagagccgtggaaatcgggaaaactgtcaccggcaccattgactggggacggcggtttgaccatatgcagcagcactccggagagcacatctgttccgggctgatctgtgagcggtttcactgcgacaatgtggggtttcacatgggcgcggacatcgtgaccatcgacttcaacgccgatatttcctgggaggagctgttggagatcgaggctaaggccaatcagtatctttatgaaaaccaccccatcgacattcagttccaccggggggcggagctggaggccatcgactaccggagcaaaaaggcgctggaaggggatgtgcggatcgtggccttccccggcgcggactgctgcgcctgctgcggcacccatgtgctgcggagcgggcaggtgggactggtgaagttcctgtcggtgcagaaattccgggagggcgtgcggattgagctgctgtgcggcaagcgagcactggaatacctgtccaaaacatgggagcaggccaaggccatcggccagcggctcagtgtaaagcctgtggacagcgacgcggctgtggagcggctggagggcgagttaaccagcctcaagctccgctgcgctcaattggaggaatccgtatttgagtccatggcaaaggagcaggcgggaaagggcaatgtgctgctgttccagcctgccatgcggccggacagcgtccggcggctgatggatgccgtgtccaagacctgcggcggtctggcggcagttttcgccggagaggagggccattacgcctacgccctgggccgggcggacggacaggacatcagccctctggtcaaggccatgaatacggtacttcacgggcggggcggcggacggaacggcttcgctcaaggcagcgtggagacggagcggagcgccatcgaatcgtttttcaaggagaatggatatggaatatgtgattaaggaattgcttcacccggaggaggatgacgaggccaatttcatctactcggagctagacagccaacgccgggagacccggcgggtagagttttatccctccggtatgtgctttgcctacggcggggatatgggacaggacgaagtactggaccccgcgcctttcccggaggacctgcggacactgaaccgccccggcgaggtggaggtccgggccattccccgtcagttgttcatcgaggtgtggaatcaggcacaggagcggcccgacggctttatggggatgttctattgacttctttaccgctgcggaaaatttgtttttcatagtaaaaccccggccccggacttttgtccggggccggggttgctattctgctattttacaatttgcggttgcctgttgtctgcggggtggcggatcacaccaccgcgaagaacttaatgaggaacaggacagagatcacataggtcagcacgctgacgtccttggccttgccggagaggagcttgaccaccgtgtaggagatcaggccgagaccgatggcgtggccgatggagccggagattggcataccgatgagcatgatggacaccggcagcatctggtccatatcgtcaaagttgacattcttgagaccctgaagcatcagcacaccgacgtagatcagcgcagcagaggtcgcggcgccgggaatgatggcggcgacgggagcgaggaagatgcaggcgagaaacagcacggcagaggtcagcgcggtcagaccggtgcggcctccagcctccacgccggaggcggactcgatgaaggtggtaacggtggaggtaccggtggcagcgcccgcgaccgtaccgatggcgtcggagagcagggcctccttcatgttgggcatctcgcccttctcattcaccatgccagcccgggaggcggtgcctaccagagtgccgatggtgtcgaacatatcgatcatgcagaaggtgatgatcagcgtaatggcagtgaaccagccgatgttcataaagcccgcaaagtcaaacttgaagagcgtggtagagaccatgtcggcgaagggcggcacaaagcttgcggtctcaaggcttgcaaagggattcacgccgaggaacgcgaagctgccgatccaataaaggacggaggaaaagagcatgccaagcagaacggcggccttgatacccttcttggccagcacgaccatgacgaacacaccgaggaacgcggtcacgacggtcaggaccatcgtgtcatagccagaacccatattgcccttgatgatactgggggtcagggcgccgaagaagtcgcgcatcatgtagaacggaccgccgttttcggaatagatgccaatgttggagccgagacccacgttcatcagcatcaggccgatggcaggggcgatgccgtagcgcacgccgagcgggatggcctccacgatcttctcgcgcaccttcagcacggtgagcacaaggaacacgatgccttcgatgaggatgatgacaagggcagcctgaaaagcgctggtgtagtcgcagtcattgatcacggcgatgttggccaccaccacggcgaagaagctgttgagacccatgccgggcgccatggcaaagggcttgttggccaggaaggccatgcaggcggtgccgatggcggaggcgatgcaggttgcaaggaacacgccgttccacagcggcgtgccgaccgcgaagccggtgagcagattggggttcagggcgatgatgtaggccatcgtcatgaacgtagtcaggcccgccaggatctctgtccggacggtggtgccgttctctttcagtttaaagattttttccatagttttcccctttctcttatcatagggtcccataaaggtccacctctgctataacgaaatcttaacacaaattcccgttcatgaatagttctgagatttactgaaaaaataggtatctctttagcatattgcacaaaaacagccctgtcatttcgacagggccgcttcgttcaggcagtatgatggggttcaaaggcttcttcgatcctttcccgcatccggaaatcccggcgctgccaaacaagagccagaaccgcaggtagcagaacaggcaggatcgtgcagcttccccaccccatcgcccacagcacacattctgcaataacgccggcatggaaggccaacagtgttcctccatagagattcatccgggggatatggtccgaatcccggaataaatgggcctggacccaggcatccacaaactggcggaggttgttggtagaaaagatggtggaacagggatacccgtattttccggcaaacacgcaccactggaagcccatggcgaaaatgcagatgtaaacacccagctccgataagtgctccggcagaacactcagcacacaggccgcagctgcatctgagagaatggcccacatccgcagatcgcccttacagcgtttcgacaggcaggctgccagaaaaatcgtaaaaccatacaggataacgattccaagacgcagcagcgctttgatccagttttcctgaaccgcgcttgtgaaaacctcaatgaaattgacggtcactgccgaggcgaagtgatgaaagtgcaaaatagcatacgcgccgaaccagccgccgatcagtgccatgcagaaatgcaggcgccgttttgattgctccaactgttcttccatgttcctctgatccttttccttaaagaggcggagagtcaatcagaccctccgccctgttactgcgttttcttagaacttgatcttctcttccagatagctcttcacctgatcaatggggatacgcacctgattcatggtatcacgctcacggatggtgacacagtggtcagcgggggtgttctcatcgcccacggtctcaaaatccaaggtaatgcagaatggagtgccgatctcatcctgacggcgatagcgcttgccgatggagccggtctcgtcatagtccaccatgaattccttggacagctcgttgtacagttccatagcggggccggagagaacctccttcttgctcagaggcaggatggcggccttaaagggagccagagcgggatggaagtgcatgaccacgcggacatcgtccttgccgttcttgtcctgacccacaacttcctcgtcataagcgtcgcacaaaacggccagaacactgcgctccacgcccagagagggctcgatgacataggggatatattccaccatgtccttgccttcaccctcgcggtagaccatcttctgaccgctggtattctgatgctgggtcaggtcatagtcagtacggtcggctacgccccacagctcgccccagccgaaggggaacaggaactcaaagtccgtggtggccttggagtagaagcacagctcctcgggatcatggtcacggagacgcaggttctcatccttcagaccgatggacagcagccagttgtggcagaaggtccgccagtagttgaaccattccaggtcggtgccgggcttgcagaagaactccagctccatctgctcaaattcccggacgcggaaaatgaagttgcccggggtgatctcgttgcggaaggacttgccgatctggccgatgccgaagggcagcttcttccgggtagtgcgctggacgttgttgaagttcacgaaaatgccctgagcggtctcgggacggaggtagacggtattcttggcgtcctcagtgacgccctggaaggtcttgaacatcaggttgaactgacggatgtcggtgaagttgtgcttgccgcaggtggggcagggaatgttatgctcttcaatgaagtccttcatctcggcctgagagaaagcgtccactggcttgggcagttcaaagccggtctcggcgcaccagtcctcgatcagcttatcggcgcggaagcgctcgtggcactcgcggcagtccatcaggggatcggagaagccgctgagatggccgctggccacccaggtctgggggttcatgaggatggcggcgtccagacccacgttataggggttctcctggacgaatttcttccaccaggcgttcttgatgtttttcttcagctctgcgccaagagggccgtagtcccaggtgttggcaaggccgccatagatctcgctgccggggaacacgaagccccggtttttgcacagggcaacgattttgtccatggtcttttcagtgtttttcatggtttcctctcctttttgtttggtggctcagagcaatttcaaaattgcatgcacgcaattctgatgccacgcgtcccggctgccgtgtctgcggcgaggggcgcggctcaactcatgcgtttttgcgcagcaaaaaacgccctgagcctattttagtaggctcagggcgaacataatgtccgtggttccacctgaattccccgttggaggcggggcacttcgttcccggtaacggcggggtccggcgaagcatttccgctccgcggctccagggcgccatccgatgctttccggaggagcttacaccaaccgctccttctctgaaaccggatccagcaggacttccctgtcacagcctttcacccggtcactgtatcacggtttttgaacattgtcaaggcaaacagcggaaaacggccgttttttcattgagtttctgaaaaaactcaccgactttttcacaatgttgaaagaaatccagaaaaataggacaacgctccgcctgaaagacggagcgttggttcggtttactttttctcccgatcgtaggccacgatgacccgacgattggggtccacacccgtggaataggtggtgacaccgggaacctcctgcaaagccgtgtggatcacatggcgctcgtaggcgttcataggctccagggtaacgctgcggcgatacttgaccaccttgcccgccaccttgttggccagacgctccaggctctgttcccgcttggcccggtaattctcggcgtccagttggacacggacccggctgccggtgcggttgacggagtagctggtgagctgctggatggcgtccagagtctcgccccggcggccgatgatggcgccaaggccctgaccttccaggaacaccttgtagcggcccttttcagggagatacaccttgacctctgcctgaacctccatctgctgaaggaggccggagaggaacttacggatctcctgagcccgctcgtcgttcacttcctcgcccagatcctccgggaccttgacggtctgtgcttcctcggtcttgggagcaagctccttcttgaccggctcttcccggcgctgaggcttttcggcgggcttcttttccgtccggggcttctcggtcttgggcttgtcctcccggaccttttccgccttgggctgggcgggagcggcaggctcctcgtcctcaccgtagctgacccggaccttggcagggcagctgccaagacctaggaaaccggcctttgcccgctccaggatctctacagatacatcgtcccggtccagcttcagctgctccagagcacggttaatagcttcttcttccgttttgcccgttacatcaataaactgtctcataacggctcctcattatgtttcgtcatagcggtccgccttgtaagcacggccacgggcataggggcggtcacccacccggccagcctcggtggtgctggtagcggccttggcggctttggcggctttggcagcctgagcagcctgctgcttttcacgcagagtctgcttcttctgctcttcctgctttctctgccgctcctggatgcgagcctcttccatacgcttctggcggtcagcctggcgggcctggaagcgggcctcctcttcctcgctgagcttggcagagaaggtcttgttaagaattgcctcctggatcagggagaacacactctgggcgatccagtacacgcccagggcggcaggcatgatgaaggcgatgtagacgctgaacagcggcatcatatacatcatggacttcatggatgcaccgccggcggcgtccgcctgaggctgggtcttcatggtaagcttgctgaacacaaactgagaaagaccggccagaatggggatcaggatcacgccgatcacggcccaggtgaaggtgaagctcttgacatactcccagggagtagcggtcaggtccagacccaggaacttatagttcacgttgaaccagccatccggcgtggaaaggcccatttcctgcacggctttgaccaggttgatctggccgtaggcggccatctgatagagaccgtccttcagggccggagcgccggttgccttatccatcataacgatgttcgtcaggtcaacgccggcatccgcaacggactgcactacggtctgcaacacatccttggagagcatcatgaagtgggtaatgggctgacggatgatcgagtacagcgccatcagaatcggcagggggagaaagctccagaggcatccgctcatgggattgacgccttcctcttcgtagagcttctgcatttcctcctgaagcttggcctggtttttggcatagcgcttctgtaactcctgcatctgaccgctgacgcggctcatgcgcatcatgctcttcttggacttcatctggaagggcagcatgatgagcttgatgaccagagtaaacaggatcagagccacaccgtaggagttcgtcaggtcatagaacagacggaccagccaggcaaagggtacgcaaatgtagtagccaatggtggacattcttgtctttcctccgatattcttttgaatcagggaacggggtcgtaaccgcctttgtggaagggattacagcgcaggatccggcggaaagccatccagccgcccttcagggcgccgtatttttcaatggcttccagcgcgtattgagaacaggtaggggtatagcggcagcagggcggccgaaacggagaaatagcccggcggtaaaaccgcaccaaagccaaaagaacccgcttcatacgggctccttcatcagatctaccttccggcacagacggcggaactgcttttgcagctccggccaaggggccgtggcagttctgctccgggcaaccaggataatatcatatcccgttttcagctggggcttttccagacggtagacctcccggagacggcggcggcagcggttgcgcaccacggcatgtcccagctttgtagaggacaccagccccagacggttccggcccagacggtttttccggcagtacagcaccatgacgggactgacagccgaaacgcccttctgataggttctccggaattcataattctctttcagcgtgaccgctgctttcatgactcgttccctgtcctttcaccctgaacaaagtttccttggatacaattccagggacggaggacgcttgcagtcccaccgtccctaaaggacattgttcaggtgtctcccgcgcatgagtccttcttagtaactcaggcgggcacggcccttggcgcggcggcgagccaggaccttgcggccgttggcggtagccattctcttgcggaagccatggaccttctggccgtggagcttcttgggctgataggtacgtttcgttgccatgttgagacacctcctgtcagatttccgtccgccttgcggcggcatttactcgacacccccggagaccggcggcgcagtaagcatatcagtgcgtacttatgacgcacggattagtatacatactttttcaaattctgtcaagaaaaagttgcagattccgtgaaaaacatccggttttttctgtttcctgtacgttttggcagatattgtactttttttgtcggagataaccacattttgtttcccgacagcccctaaatttttgaactttattatttagtatatgtgtaatttctgttgcctgaacgttctgtttttgatataatgtaactcggtatgattttgtcttttataacaagagaggtgttctgatttgaattctgtcgctgatgtgtggaccaacgtcctccagcagctcaagaaggatctctcggagacgaccatcaccacctggttcgatgaactgacggcggtggacatccgggaaaataccttctatctgcactgtcccaacgactttaaaaaacgatacatcgaatccctgtttatcaaaaacatcaaagccgcccttcaggatctcttctccatggagtttgaagtgaagattctggatgaagcgggacttctggaatttcagggcggcgcgcccaagaaaaacagcgatcgcttcacctacgaggatttcacgtttgagactttcgtggtaggtcccagcaataagctggcctacgccgcctctatggcggtggcggagcatcccgcccagaactacaaccccttgctgatctacggcgattccggtctgggcaagacccacttgctgtacgccatcgctaacgtgatccggcagaatgatccggctgctaaaatcgtctacatcaagggcgatgacttcatcaatgagttcattgagctgattcgggcaggccgtggcagcgacttccgggccaagtaccgggaggcagaccttctgctggtggacgacgtgcagttcgtggccggcaaggaacaggtccagaatgaattcttccataccttcaataacctgtacgaatccggtaagcagatcgttctgacctcggaccgtcccccctctgagatgacgctgctggatgaccggctgcggacccggtttgaatggggcctgctggcggacgtgacgccgccagactttgagacccgtcttgccatcgtaaaaaataaggcggcggcgctgggtatggagcttcccgataagatcgccagctacattgctgaaaatgtcactgccaacgtccgacagctggagggcaccgtcaataaaatcctggcttacaaggatctgctgggcagcgaagccgacgaggccacggtcacccgtgccatgcaggacattctgaaaaagagcaacgagtatattcccacgccggacaacattctggactacatcagcaagtattacgggatcgaaaaagagatcatctgcggtcagcagcgggtcaaggatgccgtggctgcccgccagatcgccatgtacctcattcgcggcatgaccaatctgcctgtggtggagatcggcaaggtctttgacaaccgggatcactctacggtgctctactctctcaagcaggtagaaaagcagatgaaaaaagaccccgctttcgccgagacggtgaaggagatcaagaccaatatcaacaaccgccattgaccgtatttttccacattcgcaagggaaaaagaaaaactgcaatgtggaaaaagaaagtccgtgtaaaaccgatttttttccacatcttttttccacaagggcgtggaggctgtaaatattggggttgcaagggtttttctacttttccacatttttttgcactactgttactttcttctaaaaaatttattttttctttttaaaaagcgcttttatccctatttgatacagaaaggaagcggctctcatgattaaattttcctgtgaaaaagttttcctccaaaacgcgattgccgtcaccagccgggccgttgcccagaagagctccattccggcgctggaaggtctgttgatccacgcggaccagcagttgaccatctccggctacaacatgcagaccggtattcgtaccaacgttttcgccaacgttgtggaaggcggcgacatcgtactgaacgcccggttgttcggcgatatcatccgccggatgcccgacgatatgatcacctttaccgctgatgaga

SEQ ID NO: 12193 - DNA, 873 bp, Unknown
  gut microbiota DNA sequence
gtaatagaaaacaacaatttgcgaattcgagtcctgtatcgtccaccaaacaaatcccttagagccgcaaggctttgagggattttttgctgcgctgaaatggtgtttacccttcatcttaccctttacagagaatctttgcgaccggattttccgcgtattggtggatcgtggtgcacagttcctgtccgatccggatacggcctgcggttaacaggcagagctcttacaaggctgcctgagatagaaacgcccggtataccgccagtccgtccaccgtgcccgtttggcagtccgctgtcagccgctcagggtgccattggatcccccaaaccggcaaggttttgtgccggaaggcctctactatgccgtcctccgcccgttgcagggcctctaaaccggtgcctaggcggccgatgatctggtggtggcagctgttgaccacacagcgctctccgtatagctcccgcagaaaggacggtgcattttgaacgctgtggagccggtcaacgccttctatggcgctgtgtcctggccagtcctgcaccagatcgccgccgaaaaatacattgatggtctgcattccccggcatatacccaggaccggcttgccaagggccgtaaaatccgccagcagatccagttccagcgcgtcccgttccggctccagatcccggcaggctgtgtttttctggccgtaacgccaggattccatgtccccgccgccgggcagcagcaagcagtcgcaatccgccggccggctctcgaagcaggaaatccctccggcacgttccaccgccagtggatagttttggtaagttgcggcatcaccaagaatatagacccgcagggccatagcacttcctccttcgt

SEQ ID NO: 12194 - DNA, 1268 bp, Unknown
  gut microbiota DNA sequence
tggtgaaaagcctgcgaaaaccgcaggaaaaattttgtgcggattttctcttgcgggcggtattgtatctgtataaaatacattcatctataagagacggacgctttgagcagtccggatctcgcaaggaggatgaattgaatgaagaagtttgtttccatcatgctggcgctggctatgtccatgagtctggcggcctgcggcgctgacagctccagcgatgccagcagcgacagccagagcagttctgacgccgcttccggtgaaaaagtcgtaaagatcggcgtatttgagcctgctaccggtgactccggcgccggcggcaagcaggagatgctgggtatgcagtacgccaaccatatgacccccaccgtggacatcggcggcgagacctacaaggtggagctggtctatgccgataacggctccgattccgccaaggctcctaccgccgcttctgagctggtgagcaaggacgtttctctggtgctgggtacctacggctccagctccgccattgccggcggccccattttcggtgaagcgggccttgccgccatcggtgtgacctgcacgaaccccaatgttaccgcgggcaatgactactatttccgcatctgcttccttgacccgttccaggggacggtgctggccaacttcgcacaggataagttttccgccaagaaggcctactgcctgggcgagctgggcaatgactacgatcagggccttgtgaaatacttcaccgatgcctttgacggtgaggtcatcaccgatgctttccccaccaacacctccgatttcagcacgtatcttgccaaggcaaaggatcagggggctgaggtcatcttctgcccggtgtccattgcctacgctacccagatcatcaagctggccgcatccatgggtctggagatccccattctgggctccgatacgctggacagcaacaaggtgctggaggcggctgccggttccgatgtgcagctgtatgtttccacgttctatcaggagggcggctctccggagtttgatgacggtatcaaggcatggatgaacgaggattccaccgccatgaccaacaacggcggcaacgataccatcgcggccgtcaccgccatgggctacgatgcctactatgtggcgctggaggccctgaaggccgcaggctccaccgatcccgccgccgtcaaggccgcgctgcccggcgtgacctacaccggcgtgaccggcgtcatcgcctttgacgacatcggcgacgctatccg

SEQ ID NO: 12195 - DNA, 6279 bp, Unknown
  gut microbiota DNA sequence
tggatgacgacgaccagaacaagaagtaagacatacgtactggaaccgatgggacggggagttttccccgccccattggggctgttttggagacaatgtaggaaatcaggactgaggagcctgaaacggcggaattccgcaaagaggcggtttccggctcctgatttctgatcgcgcatggaggagtagagtatggcagcggaaaaacgtgattattacgaggtcctgggcgtcaataagggcgcctctgaggacgagatcaaaaaagcatataagaagatggcccggaagtatcatccggacctgaatcccgacaataaagaggcggaggagaagttcaaggaggtcaacgaggcatatgaggttctctctgactctgataaaaaagcccgttatgaccagttcggctttgcgggtgtggaccctaactacggagcgggggccggcggcggtgcttacggtgccggcggcttcgactttggcgatctgggggatattttcggcagcttctttggcggtggcttcggctccgcccagcgccggaaccccaatgcgccccagcggggcgagagcatccgcctgagtgtgaccatcagctttgaggaggcggccttcggctgcgagaaagaggtcagcgtggaccgctatgagacctgcgcggtctgtcacggctccggttgtgccgacggcacctcgcccgaggtctgcccggactgccacggctccggtcaggtgcaggtgcggcggcagacgcccatgggtgtgttcgccaccacctctccctgcggccgatgcggcggcaagggccgcatcatcaagaccccctgtaccgcttgccggggcagcggcttagagcgcaagcgccgcaccattcaggccaagatccccgcaggtatcgacaacggccagaccatctccatccggggacagggccacgccggaaagaacggcggcccgtccggtgatctgctcatcaccattacggtccggccccacgagctgttccgccgggagggtacctccgtcctctgtgaggcccccatcaccttcgcacaggcagttctgggcgcggagctggagatccccaccattgacggcaaggtgaagtatgacctgccggagggcactcagtccggcactaccttccggttgaagggcaagggtattcctgagctcaacggccggggccggggcgaccagtatgtgactgtttatatcgaaacgccccggaacctgaaccgggagcagaaggaagctttgaagaagttcgcggaatccgtaggtgataacaactacgaggaacggaagaagttcttcaagaagtttaagaagtgaggcaaggtatgtatctggcagattaccatacccatacgcagttttctcccgacgcccatgatcccatgacggtgatggcccaggccgcgctggatgccgggatggatgagatctgctttacggatcatgtggagcccctgacctgggggtccaatgagctgcgcccgccctatgactggtcggcactgacagcggatttcgccaatgttcaggccgcgctgggggaccgcatccatctgcggctgggcatggagatgggcgacgcgcagaaggccccggcccacatgaaaaagctgttggaggacgcgccgcagtttgatttcatcatcggctcggtgcacctgctgtcggagcgcttcggaagcgaggacctgtatctctacacgcccaaggatcaggcggaggctcagaccgcattgggagattatctggaagaggttttagcgctggcaaagctgggcggctttacggttctgggccatttgactctgcccctgcggtatttcaatgagatgcgggggcttcataccagctttgatccctatgaggctgagatccgggaaattttgaaaactctgatcgaaaacgggcgaggcatcgagctgaacgtcaaccggggcaatacgcccttgccggacgccaagtggctgcggatctaccgggagctgggcggtgagctcatcaccctgggtactgacgcccacagcccggagcatgtgggtcgcttcatccgggagcggcaggctttgctgaaagagtgcggctttaccagattctgcacctttgaaaagcagatgcctgtctggtacgcactgtaataaagaattgatttttgccggagggcggtgtatactgaccctgcatcatccgaaaaaacgattatttggaggaaatgactatgaaaatcgcattgggctgtgaccacggcggctatgagctgaagcaatttatcatgaagaccctggaaaagctgggctatgagtatgaggatttcggctgctactctctggagagctgcgattatcccgatttcggcgctgccgctgcccgtgccgtggctgagggcaagtgcgaccgcggtatcgtgatctgcaccaccggtatcggtatttccattgctaccaacaagatcaagggtatccgctgcgcccactgtgccgactgcctggaggcagagatgacccgccgccacaatgacgccaacatgatggccatcggcgcaggctttaccggcaagaacatggcagagcgcatggtggaggtgttcctgaccaccgagtttgagggcggccgccatgagcgccgggtcaacaagatgatggccctggaacaggaataatagaccgaaaagcagaaacggggtgaggcggcatggcatcaggcaccagaggatacagcagctatcgcgggagaggccggaaggggaagattttcctggccatcctgctgatcctcattattctgggttctgtgggctttattatggcccgggagcacatgcgctatgacgccgacggtaatctccattttgatctgccttgggacaaagggacttccgaccctgtcgaagcccccggagacccggatgtggtgatccgggaaccggagcagaccgctgtcaaaacaccggtccgggggacgctgctggcggcaaagccactgacaatggaagatcaggagaccgctgagacgccgctttccgaagccgccgtaacggcggtgacgctgaaggacagcgccggccgggtgtattttgacagcagcgctgccgtgaccggcgcagtcagcgtgaaaccggacaccggggaggcactgaatggcctgacggcccggacagacgtgaccgctgcggcccggatcgcctgcttccacgatcccaaggccgccaacgccgacgtggaggacatgggcctgaagaacaccggcggttatatcttctatgacggcaacaacagccagtggctggaccccggccatgaaaaggcccggacgtatctgctgaatatcatccgggaagctgcggagcagggattccgagagatcattctgacggatgtcaactatcccaccgcaggcaagctggacaagatcgacttttccaacgccatgaccgccgggaacacggcagaggcgggacggcaggcacagatcgaggacttcctccgggaggtgcgggatgcactgccgaaggatgtgatcctttctctggaactgcctgcggagactgttctcaccgggacgaacagtgacgccgggcaggaactcagcgccttggcgccgctggtggaccgcatctatgcggagaccaccgaggtggaggcccctgcattggagaccgccgtcaaggcggcgtccgctgcctgtgactttgtgccggagctgacagaacagcctgccgaaggtctggaaaactggctgttgctccaaaagtaaatgaaaagtatcccgcattgttttcacaatgcgggatacttttttacagctcgccgagaaattccccgtcccggtggatttttacggtgatgggggcaaactgagggtacgcggacaaaaattcgtcggtaaaatcgaagtcctcccactggtgcatgggcaggaaccggcgaacctccatcagattcaaaaaatagttaggccccagatagccgtccgttttcagccgggagtctaacggcagcatggacaaatcgacgcggcggccccggagaggttctgtgtaccgcttgaaattggcctccatattgcggttccaagccaagtcctcttccgcccagtgccaccagttcaggtctccggcgtggaagatggactgtccgttgaccgttaccatccacgccacgccctcgtcggtggaggggaaggtctccacggtgacgccggggagaggggtaaaggtgtcatgcttgccgcagcggcggcatttggcggcggtctccggtgaaagctgccactttgtcaaattgtggggcgtcaggtgaaagtcgctgcctaacaggaattgaatgtccgccttgcagtccgccagtgtgaacaccgccggattgaagtggtcctcgtggcggtggctgacgaacaccagcagcggcttgtccgacaggggcgggagaacgcccttccaccagtcgaacagcaggcagacctgatccagttcgatgaaaaaaccgtcgtgggccaaaaatgtgacacgcatgtaaattttctccttgattcgcaaaaagggggtgggaagccgtctcaccttgtggtaagattataacatgaaacaaacagattcgacaactgaaaatctattgcggacgcttccggagccgctgttgggctggtaccgggaaaacgcccgggacctgccctggcggcacacagaggacccttaccgcatctgggtgtcggagatcatgctccagcagacccgcgtggcggcggtcttaggctattatgcccgttttttggcggtgtttccctctgtggaaatgctggcggagggagacgaggagcagctcatgaagctgtgggagggccttggctattacagccgggccagaaacctgcaaaaggcggcacgggagatcacggcgctgggcggctttccggacacctatgacggcctgctggccctgccggggatcggagactataccgcctccgccattgccgccgcagccttcggacggcgggaaccggcggtggacggcaacgtgcttcgggtcatgacccggctgacggactgccacgatgacatttctgatccgaaaaccaagcgggctgtccgggcagcgctggcggaggtcatgccggaggaaccggcggacatccgcattttcaatcaggccatgatggagctgggggccacagtctgtgggcccaataccgctccccggtgcgatgactgccccgtaagcggcctgtgtctgggccgacagcgggagacggcagagaccctgccggtgaaaaaggcgaaaaaggagcggcgggtggaggaaaaaaccgtgctcctgctgaaacgagacagaaaaatcgccctgcggaagcggcctaaaaccggcctgctggcgggactttgggagtttcccaatgtggagggcgctctggatgaaacagccgccggtgcggcggtggaggccatgggcctgtcggtgattgactggcagagccgcctgacggccaagcacatcttcacccatgtggagtggcacatgaccggctacgcgctgaccgtccggggcgacggccctgcggaactggaatgggtggatgcggcaggccttgcggcacgctctgtgccgtcggcgttcgcccggtattatgaagaagcaaagcgtgaattggagatgaagtaaaatgggattcttgctgggactgcctttgaagctgctggcgctggtctttggcctgctccgggtgttgatccctgtcttgctgctgattttggttgttcgttggctgtggcggaaatacggcggccacaggcgctcggaatcagcaaaaaaagacgaaccccacttcaagggaccggtgtataccgtggattacaaggaagtcaaggacgatgacaggcacaaggaatgatcctgcttgccgccctgatgttataaggagaaatcatgctgaaggtttttaatgtcatcggcgttattgtgctgcttttgctgctgcggaagctgatttggtgtctgcgatggctgtggtgctggaaacatgaccgggagaccccgccgcccatcggctggctgcccagccgggacggtggccggtttgacgctcatgtgcaaaagtatgacagggaggactgacaatggctttctggaaaaagagcgaggacccttgggacattgtccccaatcaacgccgcacggcttcagaaccggcggaaaaagcccccggtctgttggatacccttcggggggactgggacgatatgcgggcggaatggcaggagacacggga

SEQ ID NO: 12196 - DNA, 4259 bp, Unknown
  gut microbiota DNA sequence
cttattttaccttatctttatcaaaaagtcagtttttctccgcaacaggcgacattttagagatgcagccggtcgtttttatgaactggtgtgactcgaacgccagggcttcaaaaaagaacaaaccgacaggccaccgatctctccctcacggggagcaggtcgatggccttttttcgtctccaatggtgcttatgttgcttctgcttcgcttgtgtgtcattccctggtggtattggtaatagctttctcgtaacctttcgggtataaaaacttataatcacttataagacgtgaggttctgaaaactctgcaggtgactgaattttaagaacttatgggagcttatgaggacttatgggctgcgtgattattttaacgttaattatttaacggatatgtaaaaaatttaacgatccctttgtgggaagtgcagaaaatccgccggaaggggaaaatgtccttgcttaatagtgggggagaccgtataatactaagcaggtgaaactggccttgacggaatgctttccggtcagcggccccccataatcacataaattacaggaggacaatcacatgaaagtagcgattttcggcgccggcaccatgggcagcggcattgctcaggttttcgcggctaagggccacactgccctgatgtatgcaagctctgtggcttccgctcagaagcacaaggataagctggctgcttctctggccaagcgcgtggccaagggcaagatgacccaggaggctgtggacgctctgctggccaacatcctggtggaggagaagtccgcctgcgctgacgccgatctgatcatcgagtgcgtcaaggaagacatggctaccaaaaaggagctgctctgcgagctggacgagctgtgcaagcccgaggccatcttcgcttccaacacctcctctctgtctatcaccgagatgggcaacggcctcaagcaccccgtcatcggcatgcacttcttcaatcccgttcccagcatgaagctggtggagatcatccgcggtgccaacaccactcaggagaccttcgacgtcatctacaagctgtctcaggagatcggcaaggatcccgttgaggttgctgaggctcccggcttcgtggtcaacaagatcctgatccccatgatcaacgaggccatcggcctggttgagaccggcgttgcctctgtggaggatatcgacaaggctatgcagctgggcgccaaccatcccatgggccccctcgctctgggcgacttcatcggtctggacgtgtgcctggctatcatggagaccctcttcaacgagaccggcgacggcaagtatcgtcccgctctgctgctgaagaagatggtccgcggcggcctgctgggccgcaagtccggcaagggcttctacgattacagcaagtaaatcatcccatgaccgggccgctgaaaagcggcccggttttttacattttcagacaataaaacgtaaattttacaaggatactggaccttccgacatatgagacagttttagcgttaaaagtttggcaattttcacgaagcgcttttccttgcctttctttcgcggctgcgttataattttcacatagtaaaggtgaaaagtgggcactgggttgcaacaggggcgttgccgctgttgcgatttctttgagttttggtgttaaaaatgtaacaaagtaatcgcttttttaccgaaactatctcgtattgcttgtcccggaggtcatgaaattcttcaaatgctgacgggagattgtaataaccgaacaagaaattgtaggaggatcgaatcatggattttcatctgacaaacgagcagcagatgctccgcaagatgtaccgggaattcgccgagaacgaggtcaagcctctggctgaggagatcgatgaggaagagcgcttccccatggagaccgtcgagaagatggcgaagctgggcatgatgggcatttacttccccaaggaatacggcggcgccggcggcgacgtcctgtcctatgccatgtgcgtggaagagttggccaaggtctgcggcaccactgctgttatcgtttccgctcacacctctctgtgctgcgctcccatttatgagaacggcaccgaggagcagaagcggaagtacctgcccgacctgctgagcggccgcaagatcggcgctttcggtctgactgagcccaacgccggtactgacgcttccggccagcagaccaccgctgtcaagaacgagaacggcgactatgtcctcaatggcagcaagtgcttcatcaccaacggcaacgtggccgatactttcgtggtgttcgccatgaccgacaagtccaagggcaaccacggcatctccgccttcatcgttgagaagagcttccccggtttctccaccggtaagcacgagaagaagatgggtatccgcggcagctccacctgcgacctgatctttgaggattgcatcgtgcccaaggagaacctgctgggcaaggaaggcaagggcttcaagatcgctatgcagaccctggacggcggccgtatcggtatcgcttctcaggctctgggcctgggcgagggcgctgtcaacgaggctgtcaagtacactcaggagcgcgtccagttcggccgccgcctgagccagttccagaacactcagttccagctggctgatatgcacacccgtatgcaggctgctcaatatctggtgtacgctgccgctatgaagaagcagctccatgaggattactccatggacgcttccatggctaagctgttcgctgctgaggccgcttccgacgtgacccgccgcgctgttcagctcttcggcggttacggctacacccgtgagtatcccgtggagcgcatgatgcgcgacgccaagatcaccgagatctatgagggtacttctgaggtccagcgtatggtcatttccagccatctgggcgtgaaataaggataggaggtaaaggttaaaatgaaaatcattgtttctattaagcaggtacccgatacctccggtaaggtggctgtcaatcccgatggtactctgaaccgcgcttccatgcagaccatcaccaaccccgacgatatgaacgctctggaggcagccctgaagatcaaggacgccaccggctgcaaggtcactgttgttaccatgggtcctcctcccgctgctggtatgctgcgtgaggctctggccatgggcgctgacgaggcttatctggtttccgcccgtgagttcggcggttccgatacctatgctacttcccagatcctggccgctgccatcaacaagatcggcgtggagaaggacgatatcgtgctgtgcggccgtcaggctatcgacggcgataccgctcaggtcggtccccagatcgctgagaagctgcacctgccccagatcacttacgctgccgagatcaccaagaatggtgacgaggtcaccgtcaagcgtatgctggaggacggctacatgaccatcaaggtccagactccctgcctgctgacctgcatcaaggagctcaacgagccccgttacatgagcgttggcggcgtgttcgaggcttacggcaagcccctgaccactctgggctatgaggacctgaaggacgatcccctgatcgatgccaccaccattggcctgaagggctctcccaccaacatcttcaagagcttcacgcctccccagaagggtgccggcatgatgctggagggtgctgataaggctacctgcgagaagctggccggtattctggccgctaagcacatcatctaagaaaggggatagaaaatcatgtctaatttcaatagtgctgatatcgctgctttcaaggatgtatgggtgttctgcgagcagcgcgagggcaagctgatgcccaccgatttcgagctgatctccaagggccgcgacctggccaacgagctgggcgtgaacctgtgcggtctgctgctgggcggcgagggcattgagtccgccgctaaggagctgggcggctacggcgccgacaaggtcattgtctgcgagagccccctgctggctacttacaccaccgacggctacgccaaggtcatctgcgacgtgatcgaggacctgaagcccgaggcattcctgatcggcgccaccaacatcggccgtgacctgggcccccgctgcgcagcccgtctgcacaccggcctgtgcgctgactgcacccatctggacgtggatgtgcccaactacatccagttcctgcgtgagtcctccactctggacgttgactccat

SEQ ID NO: 12197 - DNA, 2998 bp, Unknown
  gut microbiota DNA sequence
cctgacgggtgctttcatgaccgtcaggggcgctttttctccaaaaatccagaaaaatccagcgttttttggttcgcacaccgccgctggcggtcctgtgggagcggtcctgccgcggcccgcacaagtctgggaaaggaatggtcatctatgaaccagtcgtctactgtgagcaccggcaggtccacgatccggctcaacaggatcaaaacctacttctcaaagccccataatgtcatcctgctcattatgggcatcgtgctgacggtgaccaccgtcgcccccatcgtcgccatcgtgcaggataccttcaagatccacgcgggcaccatcgacgcccacctgacgggtcaggccagcggctataccctcgtcaactacatcgaccttttcaccagccgccttgccatgagcaacctgtggatgccgctcatcaacacggtgctgctggcggtgggcacctgcgtggtggccatcgtgttcggcgggctgttcgccttcctcattacgcgcacgaacctgtcctgccgcaaatacctcagctccatcttcatcttcccctacatcatgccccagtggacgctggccgtggtgtggcagaacctgttcaactccaacgccgtcaccggcacgtccaacggcctgctggccgccacgctgggcgtgcagatgccgctgtggtggtgcaagggcctgttccccagccttgtggtgctgggcctgcactacgctccctttgcctacatccttatcggtggaatcttccgcaacatggacgccaatcttgaggaggccgccacgatcctggacacgcccaagtggaagaccatgttcaagatcacgctgcccatggtcaagcccgccatcctctccaccatcctgctggtgttcggcagctccatgggctcctatcccgtgccccactatctgggcctgaccaccctcgccaccaagtacgtctctttgaactccaagtacaccggcgaggccagtatcctcgccatcatcatgatgatcttcggcgtggccatcatgttcctgaatcagatgagcctgcgcagccggaagaactacaccaccgtcaccggcaagtccggccagacctccaagatcaatctgggccgggcgggcaagcacatcatcgccgccgtgctgatcgtcatcacctttttcaccagcatcttccccatcgtctcctttgcatttgaaacgttcctgcccaacccgggcgattacagcttcctatacaccggagacgccgacaacctgaccgtcaaatggtggacgacggacgagaacatcacggaaaacggaatgtacggccagaagggcatcctgcacaacgagaccatctggcacgccttccgcggaacgatcctggtgtccgtgtgctgctccctgctggccggtaccatcggcaccatgatcggctacgccgtatccaagacgaggcggagccgatgggcgaactacgtcaacgcggtggccttcctgccgtatctgatgccctccatcgccgtgggcgtggcgttcttcgttctcttttccaatcggtacgttaacctcttcaatacgtacacgctgctcatcatcgtcggcaccattaaatatatccccttcgccagccgggccagcctgaactccatgctccagctctccggcgagatcgaagaggccgccatcattcaggacattccgtggagcaagcggatgacccgcatcatcatccccattcaaaagtcctccatcatcagcggctatctgctgccgttcatgacctgcctgcgcgagctgagcctgttcatgctgctgtgcgttcagggcttcatcctctccaccacgctggactatttcgacgaaatgggtctgtacgccttctccagcggcatcaacctgatcctgatcgtcaccattctgatttgcaacaccctcgtcaacaaggtcaccggcgcaagccttgataagggaataggaggttaaatcatgcctgagatcgtattgacccacgtaaccaaacgctgggataaattctacgctgtggacgacctgaatctggttatcgacgacaacgccttcgtcacgctgctggggccctccggctgcggcaagaccaccaccctgcgcatgatcgcgggactggagactcccaccagcggccgcatcaccatcggcggccgggtcgtgtatgacagcgaggccggcatcaatatcccgcccaacaagcgcaaggtgggcttcctgttccagaactacgccctctggcccaacatgaccgtctaccagaacatctccttcggcctttccaatatcaaggaagagctgcccaagttcgacccggacgccagccgcgccgcaacgctgctgcgcgtcctgcagaagccggacgacgtggtaaagaccatcgtggagtgcgtggacaaaaagggcaagctggacgtgaacaaggcccagatcaagctgatcgaccgctatgagatttccatctacgccgccaagaccctgatgagctacaagctccacgagtccatggagccgggcaccgtggcgcaggcccgccgcccggaactggaggccgcgctcgagtccgcccgggacaaggccgccgccgccggctgcacgctcaacgaccgctttgagtacgaaaaggacggcaagcccgtcaccgccgtgcgcaagctgacgccggaggagatcgacctgtccgtgcgccgcgtggcccggatcgtgaagatcggcatgttcatggaccgctatccctccgagctgtccggcggccagcagcagcgcgtggccatcgcccggacgctggctccggagccgacggtgctgttcatggacgagccgctgagcaatctggacgcgaagctgcgccttgagatgcgctccgagcttcagcgcctgcacatcgacaccggctccacctttatctacgtcacccacgatcagatggaggccatgacgctggccaccaagatctgcctgatcgaaaacggcgtcc

SEQ ID NO: 12198 - DNA, 13598 bp, Unknown
  gut microbiota DNA sequence
aaatgaattccgccttgtgccaaggttttggctccgccaaaacgcttgtacgcgcctgacggcgcgccccgccgtgcggggccccggacaatgtgccgtcagcttactcatttcacgcgtcccatttatagccataaccccagacggttgtgataaacgtgggattctgcacattgtcctcgatttttaagcggaggcggcggatattcacgtccacgatcttcagctctccgaagtagtcccgcccccagacccggtctaagatctcctcacgagacagtgccttgccgggattttccataaacacccgcatgatggcatactccacctgcgtcagcttcactcgctggccgtttttttccaacgtccggttgcgggtattcagtaaaaagggcggctggctgatctcaccgctctggaccacttcctccccgccagcccggcggaacagcgcgtccacgcgggcggtaagctccgccggagaaaagggcttggtcacataatcgtcggcgccggtcatcagtcccgtcaccttgtccatctcctgagaccgggccgtcagcatgatgatgccgattttcgtattggtggcccggatgcggcggcagacctcaaagccgtcgatccccggcagcatgatgtccaaaagagccaccttggtatccgggttggcccggagccgttccaatgcctcctcgccggtctcagcctcaatcacatcgtagcccgcccggcggagattgatgacgatgaagctgcggatgctggcttcatcctccaaaaccagaattttcttcacgaaagctcctccatatccatcagttgtcccctgcggaccattccgtgccgatcaggctgaaggatgcccgcacctcgtcctctgtaacgctgtacttccaatcctgattgcccttcagcaactcgcccacatagatgacgccgtcattccggcccaggatgaaccgtcccgtccgcaccgccagccgctcccgttcggagccgctgagggccgtgatccgcagcaccggaacacaggattcctcccggctgctgtcggtatagaatgtaatgccgatctcatccggcgatgtggaccggccgacccagacccgctccggccagccctccggcagctggagataccagccgtcggcaacatcgtgataggtggacaggacccgggacgcggtaccggaagcgtcatagctgatccagtccacccgctgagaaacggcgtggtctgcgtcctcgccctgcagcgtcaccgtgcggggcacctctgtaacgccgtcgccgttgatgtccatgggatacacggaacagaaccgggacacctctccggaaacgccggtaatggcggaaagcaccagatttgtcagttctccgccccggagagccagtacgtccgtaatggcccgcgcaccgtccgccacgccggtgatgaacagggcggggtcgctggaccgcagcgtgcccacggtgacctttccctgctggctcagctccgccatggtcatggacaccagaacactggaccgcagcgtcagcgcgccgtttttcgacacatagcagtccgcaacgccctcaccgtcctgattggcccggagcaccgtcagctcccgtttgccgtctttattcaggtccgccacggcatatttcacataattggtccgcatcagttcccgtgcgccgtccggctccagggagtagaccgccagcgcctgcagatccatgctgacccgccagcccacgatgatctccatacggccgtcgccgtcaatatcgctgtaatccacgctgtaaatcgccagaccgctgccctcaatgaccgccgcctgccggtagctgttgtcatcatccgccgtaaatatatggatcttcaggggcttttccccatcgccctggcggaagaaggccagtgcctcctcccggccgtcgccgtccagatccatcatctgcaccggctggatattgctgccggataccggagcggcgtattccgcgccgctttcctggatagcgctgagctgcttattcagagcggtataccgctccggcagctccggcaaagcgtacagttcctccgggtccaatgtcagcttcggcgcggtacaggccgaaagaggcagcaccgacagcgcgatgcacagtgccagcagtcctgacatgatccgccgctttcttctcacggttccgccccccttcaatacacatatcaatacaaggatacaataccacatcttcctcaaaaatggtagtccctccgcctgatttcaagagattttacaggctgttcacgatttgcgccgcgagtacgtgaacacagccccggagatggaatcatctccggggctgttcatacacctgtcatccgctattcaggagattgccgcggcgcctacggtataatctccccaatgtccctgcgcatcccggctggcggtgcagtcagtgaagaagtaggcccccagcgcagagcgccacttctgggcatcgaaggtcacggtgttctgcaaagcgtccggttcgccgctcttcgtttttaccggacagaagtcggactgcccttgtccggcctccgccggaggcagttggcaagcagcgccgcttttctcttctgtacggggcagcgggtctgcgccggtaatatttttgctgtcctgttccacatggatgctgtcctgcccgttctgctccgtaatggtgaacaagcagccgtccttccagtgggggatcccgtcgacctccggggccgtgtcggagagatacccctccgccgccaattcctcgtagctcatggtcatggtctcggaaatatcgtgcatcccgccgaatacccacgctaccgccgcctgctcgctatcggacaggccggtttgggacaggtccacagaaagcatggtaatgtcgctgttcagtccctcatccacggcccacaggtcattcagcacccggagatacagggcacagcggtcatcaaagccgtcagaccggatattcaccgccgtgacctccgccagctggccgggataggtttccagcacggagccgtaggtgatttccagcagcgttcccggtgtatagaccagatccatggccgctgtggaacggccatccagcgtcggctcgacggttgttggcgagagtgtatagacgtcccccgggccgccgctttctttcgccagcagcaacggcgccgctccggcctgagaccggatgacccgaaacagctcgcccccagcgtctgcgccgggttcttccgttttcccggacacgtccccgcctccggagccttcctccgcccggcaggtattgccggtgctgtctgtccgcccgcaccccgccagcagacacaggcacaaaatcgccgcaaacagtcgcttcatagaaaccgcctcctttttatttctacttctttgtcggcgcaagcggcgattttgttcccggtcctgcaaatttttcctgaaataattatttttctgaaatttgtgcttgacattttgcttccgctgcataaaataagcattagattagaagtctaaatttttgcttacaaaggaggggtagccatgacccagcgggagcggcagcttttgaactggatcgaagagaaccccctgatctcccagcaggagttggcagacaaggcggggatcacccggtcctccgtggcggtgcacatctccaacctgatgaaaaagggctacatcaccggcaagggctatatcgtccacacggccccctacgtcaccgtggtgggcggcgtgaatatggacatcggcggctggcccggcgaggtccccgtcatgcaggactccaaccccggcgtggtgcggatgagcctgggcggcgtgggccggaacatcgcccacaacatggccctgttgggcatggacgtccggatggtgacggtgttcggcgacgatatcaacgcccagaagatcgccgccagctgcggcgaactgggcatcgacatctcccagtcccccatcatccccgagggccgcacctccacttatctcttcatcaccgatgaaaagggcgatatggcgctggccgtcagcgatatggaaatctacaagcacctaaccccgcagatgctggcccagcggcaaacgctgctgaacgccagtcaggcggtggtgctggacaccaacctgcccgccgagagcattcaatatttggcggaccactgcaccacgcccctgtttgccgacccggtatccactgccaaagcagtgaagctgaagccggtgttgggcaagcttcacactctgaagcccaaccgtatcgaagcagagctgctctccggcgtgaagatcactgacgatgccagcctccgaaaagcggcagagacgctgctggacaccggccttcaccgggtctttatctctctgggttctgacggcgtgtttgccgccgaccggtccgggcagcaggtgcagcttccccctctgccgggagctatggtgaacaccaccggctgcggcgacgccttcatggcggcgatcacatgggcctatttacagggcacagacctgacggacacggcgaaggcggggctggccgcctccgtcatcgccatggagtccgctgagaccatcaaccccgccatgagcgaggacactttgcggcagcgcgccgccctttccaactgaaaaccaattcaaaattaaactatatggaggaatacaacatgacgctgaacaaatatctggacatcgctcccgaagtgcagaaggccctggaggagggccgccccgtggtggctctggaatccaccatcatctcccacggtatgccctatcctcagaacgtggagactgccctgaacgtggaaaagctcatccgtgaaaacggtgcggtgcccgccaccatcgccgtcatcggcggccgtctgaaggccggtctgtccgaggccgagatcgactatctgggcaagaccggcgcggccgtcaccaaggccagccgccgtgacctgcccattctggtggccgagggccgggacggtgccaccaccgttaccaccaccatgatcatcgctcacatggccggcattcaggtgttcgccaccggcggtatcggcggtgtccaccggggtgctcagcagaccttcgacatctccgccgatctggaggagctggcccacacccccgtcatggtggtctgcgccggcgccaagtccattctggacctgggcctgacgttggaatatctggagacccacggcgtgcccgtcatcggctacggcaccgaggagctgcctgccttctacacccggaagtccggcttcaaggtggactaccgcatcgacactcccgccgagctggccaaggccttctatgtgaagcaggacatgggtctgggcggcggtatgctggtgaccaatcccatccccgaggaatactccatggatcacgaggtcatcaacaaggccatcgacgaggccgtggccgaggccaaccggctgggcatccacggcaaggagaccactcccttcctgctggccaagatcaaggatatcaccggcggcgattctctggcttccaacatccagctggtgtacaacaacgcccgactggctgccaagaccgcctgcgagctggtggcacttgccaagaactgaaaactctgctaaaatggactggtcgggaatttcccggccagtccttttttcgactgcaagcgcaaagcagggagtaagcctcccaaatcatagaaaagcaggtaatgaacgatgatgacgcgtcttgccaagaccgtggtggaacccacggcgaaaaacggttttatttttacgcttctcggtaccaaatggggattcctttggctgtggctcctgatcatcaatgctgcggcgtttctggcctacggattggacaagcttctggctaagctgaaggcccgccacgagaaggtcccccgcctgccggagcgaaatctcctgctgctggctatcgtaggcggcggtatcggcgcatggctgggcatggaggtttttcgccacaagacccagcatcgctccttccgggtcattgtacctctgttcacctgcctctggctggtcatcgtcaccggcgcgtatctctatttcaacgtgttccgctgatccgcttttcatctgacaaaaccccacccttgacggacagtccgccggaggtggggttcgatcatatagaaacttttttacagggccgacacagcctcatttacggcatcctcgcaggagcgcatggccaaaatggtcttttccatcagctcctcaataggccagcccagccgctccgcaccggtattgatgacatcccgggaacagccggcggcaaacttcttgtccttgtactttttcttcagggagctgacttccatatcctgcacggacttgctgggccgcatccgggccgcggctccaatgaggcccgtcagttcgtcggcggcaaagaggaccttttccatttcctccacaggctccacatcgcagcagatgccatagccgtgggaacagaccgcgtggatcaggtcctcagagcaaccgatctcctgcaaaagctccgggaccttgacgcagtgctgctccggccacttttcaaagtccacatcgtggaggaggcccacggtggcccagaaatcggcatcttcaccatagccaagctcgttggcataccagcgcatgacgccctctaccgtcagggcgtgctgaatgtggaacggctcgctgttgtactttttcagcagagccagggcttcttctcttgcaggacaggctttcatagggatcgctcctttgttttgcttatttcagtgtctccggctccgggtcggagggcagcgtcagaaaatagtcgtaatagggcagcagaaatgcgtagccggttttgatccggtccaccacatcccggctgaacaactcctccgtcagtttctcctcgtgggtgatgctgatggttttcatctggaaccacggcgccagcagctccgacggcgcacctgccttggggcgcttgtaggtatcgccgcccagagtaaattccgtctggccacgcagcgccttcgtcagcttttccataggcttcgggtccctgatgatccgcgagcgcagcttggccatgtccatgggccgggccatccaacagcccatgccgtagccccagtaatccggccccaactcaaaccagaaggtaggccgggtggtccagtcctcggcggggcgttccacgcagaaccacaggtggtccttgtaaggcccccggccgtggagccgccgggcgtcccggtagatccgggagacacggcacaccatggggtcattctgccgctgttcggacagaaattcatagatctccgctcccaagtccttcatggggcggtaaagctcgcttaaataagtctccttgtgggcttcaaaccaggggcgctcgttattgaagcgaatgccccacaggaagtccacagtggcatcggtaaatccggtaaacatcgtttccctcacaatcgtttttccgtgttattatagcacagtcataatcggtatttcaagagatgatccttataaatcctattgtttgagtaggtatatgttgttggaaatggcaaaagctccggtctttcgaccggagcttttaaaatgcggattattcagcggcgtagacggaagcctgcttccgatccttgcccagacgctcaaagcgcagggtgccgtccaccttggcaaacagggtatcgtcagtgccgatgcccacgttggtgccgggatggatcttggtgccgcgctgacgcaccagaatgttgccggccttgacgaactggccgtccgcgcgcttggcgcccagacgcttggagttggagtcacgaccgttcttggtggagccgccgcccttcttgtgggcgaagaactgcaaaccgatcatcatcataataaaggaccatcctttctgtagatttcagggagaattattcatcctccagaacttcgatatgttcgggatattcgtcgtggagctgagcaaagtagaccatcatgcccgtcagaagtgcctgacaggtgctctccgctgtctggccgaggcttcccggcagacggagggagatcgatgcgtcactttcccgcaccttcacggatgccgccagacccagcacatcgttcaccgtggtctccacgagacgaacggcgctggtgatcgccgcgcagacaatgtccgcaccggcctcagcgtaaccgctgtgaccctgtacgtcaaagcctgtgatccgactgccctgactgcggaaggtgatcgtcgtcatgctcagacagagatcttgccgatctcaaccttggtgtaaggctgacgatggccctgacgtttccggtaacccttcttgggattgtacttgaagatgcggatcttcttgcccttgccgttcttcacgatcttggcctccacggaagcaccctccacaacgggagcgccgaacgtagccttctcaccatcgatgatagccaggacctgctcgaactttacggtatcgccagcctcgttgtccagcttctcgatgtagatcacatcaccctcggacaccttgtactgcttgccaccagtcacgataattgcgttcattcttttcaactccttcatttacgggctcgctgtcgggggcgatttccgaagaaatacttataacccattcaaagcggctctattattatatctgtgcacagtcaatttgtcaacggtttttcctaagaaaaacaagcaacttcatttgcaaaagtaaatgcaaccccaccattgcatttagtcttacaaatctcagtgttgcatttactcgtacaaacgcaggtgtaggtttcatcacacactgaaaaataagaactccagaatctaaatttggttctggagttctcgtttttatccgaacagctcgtccaatttttcttggagcgtcccttcctttgcgtagggcagggcatcaagctgccggaaattatgcttgatgtcctacataccctcattaaagccgaagatataggataacgcaatatgatagatgatttctgttggagccaatccatagacctgtttctcaaaaatatggcgaaggcgttctttcgggtcagggaactgttccttcattcgctcactctgatacaggcgcttgacgatttctgtgatgtatatgccggatttcatgtagaggtcgataaaagtcttgtccgggtcatcgaaacagccggggttctcagtttcaagcatatccaccatcttcttgaccattgtcttcggggtgaagatttggttggtcttctgcggcgggatataatcgaagatgtcctcgatactcttttcatcgaaataatccgccaactttttcttgagccgaaggaattccttcacagagtcatcgaatacgaccgggtcaaagagattgcccgcaaactccttttcttcccctgtctcagcgtccttgtacttaccgccgtcacgaaggaaacggaactggtcgagggtaatgcttgtcacctcaaggaactcaggattcgggataacgacatcgaaggttgccagcgtaacggtatcattgccataggccatcaggaatgacggtatcgtgcgggagaagcccctcaagtggtccctgacggaatcttctatacccgtcttttcccgttccttgattttcttcttaaccgtctcaacaacatcctgcgtagatgtttcaataaaagtctttacggtattggaaagctggtcctgcaaattggcttgcaagtcctgctttttctgttcaaattcttcttcgatttccgtctcagtttttccagtctcatggcgagagcgcatcgccgccaaacggtctttctccgcaattttctgctcgatttgatagttgttatgtctttatgagcaatgcggatgaattgatggtcagtgaaaagactgcctataactatttaaacgctggcctttttgacgctgataagatggactgtccacgcatcatcaggatgcgtccgaggcggagcactccaaagctgaaaatcgacagacactgctatgaaggccgcacttacgaagattttatgcgcttcattgcggataacccggatgttcctgtcgttcagatggactctgtcattggaaacaagagtgggaaagtccttttgactatgttttcccagaacaccaatctgcttcttgctttcctgcgtgaccacaataccgcccgttctgttttggatgtattcaacgacctctatgccatgtttggacgggaaacctattgtagactctttcctgtcattttgactgaccgtggcagtgagttcagcaatccggtccccatcgaacaggatgaaaacgatgagcttcgcagtcttgttttctattgcaatcccggcgccccttatcaaaaaggcggcatcgaagtagcccacgaactggttcggcgtgttttgccgaaaggcaaatcttttgatgaccttcagcaggaggatattgacctgatgctttctcatatcaactcgtataaaagaggaaagctgaacagtcggtctgcataccaactgttcaacttcatctacggggatgatattttgccgaagctcaatatccgcgaaatcgaggcaaacgacattgttctgtctccgaagctgctgaagaagtaaccctcagcatttcagatgtcaaacagagaactttcaggggtgcgatttacctttacaaaaaagtaagcggcaatcggacctctgggagttttttgcctttttcccgatttcttgccttatgctattgattttaacacattctacgccattgaaaagagaatttccccatatttgtaagagtgaatcgaagtttttgaactttgctgttgcatttacttcttacaaacttgcatttacttttgcaagtgagcaaaaacaagcaaatttctcgatgaaattcacttgccggaggtattccccccagttttcgggccagaggtgaatatgccggccgaaaactacaccctgaccgttagccgtccgacaccctttccgctgaaaacggacaccctttccgctggtcctacaccgaggccgtggtgcatgcaccaccacgtcggtccacggacaccgcccaaatggtgcacagcggccgggcacatggtgcacccggccgccggggaaattactctgtcatacccatgcgcttgcgcattgactcgccctcgatctgaaccgtgtacgcgttgtagatgaaccggtcgcaaatcgcgtccgccagagttggatcatacagattttcatgccactcactggtgtcatactgggagcagaagatggtggacgccaccttgttccgagcttccaccagctccagtacatcccgggcttctgcctccttcagcgggtacagcagccactcgtccagaatgagcagcttcacctttttcagctgcttcatatattcccgataggtcccatccctccgggctacagcgatctctaccagaagatccggcagccggagataccgagcggcgtagaagttccggttggccgccacacccagggaacaggccaggaatgtctttccagcaccagtagcgcccaggatgatcacatttcgtgcctcctgaatgtacgaacaggatgccaagcggaggatctgctcccggtccagatgccgttcggcaatatactcgatattctccacgctggcctgtgtatctgcatagccggccttcttgatcaggccagtgagccggttgcttttccgcgcactccattcggcatccaccagcatggcgagccgatcctcgaagggtacattccggaactgcgggtcttccagctgggcagaaagctgctctgccatgacgcccatgtggatctctctgagcttatgaatcgtttcgttactgaacattatttcttcccccttctgtagtactcagcaccacgggtaaacctgtgggccttctgaggcacaggttctggatccacatcttccgtctgaagcagatcctgctcagacttcagaatagcctgtacacttttcaagctaggagaaggggtgaaggtcagagcttttcgacgggcgtcctccaagcggaccacagaatagtggtcagacagctttaggagggccatgcaggatttgtaaccctgctgctctaccttgtgagcagtaaggaatactcgcacaacagcggcagtattttcgccaatagaggacgcccagcgaaggaaccgttcactgttccattggaggtaagcggtgtgctccggaggcatatgctccttaagcgtactgtactgattggggcggccatacagccgaaggtgggaggccactctggtaccgcagaaatagatttctacagcggagccggtgagtcgtacatccactttctgtttgatgtattcgtatgggaccgaatagttcatgcgatccactgaaatgtggtagttatattgcaccgtggccgttttccattctgccagttcaaacggatttggcggtagcggcagaaggaacagcttttcttcctcaaagtcagaggctctgctgccatctttcttctgaaacggcttgtgattgaagtcagccagcttttcccagattgcacgattcagttcatccaaggagagaaactgacggttccgcaacgcagcaaggatccaggtggagacaacgccaacggagccctccacgaacgctttgtccttcggtgtccgtggacgggtggggataattgcggtgccgtaatgctccgccatttcctggtaggctttgttcaggacggtctccgtgcgggtattcttgatgacgccggtcttgagattgtccggggtcaggattcgggtgactccaccgaaatagttgtaggcatgaacatgagctgtgatccatgcttcctgcttcatgttgaggaacgcttccgtataggcgtagccgctgtacggaagcactgctacaaagagataggcgggcaggcgctcgccggtgtccgtgtccgtaatcccagcggtctgaccggcccagtccacctggaggttctcactgggcttgtgctccaggtgcatggtcgctttcgttttgtgaacatagtcggcgtagtacttgttgaactgcgtggacttgtaggggagctcaccgttttggcggcaccgttcgcaatactccacccacagcaggctgagcgtgacgccgctcttctgcatttccttgtggacccactcgtagtccggcatactgtaccgctgccccatagatgtggcagggtacagcttacgggtcacttcctcagagctaaggttcttcaccgcattccacgagaggccgttttcttcagccttgtgcaatgccgtgatgacggtgctccgggcgcagccacagctctcggcgatgcgcgttttgttgagacccagactatgaagtctgatgatctctttgtagttggtcatcgtgttttcctcctgttgttagattacatctttcgatgcaattccattatacagagggtgtctgaccggcggcgagagtgtatgatttcagcggtcaagctgtctgacctgtgcggtcaaagtgtccgtcggagggcggcgtattcacagaggcaaatttgcagtt

SEQ ID NO: 12199 - DNA, 13374 bp, Unknown
  gut microbiota DNA sequence
cgaaatcggaagaaatttcggaagaactctaaaataatccttgcaatttgacagattctatggtattctatcatggcttacaaagggcggtcctctgtcgtgcgccggctaaaagtgtgccaatgcgcataaaaagcggcatgaacgcctattaacaggaggaaaaaatccatggatctcatcaaggaactgaacaaagaagccctgcagaaggaaaccgccaacgttcaggtgggcgacactgttcgcgtacacgtgaaggttaaggaaggctctcgcgagcgtatccaggtgtttgagggcaccgtcattgccaagaagcatggcggcattgaggaaaccgtcaccgtccgccgtgtttcttacggcatcggcgttgagaaggtgttccccgtccattctccttccatcgaccactttgaggtcgtccgcaacggtaaggtccgtcgcgccaagctgtactatctgcgtggccgcgtgggcaagggcgccaaggtcaaggagaagctgtaatcagctttcagttgagcagaaaaagagaggcgaaagcctctctttttttgttataaaaatctgacgcagaccttgtgacgccgggctttttttgatatactattccaataatgcgtaattggccttatggtctgaaaggaagagtttgatgcaggaacaggaaaagcagacggcgaagggccgggacctgtatgaatgggtgcagtcgctggtaggctccgttttggtggtggtggcgatttttacctttgtgatccgcatgatgggagtggacggccactccatgctcaatacgttgcagcacggggatcgtctgctggtggttaactccatgctgtaccatgactacaagtacggcgacatcgtgatcctgcggaaaaacggcgtgtttgacgatgaccccatcgtcaagcgggtgatcgccgtggagggtcagacggtggacatcgactttgccgagggcatcgtctatgtggacggtgaggcactggaggaggattacatccgggagccgacctacaccgccgagggcaccgaatttcccctgacggtgccggaggggtccattttcgtcatgggcgacaaccgcaacggctccagcgacagccgggactaccggctgggtacggtggatacccggtatgtcatcggcaaggcggcctttttgattttccccggtccggactatgagacggagaagcgggactttaaacggatcggagtgatttggtcatgaacattcaatggtatcccggccacatgacaaagacccggcggatgatcgccgagcagatcaagaatgtggacgcggtatgcgaaatcttagacgcccgcattccggtttccagccggaacccggacgtggacgagctgacggcggggaagccccgtatggtggtgctgaaccgcgtggatcaggcggacccggaggggacgaagcgctgggtggagcatttccgggccaaaggctacgccgtgctggaatccgacgccaaaagcggcgtgggcacggcgaaattcgccggggccgtccgggaactgctggcggacaagctccgcgcctacgcggaaaaggggatgaccggccgggtagtgcgggtcatgatcctgggtattcccaatgtgggcaagtccaccttcatcaataaagtggcaggccgcaagaccgccaagacggaggaccgtcccggcgttacccgctccaagcagtgggtgcctatcgaccggaatttagaattgctggatacaccgggcatcctctggccgaagtttgacgatcagagcgtgggcatgaatctggcctacaccggcgccgtgaaggacgatattttagacgtggagactttgggctgtcacctgatggcgtatctgggggagtactatcccgacgccctgaaagcagcctataagctgtccgctctgccggaacgggaagcggaggaaaatgacatagcctacggctaccgcctgctggaagcggcagggaagaagcggggctttctgatctccggcggtgaggtggacacggagcgcatggcaaagatcctgctggacgagttccgctccggcaagctgggacgctttacactggaggtgccggaatgacggaagagcagcggcgggacagaatgttgggaagatgtatcctgatcggttttttctggttggggctgcatctttatgtggcgtatcgaaattttagagacagcctgtatgtgacttttaacggctggacgttcttttggattgcagtgtatacgttcacgctgcttgctttggatgtgcagctgtattttttaaatagctccaatgcggcaaaaaactgggtgaggtactggatattctgcacggtggtttgcctactgacacttctttgctcctattttaaggtgcagattggtctgtgggcagtgttcccaatggcagccacaccattggtacactggattccgctgtgggatgtgatgttttcccggaacagcattttgggtaatggttgcacactgttgctatgcactgcacacctgatctattttctatggctgatgcaccggagaaataaggaggaaatccatggggatgtggacttatgagcgggaacaatggaagaacggcgttcagactgtctgcggcgtggacgaggccggggccggccccctgatggggccggtgtacgcggcggcggtgatcctgccgagagaattggacatccccggcctgaatgactccaaaaagctgacggagaaaaagcgggaagccctgtacgaagtcatcaccactcaggcggtttcctggagcgtgacacgtgtggaggcgtgggagatcgacgagatggacattctcaacgcccggatgctggccatgcagcgggccattgacggcttatccgtccgaccggatacggctttcatcgacggcaaccgagaccacggcagccggtacgccattcagatcccccaccagctgatcgtgggaggcgacggcaaaagcgcctccatcgcggcggcgtccattctggcgaaggtcagccgggaccggtatgtgtcgagagagctggacgcaaaatatccccagtaccagttcgctaagcataagggatacggtacgaagctgcactatgaactgctggaccagtacggcccctgcccggagcaccggcgcagctttttgaaaaagtgggaggccaaacgccatgggtaagacccagagcgccgggaaccggggcgaggcggcggtggcccgctatctgcggcagaagggctacacgctgctggaaagtcagtggcgctgccggtttggtgaattggacttggtggcaaaggacaagcgggggatcctctgcattgtggaggtcaagctccgggggagcagctccatcgccctgccccgtgagtttgtggacggccgcaagcagcagcggctccgcagtgccgcagaactgtatctggcggcgaatgaactggacgtaccggtccggttcgacgtagccgaggtttatgacgaggacggcagccttcgcatttcctatatcgaaaacgcatttatttagcctcataaaggaggagaccgatatgaagtattacagcacgcgggataagaacgtgtccctttccgcggcggaagccgtgaaaatgggcctgagccgggacggcggtctgctgaccccaacgcggatcccccagatcgaccgggcctttttggagcggctgatacccatggagtacgcccagcgggcggcgaaggtcatggcgctgtacctgacggattattccgaggatgagctgctggcctttggccggaacgcctacggtccggcgcagtttgacgatcccattgccgcgccggtgcggaaggtggaggacggcctatattgcctggagctgtggcacggtcccacctccgcgttcaaggacatggcgctgcagatgctgcctcagcttttgtccgccgcactgcggaaaaccggcgaaaagcggacggcctgtattttagcggccacctccggcgataccggcaaggcggccatggccggctttgcggatgtgccccagacgtgtattcaggtctactaccccaaggacggcgtctctcccgtgcaggagcggcagatggtgacccaggagggggagaacgtggacgtccgggcggtcatcggcaactttgatgacgcccaagccggcgttaagcgtatcttctccgatgaagctgtccgggcggagctggacaagcgggggtatttcctgtcctctgccaactccatcaactggggccgtatcctgccccaagtggtctactacatctccgcctactgcgatctggtgcgggacggcgctctcaccatgggggacaaggtgaacttctgcgtccccaccggcaacttcggtgacattctggcagcacactacgcaaagcgcatgggcctgccggttaacaagctgatctgcgcctccaacagcaacaacgtgctgacggacttcctccgcaccggcatctatgaccggaaccggcccttccgcaccaccatcagtccttcgatggacattctgatctccagtaatctggaacggctgctgtttgacctctccggggagagcgatgccgagatccgggcgtatatggacgcgctgggcagcgcgggccgctatcaggtgtccgacaacatcaaagcaaagctggacgatgccttctggggcggctgctgctcggaggaaggaaccgaggagaccatccgccggtattggcaggactatgcttatctgatcgatccccataccgccgtggcggcggaggtgctggcgcagtaccgcgtcgcttccggggacgagacccctgccgtggtggtctccactgccagtccttacaaattctgcggacctgtactcgccgccatcggggggacgccctgcggcgatggactggagctgctggatcagcttcacgccgtcagcggtgtcccggtgccccgccgtctggcggagctgaagggaaagccccgccgctttgacaaaacggtggagaagcaggccatggagcaggcggtgctggacttcctgaaataagtcatctgaaaaacaacatcggaaaggaggtgccgccgaatggcgctttacgccataggcgatctgcatttatccttaaacagcaacaagtccatggaggtgttcggccccgcgtgggagaactatacagagcggatccgggcgtccctgagccaactgacggcggaggatgtgctggtgctggcgggagacacctcctggggaatgagccttgaggaatccgtggaggatttccggtttctggagcagtttccctgcaaaaaatatctcatcaagggcaatcacgattactggtgggccaccgccgctaagttccgcaccttttgtgaggccaatggcttcaccaccctggaactgctgcacaacaactgctttttctacggcggtcacgccgtctgcggcacacggggctggtttttggaggaggagcagaagccccacaatgccaaggtgctgaaccgggaattgctgcggctggagacttcgctgaaggcggcgggggagaagcccatcttctgcttcctccactatccacccctgtatcagggctaccagtgcccggagatcctgtccctgctggagacgtacaaggtggagctttgctgctacggccatctccatgggccggtgatccgccggagacaggagggaaaatacggaaatacggaattttctctgatctccggcgactatctggggtttgtaccgaaaaaaatttgcgaaaagtagaaaaaagactggaaatcttgaaatatttctggtaaaatacaaatttgcatgggctgttgcctatgaggatgggttttaccgcccatgatgaacggaggagtaaacaattatgactgtcaagagctgtgaaaaagttgaaaagagccaggtggcgctgaccatcgaggtcaacgccgctgagtttgaggctgccgtcgaaaaggcatatcagaagatgcgccggaagatcagtgttcctggcttccgtcccggaaaggccccccgcaagatgatcgagcggatgtatggcgcagaggtgtttttcgaggaagccatcaatatcgcattccccgaggcctatgaggccgctgctgagcaggagaagctgcagatcgttggctatcccaccgtcgagatggtgggcgaagtcaccaaggacggcttcaccttcaaggctaccacccctgtgtatcccgaggtcactctgggcgagtacaagggtctgaaggctgagaagcccgaggtcaaggttctggccgctgacgtggacgagcgcctcaaggccctggctgaccgcaacacccgtctggtgagcgtggaccgcgcggccaagagcggcgataccgccgtcatcgatttcgaaggcttcctggatggcaagcctttcgatggcggcaagggcgagaaccacaatctggagctgggctccggcagctttgtgcccggctttgaggatcaggtcatcggcatgaaggccggcgaggagaaggacatcgacatcaccttccccgagaactatcacgctgacctggccggcaaggctgtggtcttcaaggtgaaggtccacgaggtcaaggagaaggaagtccccgctatggacgatgagttcgccaaggacgtctccgagttcgacactctgaaggacctgaaggccgacctgaagaagaagatcaccgaggagcgtcagaaggacgctgaccgcgtgttcgaggagaacctgatgaaccaggtggccgagaacatcaccgccgacatccccgatgtgatggtggagaaccaggcccatcagtatctggacaacttcaaggcccagatcagccgtcagttcccctatgaggaatacaagaagatgaccggcatggacgatgccaagctgctggaggaggccaaggagcccgctctgcgtcaggtgaagatggatctggctaccgccgccatcatcaaggctgagaacatcgaggccagcgatgaggacgtggaagccgagttcgcaaagatggctgagcagttcggcatggatgtggagatggtcaagaagtatctctccaaggagcaggtccacgatcagatcttgacccagaaggctgtggccgtggtggtggacagcgctaccgccgagaagcctgccaagaagaccgctaagaaggctgagactgccgagggtgaggagaagaagcctgccaagaagaccaccaagaaggctgagaccgccgagggcgaggagaagcccaagaaggctcccgctaagaaggctgccaagaaggaagaaaaggaagccgaataaaggcgaaactttttcgcggcgatcacggtacattttacagattcgacacattctctcatggtacccgtggtatcatgagagaatggtttatcaggcacgatttgcgctgtaaatgtgccgcgttacaaaaggaggtcaacttatgagcttagtcccttatgttgtagagcagaccaaccgcggcgagcggtcctacgacattttctcccgtctgctgaatgaccggatcatttttctgggcgaggaggtcaacgccaccaccgccagcctggtagtggcccagatgctgtatctggaggcccaggatccggataaggacattcagctttatatcaacagtcccggcggctccgtgacggacggcatggccatctacgataccatgcagtacgtcaagtgcgacgtgtctaccatctgcgtgggcatggctgcgtccatgggagctttcctgctgtcctccggcgccaagggtaagcggattgcgctgcccaacgccgaaattatgatccaccagccctccgcgggtacgcagggcaaggtcacggacatggagatcgacgtggagcacttcctgcggatcaagaagaacctgaatgagatcctggcgtccaacaccggtaagaccgccgaagaggtcaaggcggcctccgagcgggaccactggatgacggctgacgaggccaaggacttcggtctggtggataagatcatcactgctaagaagtaaaagaggtaataccatgagtgacgaaggcaaaaaggccctgcgctgttccttctgcggaaagcgggaacagcaggtccatcgtatgatccagggccccggcgtccgcatctgcgacgagtgcgtgcagctttgcatgagcattctgaacgaggggttcgacggcccggagaccactcccttggaggacgtccccgatcagctgcccacccccaaggagatccgggcggtgctggatgaatatgtcatcggacaggaggccgccaaggtagcgctgtccgtggcggtctacaatcactataagcggatctatttcggcggcggcgacgatgtggagcttcaaaagagcaacattctgatgctgggccccaccggctccggcaaaacgctgttcgctcagactttggcccgtattctgaaggtgcccttcgccattgccgacgccacgaccctgaccgaggccggctacgtgggcgacgatgtggagaacatcctgctgcggcttttgcaggcggcggatttcgacgtggagcgggccgagcggggcatcatctatgtggatgagatcgacaaaattgctcgcaaaagcgaaaacacctccattacccgggacgtttccggcgaaggcgtgcagcaggcgctgctgaagatcgtggaggggactgtggccaacgtgccgccccagggcggccggaagcacccccatcaggagttcatccaggtgaacaccaagaacattctgttcatctgcggcggcgcctttgacggtctggaaaagatcatcgaaaagcggctggacgagaaggccatcggctttggtgccaatgtccagagcaagaaggaaaagaatgtcagccagcttttggctcaggtgcagccccacgatattctgaaattcggcatcatcccggagctggtgggccgcctgccggtgatcgcgccgctgaacgccctgcagcgggaggatctggtgcgaattttgcaggagccgaagaacgcactggtgaagcagtacaagaagctgctggaatatgatgatgtggatctggaattcacggaggatgccctgaacgccatcgccgacaaggccattgagcggaacatcggcgcccgtggcctccgggcggtcatggaaggcctactgaccaaggtcatgtatgagatcccctccgacgagactgttgtgaaagcggtggtcacaaaggaatgtgtggaaggcacggcggagccggaactgacccacgatcccaacaagattaactattccgtgaagctgaaccccggcagaagtgagagccggagcgagtccggtacgccgaagtcggcgtcctgacggcccttttgggtataacacgggggaggggcagtgcctctccccctctttgaactctccagagaggagcaatttatggaagcgaacaccttgaatcttcccgttctggccctccggggcctgacggttttccctcatacgaacctgacatttgacgtggagcgccgtatttccatcaaggccctggaagtggccatggaatccggtcaggagatctttctggtgacccagagagaactgaacacggatcgtccgggggagaaggacctttacaccatgggcaccatttcccgggtgacccagatcctgcggctgggaaaaacctccctgcgggtgatggtggagggcggacgccgggcacggctgcgccgcctgtggcagacggagccttatttgcagggccacgtggaggtggtggaggaatccgctgccgtgagccacggtccgaaaaccgaggccctgctgcggcagacctggggcctgttccaggattatgcacatctggcaggcaatgtggccgaggaggtcactgcggcggtgctggactgccaggagccggggtatctggcggattttatcgcccagaatacggctctgcggtatgacgataagcaggcaattctggaagaactgtctccgctggtgcggttgcggaagctgaacggcttcttagcccgggagcgggatgtgctgggctatgagcgccagatggaaggcaaggtccgggacgagctggctcagcagcagaaggaacagatcctgcggacccagatccgggtcctgcaaaacgagctgggcgaggaggaggacaacgagatcgaagaataccgtcaaaagctggcggaactgaaattagaggacgagacccgggagcatctggaaaaggagatcaacaagctggcaaagcagccctatgtcagcgcggaggcttcggtgatccggaactatctggacgtgtgtctggaactaccctggggtacatatacgaaggagcgtctgaatgtggacgcggcccggaaggtgctggaccgggatcacttcggtctggaaaaggtgaaggagcggatcctggagaccatcgccgtccggcagatgaatccggaggggaaggggcagatcatctgtctggcaggccctccgggtgtgggtaagacctccatcgccctgtctgttgctaaggcactgaaccggaagctcagccgcatttctctgggcggtgtccgggacgaggccgacatccgcggccaccggaaaacgtatatcggcgccatgccgggccgcatcgtggaggccatcagccgcagcggcgctatgaacccgctgctggtgctggacgagatcgataagctcagtggcgattaccggggcgatcctgcctctgcgctgctggaagcgctggacagcgagcagaaccacgccttccgggatcacttcctggaaattccgctggacctctctcaggtgatgttcattaccacggccaactcgctggatacgattccccggcccctgctggatcggatggaagtcattcagctttccagctataccgatgaggaaaagctgcaaatcgccaagaatcacctgctgcccaagcaaatgaaggaacacggcctgaagaagggcagcctgcggatcgacgaggagaccctgcgggccatcattcgtgactacacccgggaatccggcgtccgccagctggagcggcggctggctgccgtctgccgaaagacggatatgcagctactgtcaaaaattgtaaagcgtgttaccgttacagaaaaggacctgccgaagctgctggatatgcagccctacccgcctacggtccatgtggagcaggaggagatcggcgtggtgaacggccttgcgtggacggaggccggtggcgagattttagaggtcgaggtcaacgtgatggaaggttccggcaagttggagctgaccggtaatctgggcgacgtgatgaaggaatccgcccaggctgctctgtcctgcctgcggagccgggcggaagccttggggatcgatccggacttttataagaccaaggacatccacgtccatttcccggagggcgcggtgcccaaggatggtccctccgccggtattgccatggctacagcgctgctgtcggctctgaccaaccgcaagatcaaggcgggaatcgccatgaccggcgaggtcacgctgcgaggccgggtgctgcccatcggcggcctgaaggaaaagaccatggccgccaagcggtacggcatccacacggtactgatccccaaggacaacgccagagatctggaagagatcgaccagaccgtccgggcggcgctgcggttcataccggtggagacggtagatcaggtgtttgccgaggtgttctgcccctccagagtggagacaaaagccgacgcgatccccgcatttttgccggtggaaaacagtaaagaagtagccttacggcagtaaagggagggacgtatgcctctgaatttcaacaaagcggagtttgtgcgctccgccggagagcccaaggacttcctgcgggacggtttgccccagtttgccttcgcgggccgctccaacgtgggaaaatcctcggtgatcaaccgtttggtaggccgaaagaatctggcctatgtgggcgcctcgccgggaaaaaccacccacatcaactatttcctcatcgaccagaaggcgtatctggtggacctgccgggatacggctatgccaaggtgtcccgctcggaaaaagagcgctgggcccggctgatggagacctatttccagcgggaggcggacgccatcactaccggtgttctgatcgtggacatccgtcataagcccacggccaacgatctggtcatgcacgactggttccgccaaaccggttgcccggagatcgtggtggccaacaagctggataagctgaaaaagagtcaggtggaaccggcgctggagctgatccgggagacgctggaactgacggagcgggacattctgatccccttttccgcggaaaagggcagcggaaaggacgaattgctccgcttgctggtagatgcctgccgcggataaaacaaaaagcatggacggaatccattaaggggaaccgtccatgcttttttgctgagatcgccggcaaattgatgagcaagtgcatttcgactcgttatatgatcaaggaagcgttccgggagaaccggaacgcttcctttctgagagagggataatagggaaggataatagggaatgtaggaggaatggagggttagccctcggccagcttcttgtacttggcgtagcgggcctttacgtcttcaacttccttggcatacagggcgtcggccttgtcggggaagttgtttttcagggaggcgaagcggttctcgcccatgaggaagtccatcaccttggaggtatccggctccttggagtccagctggaaggggttcttgccctcggcgatccggcggggatcatagcggtacagatgccagtagccacactccacagccttcttcatctcgtcctgagaggtgcccataccggccttgatgtgctgctccaggcaggggcagtagcagatcacgatggaggggccgtcataggactcagcctcacgcagagccttcagagtctgggcctggtcagcgcccatggccacctgggcgacgtacacatagccatactgcatcagcatggcacccagatccttcttggctacccgcttgccgccggcggcgaacttggcggtagcggaggtgggggtggacttggaggactgaccgccggtgttggaatacacctcggtatccagcaccatcaggttcacgtcacggttctgggccatcacatgatcgatgccgccgtagccgatatcgtaggcccagccgtcaccgcccacagcccacacggacttcttagccagatattccttgttctccaggatgtacttcacgtcctcggtctgctc

SEQ ID NO: 12200 - DNA, 7592 bp, Unknown
  gut microbiota DNA sequence
acagcgactatggtgactacgatctggacgagctgagctttgtggcggatcggaccttctccggcagcattacgctgagcttcaccctttacggcggaaaaaacagcaaatgcgatcagtcgaccaccggtacactggtcatcaccaccggtacatctgcggtaacatcccgatatgtgggcaacatccgctacaataccacgcccaacaccgccctgcagatcaacgccaatgacattgcccgccttttccgtaagtacacctccggcgggtccttgcagtatctgacgctgaccagtgtacccgctaccggcagtctatactacaactattacaatgccagcaagtacggcgcgacgcggacgcagctcaccgcttctatggcgggcagtatgattttctcctacagtcccgcctctgcatcggaatatgacctctccgagctgacctacatccccagcggcagcaattactgcacagccctcacctttaccggatacagcagcagcggaacggctgtttctgcaaccattctgatcagcgtgacggcttctccggtgtctgaggtttacagcgtgaccaccaagggtacctccgtgaacttcccggcaaactctgtgtattccgcggtggcatccgccactggcttcggccttagcagcatccagctgctggagctgcctgcctccactgccggtgttctgtacgttggctcctatgcggcggataccaccagcgcttacagctacggcagcgacactgattccatgagccagctgcgcttcattcccaacagtgggttcaccggttctgtctccattccctatgtggcattgagcagcagcggcaccgctttgggggccggtgtggtctccatcggcgtggtggacagcgtgaagaagtttacggatatctccacctccacctggtgctataagtatgttacggaacttgccggcgccaatgttatctccggctacagcaacggaacgtttcaagagaagaataccattacttacggcgcggccctgaagctcatcatgctggcggcgggctacggcgagcaggcccccacggtgaagggcagccccttcagcggctatctggcgaaggccaaggctgccggactggtgtccggcaatcccaagctgaacgggcctatcacccgtctgcagatcgcgcagatcgccgccaaggcgttgaagctttctaccaccggcctgcccagcaagaagccctttaccgacaccaatgacgtctatgtgcaggcgctgaatgccgccggtatcattgaggggtacttctccaacggcaccagcacctataagcccaacaacaccctgacccgcggtcaggtctctgccatcgtgtggagaatgaaaaattccgtacagtaaaaatagaatacttgtggaaccacgcggtcagcctctcggctgaccgcgtggttttttaggtcgatagaacgcatgactgcaagtggcgggggagccgtgattctgaatttcctgtgcctcctttgccgccttgaagccggagatctgtgggtcccgcctgaatttccgcatggtattgatataataagcatatacagatgtgcttgcttatggcattgaggtttcctttgaaagcctgctccaatgtatccatgtgcggcgttcggcttcggccatggccggaaccagtggaggtcttgtattttgcgtgtgttggcatggcagcggatcaaagatcgagaggtgaatgggatgaaacgcagaatcttgacggtatgcttgctgctggctctgctgctgaccgcctgcggagggaaaaacagggagccggagaatccgccggctgcgaagccgtcgacaccgggggaggaggtagcggaacctcccgatgaaacaccggaacctgaacctgcaaagctggaggaaaaagagccgctgagtctggaagatgtgctgacagacatctacaccgtggcgcccggcacggcgggcagctctctgcgggccgcctatgccgccggagagctgctggactggatcgatgtgaactcggaggagcaggaggacgtattcaggtggatagatgaaaacgtgcccatggaaaacgctgtggagctggcccgggcatgggcggcggtgctgacggaggcggaggccctcatgcggggcgatgagacggcctatgacgcactggatgacgcgggctataccatggaacagccatatcgcagcacgggccgggtgaagtgggcggcgtggaagctgctccccctgtttacgcagattttagaccgtacggaacgcacggagcaccgctatgaagcgccgggggattacagcgctgtgacggaggaagcccttgcgggtatctgggtgaacgatgcgggtaccactgttctgttgttttccgaggacggctgccgcatcgtgtatccggcactggagttgcttggcaaaaccgcctatgccttccgcgtccgggaccgcagcagcgtgggatactgtccggcgttggacatcgactatctgcaaaatgacttttccgctccgcttgtttactacgtgtccggcatcgacgatacccacttctggagcaacacccagaataaatgcttccgcagactggcgtaaaaggggcgcggaggatcggatctgtcagatatgcccttgcgggagtggacgctttttctgtgagattttccgcacatataagtttacgcagccgtctctgggaagctctcccggagacggctgcgttgttatcagtctgaaatggatttatcttcttctgcggccgccctgcttgccggagatattccggttcaggtccgccattttccgctccgaggaggagaggaactgcttgagcttgtcctcgaaggccagatcgccggagggggtggtgtccgctgcctgaacggcgggccgccggggagccgccgcgggacgggggactgctgccggacggggctggaagttccgctgggcggggcgctccggcgcgggcaacgcctttttgatggaaagatccagctttccgtccttgatagcaaggagctttaccttaacgtcctgcccctcctgcaaaaagtcatgtacatcgttgacatagctgttggcgatctccgaaatatgtaccaggccggacttgccgccctccaaggccacgaaagcgccgaattttgtaatactggtgaccttgccctctaagactgttccgacctcgtactccataagtgctgtgttactcctattcttattcttgttaaaataatagtaaccggctgtgccggtaatgctcagttggatcgatctaaaaacagatagctgttgctgtcgatcatgcccagttcttcccgggccagttctttcattttctcctcggtgggaccttctgcgatgtcgctccgcagcgtctcgttttcctgctggacattctccacctgccgggcatactgatcccgttccgcctgtgcggcccggacctgcccctgaagggcatgaagccgccagcccactgtggccagaagcagcaggatcaccacatggaccagcagattacctgattttttcttttttgctggtttgacgggctttgccatgggacatccctcctttgcgaaggggcttccatactccttcaatatgtattgtagcgtatttcctgagaaaataaaagagggtttttgcctgaaatgcaaattttttacaaactgcggcgcaaaaccgtcccggtagactcagaaattggaacaattccatccaccggtccatccagaagtcccaaaccggccgcaggggccgggaaagcagggaaaaaaacagaatgccgccgcccagacctcccagcaggatgaacccccggagttggccgtccgactgccgcaggacgaacagaaagaccgccagacctatggcctgacagtagagcaagtccagcggcgccgtcagtcgggggtgccgcagccgtaccgcccgcagcaggtcgtacaggaccccggcgcccagccccagcagaatcgacaggaggaacgtgcggagctgctccgtgacatggatggccatggcctatccgaacagacggctgaaaaagccgccctgacggttcggagtgtcctcataggagatggaggtgatgcggccatccacatacaactcgcccccctctaaggacagtttgccgatgtgcaggtcctccccggtgacgatcagggtcccggcggaggtggtcatgatgacaccgctctcgtcgaagcgctccacatcctccacgccggaaacggtgagatgcgcccggtccatcagctccagccggtggggggtgacgggcatattgaagtcattggtcataagatccctccctgccctcagtgtatgcggacagggagggagatagaagaacttattggatctgccggtacagggcggcggcatcgctttgccgcacggtctcctgaacggacagcacctccacggtgacggtccgtacgccgaagcgaagggtgatctgatctccctccttcacctcgtaggaggcccgggcgggcttaccgttgacggtgaccaatccattgtcgcaggcttcgttggccacggtccgccgcttgatgagccgggagaccttgagatatttgtctaagcgcatgatgcttcctttcttgaaaaatgaaaaagggggcgtaacgccccctttacggtgtgaatttattcagccacagcgtccttcagagccttaccggccttgaacacgggcaccttggaagcggggatctcgacaacttccttggtacgggggttacggccggtgcgggcagcgcgggacttgacctcgaaagaaccgaagccaaccagctggaccttgtcgccttccttcagagcggcggtaatggcgtccagagtagcggagacagcagtctcagcgtccttcttggaaatttcagcggcagcggccacggcggcgatcagttcagctttgttcatgagtatatcctcctgtaaaataattaaaattccatttatcttttatcgcgtttccgcaatgaagatcttagttttctttggcttgctcccaaagagcgattttttccgcttccgtataagcgttcagcgggcggtcggcggcatccgccacccggcggaaccgaccttggtatttgtcacaggcccggtgcagagcgtcctccgggtccacaccggacatctgggcgatcttgcagagaatgaacagagcgtcgcccagctcctcccggatgccgtgaggactgtccacaggctgtccggtctccacggcctgccgcagctcggcggtttcctcatccagcttgtccagcgcaccggcagcggagtcccagttgaatccggcctttacagagcgggagacaatcttttccgcccgccacagcgccggcagcgtatgggggacggcttccacagcgtccgccggggaggtgaaccccttttccttctttttctgagcctcccagccctccagcgcctgtgcgctgtcggcggcctcggcggcaccgaatacatgggtatggcggaacaccagcttctgagccacgccgtccaccacgtcatctgcggtgaaacggccctgctcctcttccatcacggaatggaacaccacctgaagtagaacgtcccccaattcctcgcacataccgggggtatcattccggtcaatggcgtccagcgcctcgtaggtctcttccagaaaattccggcggatggactgatgggtctgctcgcggtcccaaggacagccctcgggggcacgcagcaggtgcatgatggtgagaagatcctcccacccatagcgctgtttcctttgaaaatttaccatatctccactgcctttgcaagctattttatcctgaaaacgttgatataacaggattttttataaatcgttcacttcaagcgcaaaagtttggctattttttcgcctttaggcagagcttttacgtcctctgcctgtaagattcgcagggtaatgaccagaacgccgtataccactacaccggccagaatgccgcagaaggtagcgagggcattggcaccgtaagcgctgtggccgctaaggactctggcgacaagaccgtacacagcccaaacggcggcgcccatcacggcggaggctacgatgggctttccgaacagccgcgtgtaccggggcttctccggggagtatttccacacgaagaagaggttcagtccgcagatggtcagatagcagcacagggtagaaatgggcgcgccgtggatgctgatgtccgggttgcccaccagaatgtagttcatgaccaccttcaccacgccgccggcgatgacggtgaaaataggaagcttctccttaccataggtctgcaaaatggcattggtcaaaatcatcaggcagatgaagatcagggcaatgcctaaaatctgcaaatggggacccgccgccagcgcgtcctccggctgcatgggcagcatgagccgctcaatgggggtggacagcacggagagacccacgcccgcgggcagcgccagaatggcgatgagtcggaaggcggaggaaatgatgcggtccgcctcggcgtggtccttccgggccagcgccgccgctgcaaaggggatcaggctcatggtgacaggataaacaaaggaggccaccatgttgggcatattcatggcgatgcggtactggccgttcagcacagccgccgccgtttctgaaaggcccagtccgttttgcaggcggcccatgacgatcttggtatcaatgatgttgatgatgctcatggcggagttgctcagggtgatgggaacgccgatgagcaggatctgcttaatgatctgcccgctggaggagggaacgtccaaagattccttccggttccggtgggtgacgagataggcgcacaggaacagcatggataccgctgtgcccgccgtgacgcccacgatggcccccgccgcgctgagctcagcggttttgccgatgtggagcacgtaccacgctaaaggcaggccgatgccaagcttcaaaagggcctccagcacctggctgacggcagtgggggtcatgttgccctgaccctgcgtgtagccccgcatacaggccagcaggcacacgcagaacaccgctggggccagcgcctgtacggcagtggcggccagagagttgttcaggaaccgggccagcgcgtccgcacggaagaacatcagcacggagcagaccaaacccagaccgaagaacagccagatggcggtggagaagatccgccgcttctcgttttccagccccttggcgtgggcctgactggtcatccgggagatggccaggggcaggcccgccgtggaaaaggtcagcaaaaagttgtagatctggtaggcggtgtcaaaataagtttgtcccgcgctgcccagaatattgctgagagggatcttgtaggccgcgccgatgagcttgacgatgaccacagccgccgccagaatggcggcgccgcctaagaaggattgttttttcgcaggagttgccatggatgttacctcgaattttcagattgagaggggcgggcgtaccgccgctattggttaggtatgcgccgc

SEQ ID NO: 12201 - DNA, 1231 bp, Unknown
  gut microbiota DNA sequence
ggcatccgtagagcggcggagccgctaacggctgccctaccttaccgttgcggagaatttatcgctttatcgacagtctttcggcggcgtaccgccgctattggttaggtatgcgccgcaggagcggaacatacccgtcattacagcttttcgccgcagtcccggcagtatacgtcttccggctggacctcatgtccgcagcgggggcagatcagatggatgatgggttctccctccaactcccggagccgggccttgagctcatcgatctcccgcattttttccagcagcagctcggaatccgtaggagtgccggtgtgggtggcatacagcagctcgcccagttcccggagaccgacgttgacgccggcgcggagatccgcgatctctaactgccgcttggcggcgtccgtcagccgtttggcccccaaacccatggtgcagatggcgtcccgcgccagtccttccgccttgatccaatacgcttcacagctatgttccatgaatgaccctccttacggccgtggccgcccgtttaagtttcgggaacgtatttttgataaaactccgcgaaagcagcctggttttgctggattttctccggccgctccgtgtattccttgggatacttcaggttaaagacccgctcgatgtggttggtgccgggctccaccattttagtggaaccgcccgcaccgaaggacaggatggagcacagctccgacatgatgtccacgttgtaccagcactccccgccggggcggctccaacccacgttctcaaagctgccggacatatacttctgccggtagaggtagtaggggacgaagcctgcggcccgcagggtaggggcggcgtagtccagcatggactgcacggcggcaccatcgggaatggagagatcctccatcaggatgcggctgcccttcttcagcgccagcgtgtggatggtgatgtcatcagcccccagttccagacatttgtccagagaacggcggaagccctccggtgtatccgccggcagacctgcgatgaggtccatgttgacgtgggggaaccggtaggcccgcaccagctccatggcccgcaccgtatccgcagagacatggcggcggccgatggcggcgaggacgtgatcctccatggtctgaggattcacgcagactcgtgtgacgccgtgacttttcagaacggccagtttttcggcggtgatggtatccggacggccgat

SEQ ID NO: 12202 - DNA, 12715 bp, Unknown
  gut microbiota DNA sequence
ctgatctggcgtcaggatgccgggggtgccgccgcccatgtaaaaggcgcgggggcgcagacgattgctgcgcaccatatccccgccggagcggatctccgcgatcagggcctttacatagggctccaccagagaaaaactccgctccacgctctgactgacaaaggagcagtaggcgcagcgggtgggacagaagggaatacccacatacaggtcgatatcccgcttttccaaccgcttcaacgcctgatagcccacggcaccagtctccaaagccagcgccgcccggtcctcagggacgaaatagcgcgtcttcagctcctgcttggcctcctccggggtcttgccctccatcaacgcccgtgtgatgggcttgtcgggccggacgccggtgagcatcccccaggggggcagcgtcagcttttccgcggcgcggagcgcttccggcagcttgggatacagatccagaaatgccagatagaagcaggccgccacggcgtagcgccgctggccttctttttcaaagtccgtgccggtgaggggggatgcaaaggtcccggcggcggtgtatccgtgatagtgcagctccgctgtgacctgacagtccgccgccgtttccccggcggcaaggcggcaccacgcctcatcttccggctgtaccgcgtcataggtcggtttttccagcggaaagagggtcatcaggctctgttcgacgatatagcgctcgtcatgacctaaaaatttcagcttcatatcagccttgctcccgcagtgccatctgcatataggggttgaagcgccgctcccggtccagagtgctgggctccatgtgtcccggcaggacccggtagtccccgggaagggcggccagccgggccagagaggccatcatctgcttcatgctgccaccgggaaagtctgtccggccgcaggaaccagcaaacagggtgtccccgcagaacagggtatctccgcacagcagcgtgacgctgccctcggagtggccgggggtgtgaagcacctgaagctccagcgtgcccaccgtgatgcggtctccctcgccgtagaaattcacgccgccgaaggggatccgggccagttcgcttttcagcgggaacagctgggtctgcgggctgtcaaaatccgcctgatggatatagaccgccgtcggcggcagcgtctccatcaaagccgccactgcaccggtgtggtcatagtggccgtgggtcagcaggatcttatccacggtgcagtccagcttttcggcggcggagaggatcagctccggctccgcaccgggatcgatcacggcgcagaccttagccgcttcatcgcagagaatgtagcagttggtaccgatggaccccacctgcaaggcttggatcttcataagacacacctcgttgaaatcagtttactcttccgtgtcgaacagaatggtgaccggaccgtcgttctgggaatagacctgcatatcggcgccgaattcgccgtgctgcacgtcgaagccccgctcccggcagtgggccatgaaccgctcatagagggggatggccagatcgggcttggccgcgccggagaagccggggcggcgggaggaggtatcggcgtacagggtgaactgggacaccaccagcaggctgccgcccacctgctccagattcaggttcatcttttcgttttcatcctcaaagacccgcagattgcagatcttgtccgccagcttgtcggcggtgacctccgtatcgttggggcctacgcccagcagcaccagaaaaccggtgcctatctgaccgttgacctgttcattgatgacaacagaggcgtttttgactcgtgtaacaacagcacgcatggtagcaactccttatttaatacccgaaagggcatgcttcgtaatgggccttgcccgcaaatcgggcagatccgtgtgttttgcattttatcaagagcggttctttgcggcagcggagaaaacccgtttccaatgccgcgaaagatcagcccacaggccggttgacctgcagaacgccggagatctgatggagcttgttcatgagggtggacaactgcgcgccatccttgatctggatctcgatgcggatgatggcgaagccgtcctccgtgctgcggctgttcagacccagcacaaaagtcttggtggtggacagcgccgccgaaatatccaacagcagattcagccggtccttgcagaccgcctcgatggtggtgggatagctgtcattggtatcggtgccccaggagacatggatccagcggccgggctgctccttccgcttttcctccgaggcgttgggacagtccgcccggtggacggacacgccgtagccacgggtgatgaagcccacgatgtcatctccggggacgggggtgcagcatttggagaacttcaccaaacagttgtccagaccttccacgataatgccctgctcgctcttgacggccttgggctgcttgggagtgtccgcaggcttggggtcctccttgggctccgccacagcctctgccagcatctgctcctgctgccgctgctgctggcggcgctgcaactcgccctggatccggctcaccgccttctgagcggtgaagccgccatagccgatggcggcgtagagatcgtccagcgtgggataagctacctttttcagcagcaccggcaggaattccgggtccagtacgtctttcatggcgatgccgcagtgacgcagctccgcgtcgaaggcggagcggccgttggcgatgttctcgtcccgcttttcctttttgaaccactggcggatcttggagcgggcctcgttgctcttggcaatcttcatccagtcccggctggggcccttggcgtttttggaggtcaaaatctccacgatgtcgccgtttttcagcacatggtccagcgtgacgatgcggttattcaccttggcgccgatcatgcggttgcccacggcggaatggatggcgtaggcgaagtcgatgggggtggctccggcggggaggttctgcacgtcgccgttgggggtgaacacgaacacttcgtcagcgaacatatccaccttcagggagtggataaactcctcagcatcggcaccttcctgattttccagcagacggcgtacccactcgtacttgccctcggtgccggcaccctgaccgttctgcttatacttccagtgggcggccacgccgtactcggcgatctcgtgcatctccgtggtgcggatctgcacctcaaaggggatgccctcgttgcccatgacggtggtgtgaaggctctggtagccgttgggcttgggggtgccgatatagtccttgaagcgtcccagaatgggcttgtagaggtcatgaatcacgcccagcacgttgtagcagtcgctgacggtgtctaccaccacccggaacgcaaagaggtcgaaaatctcatccagagatttgttctggctgaacattttccggtagatggaataagggtgcttcatgcggccgtagacaatgtgcttgatgcccatttcattgagccgctgatcgatctgggcctgagtgcggctcatgagagcgtcatactccgggcgcttggcgtccagcttggagacgatctcatcgtagccgatggggtccagatattttaaggagagatcctccagctcccacttcatccgctgcatacccagccggtgtgcgatgggggcgtagatctccatggtctccagagatttctgcttctgcttggcgggagtctgatactccatggtccgcatattgtggagccggtcggagatcttgatgaggatgacccggatgtccttactcatggcgatgagcattttccggaggttctccatttgctcgtcttccttggtggcgtactggatccgggtcagcttgctgacgccctccaccagatccgccaccgtgggggaggtgagcttggccacgtcatcatacgtggcgtccgtatcctcaatgacatcgtgaagcagggccgcctcgatggactcggagtccaggtgcagttcctccgccacgatctgcgccacggctaaggggtgggtgatataaagctcaccgcttttgcggcgctgctcgccgtgatgctgcttggcgaattcataggattcccggatgcgcttgaaatccgcgccgggattgtattcccggacggtattctccaatttctcaaactgttcgtcaatcgtcactgcgaatcacctcgtttaacctccgcaccgccccggaggcggcgcaggcagggagaggcgtaaagatccacctttccctgaatgggattgagacatagcgtaacccggtcctcctgccgggacagggagatgagtccccgctcctgaaagaccgtcagggccagcgcggcccggagaaaactgtcgcagccgcccacctgcgccgccagagaacggagatagggcagcagatctgtttccagcttgccctgcttcaggtgccggtccagaatccgccagaaggcggcaaactggtcccgggagatcatgagccgggcggtctcctgggccgtgaggggctgctcccccgtcaggcggtgcagcaggtccaaggattccgcctcgtggcggctgggagtcaaagagggacgcaggtccaccagctgcaattgcagagtggtggtgccccggaaggtgttggcctgcaaatagaaggcagcatccacccggcagccgggctccaactgagcggcggcctccggcatggagaagaaaatggcgtcaaaccggctgggacccttgctgagccgcagtttcaggtgcttgccctggcccacggcctgaacgctgtccaccgtggcgcccagcagggcgaacaccgggcggggattcccagagccgtaaggctccaattgggccagatggtccacctgctccagcgtcatatccgccgggttggaaatggcggcgtctacctccagacagctcaccgcccgctcaccgccggaggcagcctttacgaagcggttcatccgctggcggaaggtatcaatgttttcctccgggatggtaaaaccggctgccagctcgtgaccgccgaagccgtccagcaggtcagagcaggattccagcgcggaaaacaggttgaacccgccgtaggagcggcaggagcccttgccggagccgtccttcagatggatcatgaagctgggggcggcgtatttttcactgaggcgggaggctacgatgcccaccacaccctgatgccattcctcgctggaaagcaccagcgcgttccgttcctccggccgcagccgttcaatttgggcgatggcatcggcgcagatggactgctccaccgcctgccgctcccggttcagatcgcatagctgcttggccagctcctccgctttggcgggatcggtctcctgcaaaaggtccgcggccagatccgcagcccccatgcgcccggcggcgttgatccggggggagagaacgaagccgatctggatggaggtgatgggcttgcccaacagccctgcctctttcaaaagggcgtggatgcccacaaaatccgtgtggttcagggcggcaaggccgcaggagacaatggtgcggttttctccctccatccgcatgacgtcggcaatggtgccgatggcggccagagtgcagtaccgggcgaacagggcgttttcccggtccggcccgcccagcgccagcaccagcttcagggccacgcctacgcctgccagatatttgaagggataggcgtcatccggacggtgggggtccactaccgccacggccctggggaggttttccttacattcatggtggtccgtcaccaccacgtccatgccgatggatgcggcaaagtcgatctcctcattgccggtgatcccgcagtccacggtgatcatcagggtggcgcccttgtcccgcaggccctggatggcgtccttggagaggccgtagccgtcctcaatccgccgggggatatagcgcaggcacttggcaccgcagtttttcagatagtccagaagcagcaccgtggaggtgatgccgtccacatcgtaatcgccgaaaacagcgatggtctcatcgttggccagcgccttctggatccgggccaccgccttgtccatgtcccgcatgagcatgggggagatcgtcagagaggtttcccgctccaacgcctcggcagcggcctcggaggtggtgatgccccgggcggccagcaccgtggccagcagactggggtagccggcttccttcaaaagggcagtgtcctgttctgatgccgtaccgatatgccatttctgatacttcatttggacacccccattctcaaatcaggcggaacaaacaatgttccacattaacaaacatacagtatagcagaaaaacaccggaaggtaaagcacatatttatacagaaagggactgtttcagcggctgagactgctgatttttcgatttcccggacagaacgggccatcttcaaccgaatatgcggccgaaaacgcaaaaagccagcgctcccgtaagggaacgctggcaaggtttcttattcggcaggctggtcctctgcggtttccgcaggcaggacgtaccggctcaggttctgctgaagctggaaggagaactcgtcattcttcttcagactgtggagataggcgtgggaggcggcctgtttttcctgctcctcaatgacgctgacagcgatgttggaacagtggtcacccacacgctcggcattgttcagcagatcgttgaggatgaagccgagctggatggtgcactggccgctttggagccgccggatgtgacggctgcggatctcctccgtaaggaggtccatagtttcctccagaggttccacctgccgggctatctggggatcgtccgactggaagctgcgcagggcgctgttcagcagatcctccagcagggcggtcagcacatccacctcttcccgggcaatggtggagaaggtcaactgcttttcatgaagctccttggcggattcctgcaggttcagagcatggtcgccgatgcgctcaaagtctccgatggcgtgaagcaggcgggagacggtgcgcatatcggcggaggaggtgccgtgctgagagatctggaccagatagccgcccagacggtcctcataggtgtccagcttgtcctcgttggccaggatctgctcctcccggctgccgtcatactggatgaactgggccagagccagctgcatgctttccagcgccagagcgcccatgcggttggtcatgacggcgcattcgctgacagccacgccgggggtccgcatcagccgggggtccaggaaggcgaagtcagagggcttgtcctccgtggagatcaccttgttggcaaggcgctccagctgccggctgaagggcagcagcacaagggtggtgcagacgttgaagatcgtgtggcagaatgcgatgccaacagcgccgatgggttctgccaggaagggcagattcaggaacatctcgccgccaaacagggccagcagacccagagcggtgccgatgaggttgaaggagatgtggatgacggacacccgcttggcattgcggctgacgccgatagaggagatcagagccgtaacgcaggtgccgatgttctggcccatgatgatggggatagcgatgccgtaggtgacggagccggtcatggccagtgcctgcaaaatgccaacggaggcggcggaggactggatgatgccggtgaaggcggcgcctaccagcacacccaggaagggattggtgaaggcagtcatgaagtgggtgaagcccggcatatctgccagcggagacaccgcaccgctcatcagctccatgccgtacattagaatagagaagcccatcatcacccggcccacgtcccggcggcgctgccgcttggagcccatgatgagcagaataccgatcaaagccagcaggggggagaaattcttgggcttgaggaagttgacaaagaagttctcactttcgatgccggtgagggacagcagccacgctgtcagggtggtgccgatattggaacccatgatgatgccgatggtctgtccaatctccatgacaccggagttcaccagacccaccagcatgaccgtcatagcggaggaggactgaatggcgatggtgatgccggcgcccagcagcagacttttgatggggttggaagtcatgcgcttgagcagccgctccagcttgccgccggccattttttccagacttttggacatgaccgtcatgccgtataagaagaaggccagccctccgcacagggtaaagagagagaaaatgttcatatcagatccctttctgcccgaagtatccatcggaccaggtatacatctcatttatagtatgacactctattcctgattataagtggtaaagcggggatgtgcctattgacaaagcggacaaaaaaacggagaaaaccaacggcaagacatactgtgtgcgcaaactgaccaaagaatgtccgcggcagacatacgatgcgctgcagcttgaaaacagccataaattgtggcggcacattcataagcggggttaatggctgcggcggctgactccccgaatggactgtgaaaagtgccaaacgaaaacgattttccatgtgcacgataacagttttacactttgagcaaagtttaagattgaaagtctgctatgtttgtgctaaattaatactgtcgggaattcggctttttgccggaaacatcctgaaaaaaatgaaaaggagcaaatgaagaatgaagaagttgtttgcactgtctctcgcactggtaatgactctgtctctggctgcctgcggcggcaagaagaccgaggcccctgccgacaccaagaccgagaccgagaccgagaccgagacccccactaccggcgatgtcaaggtcgctgttgtcctgaagaccctggcctctgagtactggggctatgtggaggccggctgcaaggccgccggtgatgatctgggtgttgacgtggtcgtggtcggccccggcgctgagagcgatatcgagggtcaggtttccatgatcgagcagcagatcggcgctggctgcgacgccatcgtctgcgctcccaacgatgctggtgccgctcagggcgctctgcaggctgccatcgacgctggcatccccgtgctggctgttgacaccaacgttggcatcgctggccagacctctttcgtgggcacctccaacgtggacgctgcttatgagggcggcaagtgggccatcgagcaggccggtaccgacgccaaggccgttatcatctacggtcaggaaggcgacaacacctccaacatgcgtatggaaggctatgagaaggcctgcaccgaggctggcgtggaagttctggccaagctgtccggcaacaacctgaccgacggcgctaccaaggccatggaagacctgctgagcgcttatcccgatcagatcgacatcgtgctctgccacaatgacgataccgctatcggcgctatgaacgcctgcaagtccgccggcgtgtctgacatcaccatcgttggcttcgacggcaacgcttccgccgtgaagctgatcctggacggcgagctggtgaaggctaccgtcgctcagcagccctatgagatgggctatcaggtggtcgaggctgccgtgaaggctgtcaagctcgagcccgttgacgaagtcatcaatgctcccgttcaggtcgttaccgctgagaacggccaggcttacctggacaacctggaggccatgaagggctaattcagcctgactgctatccatagctgaaaagcgaaaaagccggaatacagcggcaggttttctgccgctgtattccgaaaagccgatcatgcgcgtgcctgcaagcggaaacctgatgggttcccacggcggaacggaaaattttcggcacgccgggatctggcaggaaccattctctgtctgatcccggttacaatacgcacagaagaaaacgattaaacagcaagcacatttcaacgaaaatagccccgggaatcgggatcgagagagcgcttccgctgcggcgggagcggttcggaaatcaggaaaaacagaaacgaggtaattccatgagcgagtatgtcgtcgaactgaaacatattaccaaacgttttcctggtgttgtcgcgttaaaagacatgtctatcggcatcagacccggtgagatccacggtctgatcggagaaaacggcgcaggtaaatccaccttgatcaaggtgctcaccggcgttcacactccggaagaaggggaaatctttgtggacggccagaaggtcgttttcaaaaaccctgttcagtcccgcgaggcaggcatcgcctgtgtgtatcaggagctgaacatcgtcaagcagctgcctgtcacggataacgtttttatggggcgtgccgttaagaagggattgctgctggattatccccggatgcacgccgaggcggaagaagcgctgaaaacactgggacatccggagatcaacgtccacctggagtgcggtaagctgggcgtgggtcagcagcagatggtggagatcgccaaggctgtgtccctggatgccaagctcattattatggatgagcccacttcttctttgggtaaggaagagatcgagcagttgatggagaccgtccggggcctgaaggccaagggcgtggccatcctgttcgtgtcacataaactggaagaactctttgagctctgcgaccgtgtgaccgtcatgcgtgacggcgaacacatcatcaccgaggataccgtgaacctcacggaggactccctcatcaacgccatggtgggccgtactctggataacctgtatcccaaggaattcggcaccaagggcgaggtgtggctggaggccaagggcctcaacgaggccggcgtcctgcacgatgtcagctttaaggcccatgcgggccagatcaccggctttgcgggcctcgtcggcgcaggccgcacggagaccatgcgggcggtgttcggcgctgacaagctggacagcggcgagatctacgtcaagggcgagaaggtacatatcagaacgccgaaggacgccatcaagagaaagatcgccttcctgacagaggaccgtaagggtcagggcctggtgctcaacctggatgtgcggaccaatctggtcttggccaatatgaagggcttctccaacggtcccttcttggacaaggaccgcattgagcaggcgggcaatgacaatgtcagcgccctgaagatcaagaccccctccctgaatgaggtcgtcggccagctgtccggcggcaaccagcagaaggtggttatcggcaagtgggtcaacaccgatgccgacatctttattttcgatgagcccacccgtggtatcgacgtgggcgccaagatcgaggtttaccgggtcatgaacgatctggtgaaggccggcaagtgcgtcatcatggtctcctccgagctgccggagatcctggctatgagcgaccatgtggtagttatgcgcggcggccgagtgatggctgatattgaccgggacacgccgcacttcaattccgaagacatcatgaaagcggcctggggaggagagttagactgatatgaaaaacacgaaaatgaaagagcttctgcaaaagctcggtacactgatggcccttgccatcctggttttgattttctgcatcaccatgccggacaagttcatgaaggtcggtaacttcatgaatatcctgaagcaggcatccatcaactgcctgatcgcttccggtatgctgtgcgccctgattaccgccggtatcgacctgtccgttggttccaactgcgtgctgtgcacctgcaccatcggcgttatggtccagtccggcatcacgaaccccttcctgctggcgctctgcggcctggccgtcagcaccctggccggcttcatcaacggcacgctgctgacccgactggatctgccccatcccttcgtgtccaccatgggcatgaagaacgtactgtggggcctggcgctggtcattaccggctccaagtccatcgccttcaccaataccggcattgacggactcatgtggatcggcggcggctctctgttcaccacctattatgagggcaccaccaaggtgaagttccccggtatccccttcagcttcattctggttatcattgtgttcatcatctttgatatcttcctgcgcaagaccgctctgggccgccagatctactgcgtgggcggcaaccccgaggcagcccgtctgtccggtatcccctccaagaacgtgctgaccttcgtttacaccctgtccggtttcatggccggtatggctggtatcgtgtctgttggccgtctggcttccgctaacggcaacgccggttccacctatgataacgacgccatcgcagcctgcatcgtgggcggcgcttccttcaccggcggcaagggcaccatctggggcaccctgatcggcgctctgctgatggctgttatccgcaacggcctgaacctggccggtgccaagaacgatgtccagtacatcgtcatcggctctgttatcattctggccgttaccatcgacgtcttccgtaataagatggaggccaaggcccgtaagatggctgcacagtaaaccgtcccccggacgcactgttgagttgaattacgccgccgcgaaagcggcggcgtaattttattgtataaagaaaaccacc

SEQ ID NO: 12203 - DNA, 5411 bp, Unknown
  gut microbiota DNA sequence
ttttcagaacttttatgaagttctgaaaacttgctcagcggggagaaaagactttttcgacacgctgaagcaggcgcaggataaaacctgcgtctgcttttttgatctcaattcatatataccggatattcatcgggccgcagcgcctgaagctgggcccatccctgatcgctggcgatgatccggccatcctccaaggacagggcaaaccagttcagtttccggtcacaatacaagaaatgttcgatccccgcctgagcgccaaaaaatcccggctcagcaaatgtgatattggcgcagttgcttttcttctcccaacggatcattgcctgcatgcgttcccgacaggttttctccactgcgtctatggcaaaccgcccaacgtagctccgtccccagatgcttctttccccggaaatcgtaacggctgtttcaccgattttctctccatcctgccagatcccaactgtataggaccgctctaccttttgaagaaacgcgccgctgcgatccaaaattccaaagatcacaaagcccgctatcagcagacagcagagtatcccgaaccggcggctccagtcccgccgcagagcggagcggctctcccgtatcagcaccgtcaaagccgaccggacgtcgatctccgccggttcttccaccagccgcccctccaagaggctcaccactgagcagtgcagtgcgtccgccagcggttccagcagagatacatccggaaacccggccccccgctcccatttactgatcgtacggtctgatatatgaagctggtctgccagctgcttttgagtcagtccctgttcctttcggagctgtgcgatcagcgcaccggtatccgtctgccgcataacgtatcccccttcggtttttactgggttgattgtatcaaaaaaccggcactcccgcaacaaacgctgcgtggagtgccggttttccgcttaattcagcatccgtttcaggtattgccccgtaaagctggcaggacaggccgcaacctcctccggggtgccggtgacaacgatggtgccgccgccgtcacccccctcggggcccaggtcgatcaaatggtcggcgcacttgatgacgtccaggttgtgctcgatgaccaccactgtgttccctgcgtccaccagccgctggaggacctccagcagcttgcgcacgtcatcggagtgcaggccggtggtaggctcgtccagaatatagatggtcttgccggtagcctgcttggaaagctccgtggccagcttcacccgctgggcctcgccgccggacagctccgtggagggctggcccagtttcacatagcccaggcccacatcctgtaaggtttgcagccgctttttcagcttgggcagggcagagaagaagtccagcgcctcatccaccgtcatatccagcacatcggcgatgtttttgcccttgtagcggacctctaaggtctcccggttgtagcgtctgcccttacagacctcgcaggggacgaaaatatccggcaggaagtgcatttcgattttcagcaggccatcgccggagcaggcctcgcaccggccgccccggacgttgaagctgaaccgcccctgtccgtagccccggctcttggcctcctgggtggaggcgaacagatcccggatgtcgttgaacaggccggtgtaggtggctgggttggagcggggcgtccgcccaatgggactctggtcgatgttcaccaccttgtccaactgctcgatgccctcgatgcggtcgcacttgccggggcggaccttcatccgcatcagctccgcccccagccgcttgaagagcacctcgtttacaagggagctctttccgctgccggacacgccggtgaccaccgtaaaggtgcccagggggaactccacgtcgatatgccggagattattctccgacgcgccgatgaccttcaaaaccttgccgtttccgggacggcgaacggtgggcacctcaattttcttctttccggacagatactgccccgtcagactgtcggggttagccatcacctccgccggagtgcctgctgccaccacctgaccgccgtgaacaccggcgccggggccgatgtcgatgaggtaatcggcggcccgcatggtgtcctcgtcatgctccaccacgatgagactgttgcccagatcccggaggtttttcagcgttgccagcagcttatcgttgtcccgctggtgcagcccgatggacggctcgtctaaaatatacagcacgcccatcaggctgctgccgatctgggtagccagccggattcgctggctctcgccgccggaaagggttccggcgctgcgggccagggtcagataccccaggcccacggatttcaaaaagcccagccgggaccggatctctttcaggatgcggtccgcgatcagcatttgctgctctgtcagcgtcaggccgtccatccatgcgagggcatcctccacggagagggtggtgaactcgtagatgttcttctcccccaccgtgaccgccaaggattccttccgcagacggcggccctgacagtccgggcagggacactcgctcatcaactcctccagctccttccggctggcgtcggactgggtctccttatagcggcgctcgatgttgttgcagatgccctcaaaggcctgcttcaaaacgcccttgccccggggctggtcatagtgcagctccagtgtctcccctttggtgccatagaggatgatgtttttcgcctcatcgctgagactgttccacggctccgtcagggaaaacttgtactttttgctcagcgcgtcgaagtacatccgggaaataccgtccccccggatgttgttccagccgctggcctgaatcgccccgtccaaaatggacttttccccgtcctgcacaatgagggcagggtcggcctttaactggttccccagaccggtacaggtggggcaggcgccgaagggattgttgaaggagaacatccggggggtcagctcctccatggagataccgcagtcctcgcaggcgtagttctgggagaaggagaggtccttttcctcccgcagaaggttgacgatcaccagtccgccggagagcttggcggcggtctccacgctgtccgtcagccgttggcggatgtcaggtcggatgatgagccggtccacgatgatctcgatggagtgctttttgttcttctccagcttgatctcctcgtccagttcgtagaggctgccgtccactctggcccggacatagccggagcgcttggcatcctcaaacaccttggcgtgttcgccctttttgccccggatcaccggagccatcacctgaattcgcgttccctccgacaacgccagcacctgatcgatgatctggtcgatggtctgctggcggatctccttgccgcagttggggcagtggggcgtacccgctctggcccacagcagacgaagataatcgtagatctccgtcacggtgcccacggtggaccgggggtttttgctggtggttttctggtcgatggagatagcggggctgaggccctcgatatagtccacgtccggcttgtccatctggcccagaaacatccgggcgtaggacgaaaggctctccacataccgtcgctggccctcggcgtagatcgtgtcgaaggccagagaggattttccgctgccggatacaccggtcatcaccaccagcttgtcccgggggatggtgacgtcgatatttttcaggttattggcccgggcaccttttacaatgatattttcctgcatgatctgcttttccgctcctgtttcatgtagtcaaaaccggttttcggtcatagcatacacaaaccattttttaatgtaaactatgcgtttaaatctgcaaaaatgacatttttttaaacttttatattcattccgcagtaatgtccgccgtctgagcccccaacagggcaatgaggtccgccggggccacctccacctgcgcgccgatctttccggcggagacgcagatggtgtcgaacagctccaccgtctcgtggaacaccgtggggaactgctttttcatgcccaccggggagcagccgccgtggacatagcccgtcaggggcagcagctccttttgaggcagcatggcgatggatttctcccccaccgccttggctgcctttttcagatccagattttccgccaccggaatgtcgaacacatagtacccgccgccggcgccctttgtcaccagggtcttgaacacctgctccgggtcctgccccagatagcccgccacggacacaccgtccaccggcccgtccgccgggtactcatggggcgtgtaggcgatcttcttctgctccagcgcccgcatgacgttggttttttcttccttgtgcttggacacagatctcacctcttacaaatacatccgcagcaatgccaggatcagcatatgggcgggataaaaagcgtagcaggcatactggatggccttattgtgagcgccctgtctgccgttatacagccaaatggggatcagggccagcagcgccaagccctgctccgggaattccaaggtccagctccccagcgtcagggggatggtcatgccccccagcagtttgcagttcaggaaggccagtcccaccacctcgccgatccagccgtaagggatctggcggcagaggtagaagatcagcaccgtgaccacgccgctgccgtagtaatccaccatgccgagcgttcccaggaaataacccacgggcaggctcaaaacggaggcgaggatatacagccccgcccccttgctccggaccttttccagccccagcatcagcagaagggcgatgaagaaggtgaacatcacgttctgatggaaggggaacacaggggaggagtagtacaggtagttaaaggggatctcagagatcagggcaaagaccagcatccgcagcaggtattttttccggtcatgggtccgctgaaagccctccgccacctgaaaggcaaaaatggggaaagcgatgcggcccaccgccgtcagccacatgacgccgggcagcaccgtggcccacaggtggtcgcagagcatgagggccatggccagcagttttaaggtcaggctgtccagacaccccttggtttttgtgtgttccatagtatgttttcctttgcaatgttttttgtgtttttctgtatgtaaaatgcccgttcggacatatattggcttgcttttggtcaattccccgttttcagtcggctacggcagcacccgcagggcgatgatgtacccaatgagaatcaaaaagggataaacgcaccagcccgcccgctgcattcccagatagaagtccgaaggctccgggtctttcacatcgcacatatgctgccaatggaaaatcaccagtggaaaggcggcgt

SEQ ID NO: 12204 - DNA, 2032 bp, Unknown
  gut microbiota DNA sequence
gacggttctgtgtctggacggcggcggctcaaccaatctggcggtgacaacgccggattccacaacggccaccatcatcaaccgtccctccgagaccgggcgcaaggtcacaaatcaggtgtttttagtggcctccgaccgcgccagcggcgatcttgaccacttctatgtccacgccgccggtgactatgtgctggccggcagtgccgtgtccgtcacagcctccggtgtggacagcaattacatccccatggacgccagctatacgctgtccgccagcgccggcagcgttgcggagcaggaggacggccgttatctgctgaccacccccgcctccggcggtgacatcaccgtgacggcctccggccggggggccaagggcagcaccgtggtccacgccatccgcaacccggacaatctgaccctgaaaaacggtgcctccaacctgacggagcttaccgtgacccccggcagcaagaccgctctcaccgctggggccgtctggaaccatctgcctctgacggcaaccaatgaagcctttacctggtctgtttccggggacatcggcacggtggatgagcacggcgtgttcaccgcctccgcccccggcaccggaaacctgacggtctccgccggggacaagagcctgactatccccgtcacggtggctcaggtggccctgcaaaccatcgaggactttgaaactccggatacgcgcttcttcagcggctactatttgatggtttcccgcaccaacgtcagcgatcatgtccagcgaggccattacgccggaaagctggactatgtgctcccggaggacaccggctactattctcaggccatggcaggctccttctccaatctgggaacgccctacacagccctgaacctctgggtctacggcgacggctccggcaaccagctctctttcctctacaccggtgacatcaagagcgacctggagctgcccgtcaccacgctggacttcaccggctggaagcagatcaacgtgccgctgccccagtacttcaccctgagcggcgtggtcatttatgccccctccactacggatgccacttgggaccatattcaggtgacctacgccgacaccccccgcagcggcacagtctatatcgaccagatcaccgccgccttccccggcacggtggataacgccccgccgacggtgacagccgcactggatgagcagactcagacgatcagcgtgaaggtctccgatctggtggacggcgttctgcccgcttcctccattacggtgacgagaaacggtgtcgcggagcctctggaaaactatgatgccaagaccggttccttccagtacacgcttcccgcctccggcgagagcggggaggccctgcggatcaccgttaccgctgtggatgcctccggcaatatcggccgggccagcgtggacatcgattcctacaacgtggaccacaagttcagtgacatcaatgattactgggccgccacctatgtggacttcctctataacgccaacatcaccacaggatacaacgacggcaccttccgccccaaccagaatatcagccgggcccagttcgccgtcatgctctaccgctatctgaagctggacgagagcaagtacgctgatgtgtctctgcccttcgcggatctggacatcatcccggaatacgccattcccgcagtcaaggcactttataccgaaggcgttatctccggcgcagagaaaaacggccgcctgtatttcaatcccaacaacgctctgacccgtgcccaggctgccgccatgatcggccgcacccaggctaagggctatgcactggcggacttgactttcaccgacagcggcaagatccccggctatgccgactactacatccgtactatggcagctcagggggtcatcaatggctacagtgacggcagcttcaagccccacagcaacatcacccgcggccagatggccaagatcctctacaacctgatgtgatttcacaaaacagcccccgtccggtaatccggacgg

SEQ ID NO: 12205 - DNA, 694 bp, Unknown
  gut microbiota DNA sequence
tccagatcgtagtcaccatagtcgctgtcaccgtagtagaacttgttgctgctgaggctggaacgggtgaaggcagtctcattccgcttgccataccgggagtagagggtaccggcatcgttgaacgcgctgtcgggccggctgaattccacatacttgaagctgccggtacagctgctgttctcatagatcttctcaaaatcgtcatcgtcaaaggcaacttcctcaccggctttcaccgtgtaagtaatgtcacccttggaggaaccggatttggaagacgtgatcttcagggttccggtaacagaatcgcttgtcttgttgttttttccgccgtaagccttgaaggtaatctcaatgctgccggagaaggacttgtctgccacaaagctcagttcgtccaaatcgtagtcgccgtagtcgctgtcaccgtagtagaacttgtaatcgtccagttcagagcgggtaaaagaggttgcattccgcttaccataccgggagtaaatggtaccggcatcactgtaatcagaggaaggcttttcaaatgccacatacttcatcgtgccggagccgccagccttgtcataggcattactgaaatcttcatcgctaaatacaacttcctcgccgggcttcactgtgtaggtgatgtcacccttggaggaaccggaagtctttccgattacaattctca

SEQ ID NO: 12206 - DNA, 2491 bp, Unknown
  gut microbiota DNA sequence
ctgcattgcgtacattctcaccaactgttcctttatggagtccgtatggcgccactcatctccgctccacgcaggcgaattgttccatggcgcctgtgaagcaattgacaaagaaacggcagtggttgcattcctgggaatcgggccgtggcgcagtgtggaggaacgggcggtgaagttccttcagcgggtaaccgacaagctaacggtgttggacgccgctgccctggatttgacggggattccggcagaggttcaggatatcgtggccccgctggtgctgcatgccattgcttctgactactgtctgaggctctctcagcggcttggacatcccatgagttcccggcgctatatgggtatcatgaaatactaataggagggggcgtatgaaacttctcggcttgggtgacaatgtgatggatgcctatcttttccgcggagaactgtatcccggcggaaatgctgctaatgtggctgtactggccaaacgggccggtgcagaaaaaagcggttacataggggtactggcaacagacgctgccggcgaacatttccgcaccgtattgcagacggaaaatgtggacatttcacgcctgcgccggggcgtaggtcgtacagcctgcaactacattacactggatgatcaaggcgaccgggctttctcgggcaataacggacaggagactgtgcaaaacctgtaccgtccaattattaccagtgcagatcgaatgtatgcggctacatttgatgtggtgcactctagtattcacagcggtctggacgatgcgctgccggcgttgagccactgcgcagacttgtctatggacttttccagcgacggttttacccacgacaatgtggcgcgtctggcgccgctgttgcgttttgcttttttttcggccggtgaacgcagtgaggaacaggctatggagtttgcatcctttgccgcagagtgcggagtgccggaagttatcttcaccatgggactgcgcggcgcctgcgggatctcccacggaaagaagtggcatgtgcctgccacaccggtggatgcggttgatgccttaggcgcgggagacggctttattgcagctttcctgcgggccttttacgataacggcgcagatgcggcagcagctgctgccgatgcgtccggatttgctgcgaagtgttgtcttcatcacggcgccatggggcatcccattgcaatcgcagaaagcggtctatttcctgaaaccggggagatcggtacataaaaatgattctgctggagtttaaaacggctgccttacctgatttgctacgctgccctgaacagttgctttagaccgctgcccgtcaagccaatgttatttcgctccgcaatgctgcatttacgataaaaagcgcccgaaagcgtgaaccgtatcccgtcaagaggacagtgaaaaaatataaagttttcccggccagcagccattcgctgctggccgctttttatgcggcgagaccaagttcgtgctattccatcggcgtcaacacgcccagtttacgctgcacccgtctggtgttgtaataatggatataggtctcaatcatctgcacaagctcgtgcttgctggtaaaccgtctgccataatagcgttcctacttcaaaatgccccagaagccctccatcgggccgttatcaatgcaatgcgctacgcgggacatactctgcggcattcccgcctgcacgagcttgttgtggaaagctgagtaccaagaagaccgaaaagcaaaacacgcggaagaatttctggacgggttctctggctggcttcatgcagatagataccaaggataccacaagctgccggaacgcatccgagtggtgggctgcgcagctcatgcccgacgtaaatttgatgaggcactgaccgcattgcccaaggaacagcagcaaaccttcagggcaacagaggcgctgtgctattttgcgaagctgttccagttggaacagtcatttgcgaaattaaaccggaagaacgctataccaagcggctggagcaggctaagcctgttttagacgctttattggcatgggcaaatgatctgatcccccggacagcgccgaaatccgcacttggcaaagcactgcactacctgaaagaacaatggccatatctcgttcgatatctggaagatggccgtctggaactgagcaacaaccgtgccgagcgcagcataaagccctttgttatggggcggaattatgtcctcttcccattacgaaacggcgaaggaaaacgacttggacccgtaccaatatctgctctggctcctgcaaaatgcgccgggtctaagcgaaacagatgaggcatgggctgaaaagctgcttcccgcgagcgctccggaagaatgctatatgccgcaaaaatagatgaccgccatctcagtgagcaaaagctccttgagatggcggccttttatacgtggttagattttacgcttacggatatgcaccgttcac

SEQ ID NO: 12207 - DNA, 2873 bp, Unknown
  gut microbiota DNA sequence
aaaaccgtgcaaagcaatctcggccatgccacagcggcgttcaccttggacgtctatggtcacttcacagatgacatgcgaaccgcaagttctcagcgcatggagggcttcattacaaaggttctcaacctgtaaagggtcagataaagggtcaaagggctttgggggcaataaaaaatccctcaaagccttgcggctctaagggatttgtttggtggacgatacaggactcgaacctgtgaccccctgcacgtcaagcaggtgctctagccagctgagctaatcgtccgaagcggaacgtgtatatattacatgagttccgccgctttgtcaagccttttttcgttttttctcaaaaagttttccaaggcgctttatgtcggcaaatttttccgacaggcaactccctttcagcgcttattccacgttgaactgccgcaggcccgccaggtctgtgaccggcagagagaacgccagcgcctgcgcctccgtctgcattccggccttttccataatggccttcatgatgggcttccgggtctccgccgaggcgagaataaagatcagttccttctccgacgccagcgacacgccgaagaatttcttcgccagctccgttccggtcccctttgcgtggaccgccgtgccgccggtagccccagccgcccgggctgcgtccataacctgatccgtagcgccctgattggcgatcacaacgatcagctcgtgggtcaatttcttttccatgcggtcctccgcctccccctgtaacaaataatttttggcagacgcgccgccgatgctggacaccggcaccgccatcataacgcctcggcccggaacatccagccagaggtccttggcagctttccggagcagccccttccggctgggcagcatacacagcagcactgccttttccgtagcttccagccccagacagtctaaaacctcagtggtggcggtgccacggcccagagccgtgagcaccagcgttgccccctgttcccggaaccaagcggagaagtctccgccccggctccggtccgtgatggtaaggatcagatcagcagacatataacttccccccttacagttcgatgatctcgtcgtccgccgccggcatctccggtgcaggcgcgacaggtgcttccgccgcggccttcttcagcttgagctgatagacaaggcccagcagttggatggtgataagcggcgtcatggccaccatggccactacgccgaaagcgtctgttaccacattgccgcccagggtctcacaggcccccatagcaaagggcagcagaaacgtggccgtcatgggaccagaggccacgccgccggagtcgaaggcgatggcggtgaagatcttcggcaccacgaaggataagccgatggcgcacaggtatcccggcaccagcaggacaaaaatagaaacgcccgtcagcacacgcagcatggcgagaccaatggacaccgccacgccgatggacaggctggtgctcatggccttgccggggatagccccggaggtcagctcctccacctgccggttcagcacatggacggcaggctccgcctgcacgatgaaccagcccatcagcataccgatggggatcaggacccagctctgctccagagccgcgatctggcggcccaaatagctgccggcgggtaaaaaacccacattcacgccggtcataaacagaaccaaaccaatataagtatacaggagtcccacagtgattttcaacacattttttcgaggcaaatgcagagacgtcacctgaaacacggcgaaaaaggccgcaataggcgccagcgccgcccccatttcctttgcgtagactggaaggccttgggcgaacagccgccacagctcccggctgtccccggcctccggcactacggagggcacatagcttcccgctgccgggtacgccagtgccagcgtcagcaccgccagcaccggccccacggagcacagcgccaccagaccgaagctgtcctcgccggccttgccgtcgcttcgggtggaggacacgcccaagcccagcgccatgatgaaaggcacggtcataggcccggtggtcacgccgccggagtcaaatgccaccgccagaaaatccttgggggcaaaggccgccagagtaaagatcacgatgtaggacgcgatgagcaggccgttcaacgggatctgaaacaggatacgcagcagtgctatcaccagaaagatccccacgcccacggccaccgccccgatcaggacggcgttggggatccccggcacctgccccgccaaaacctgaagatccggctcggaaatagtaacgatgatgccgataagcaagctgacgcacaccaccacccacagcttccgggatttggtcatctgtgcgcccacccgctcaccaatggggagcatggcggtatccgcgcccagagtaaacaggcccatacccacgatcagcagcacggcgcctaccaagaacgccagcagcacgtccgttgggaccggagccgcggtaaaacacaagatcagcacgatcagggtaatgggcaccacggaggccagcgcctccctcaccttttcacccaatatcgttttcgtctggccgatctggtcccgccacttcttccgcagtcctgcaaacaaacgcaccgcctccttcgctgatgatcacttgatggatttatcataccatttttcaccttagcatcgcaactttttgtcggaatcttttcaaattattaacaatatatgtgaaaagtgctgtgcacgcccttgttattccgcaaaaactgcccggctgttgccgggcagttccctacttgcttcgttcctccagcgtttttgccagctctgccgcaaa

SEQ ID NO: 12208 - DNA, 827 bp, Unknown
  gut microbiota DNA sequence
tattgaaaggagttttcccatgctcacgaagattggtatcaatggctttggccgcatcggccgtctcactttccgcgctgccctgactcatgacgatgttgaggttgtcgctctgaacgatcccttcatgaaccccgagtacatggcttacatgctcaagtatgactctgttcacggcaagttccccggcactgtcgaggcttatgacggcggtctgatcgtcaacggcaagaagtaccccgtcttcacctctatggaggtcaaggacattccctgggcttccgtgggtgctgagtacatctgcgagtgcaccggcaaacacctgaccaaggagctctgccagggccacatcgacgctggtgccaagcacgtcatcatgggcgctccctccaaggatgacacccccatgttcgtctgcggcgtcaacctggataagtacaccagcgacatgactttcgtctccaacgcttcctgcaccaccaactgcctggctcccattgccaaggttctgaatgacaagttcggcatcgtggaaggcctgatgaccaccgttcactctgtcactcccactcagaagctgctggacggcgcttccctgaaggattggcgcggcggccgtgctgctaccggcaacatcatcccctcctccaccggcgctgccaaggctgtcggcaaggttatccccgaactgaacggcaagctcaccggtatgtccatgcgtgttcccactctggacgtttccgttgtggacctgaccgtcaagctggctaagcccgccacctatgaggatatctgcaaggccatgaaggacgcttccgagggcgagc

SEQ ID NO: 12209 - DNA, 437 bp, Unknown
  gut microbiota DNA sequence
tgcggcaagtccaccaccctgcggatggtggccggtctggaggagatctccggcggcgagctgtacatcggcggccagctgatgaacgatgtggcccccaaggaccgggacatctccatggtgttccaaaactacgccctgtacccccacatgaccgttcgggagaacatcgctttccccctgaagctgcggaaaatggacaaggctgagatcgatcagcgggtggagcaggcggcggagattctggacatcacggagtatctggaccgcaagccaaaggccctttccggcggccagcgtcagcgtgtggccatcggccgcgccatcgtccgggagccgaaggtcctgctgatggacgagcctttgtctaacctggacgccaagctccgcaaccagatgcgggcagagctgatcaagctgcgccagcgcatcaacac

SEQ ID NO: 12210 - DNA, 9745 bp, Unknown
  gut microbiota DNA sequence
gcggcggagccgctaacggctgccctaccttaccgtcgcggagaatttaccactttatcgacagtctcgcccggaaacatctaacgtgtttccgggtttctttatttcttccttctttcagggagatccgggccgttttcacgggcctgctggaggtaatcgtgatcttcatttttcttgctgggcacaaagttcagcgccgctgcccgcttcttgcccttgctccgggcgtagaaatacccggccacggagaacaccaccgcgcccacgaaattcaccagcagatccttcatggtgtcgatgaggccgatgtccagatagccgcccaggcccagattctcgccgttgatgaccacatcgtggatctccttcaccgccactaccttattggtccgggtagggtccaggctggcggagtagatggcgttgatgacggtatcccgctgcatatccgtatggaagaaccagtccatgccgaactcaaaaaattcccacagaacgccgatggtcatggaaaagcaaaacgccaccatggccagaaagaatggtgacaggtcgaaggtcagcttctcattgtcattgagcagcagcaccagagaaaagcctaccgccgccgccaaaaagccgttgatagtgtggagcatggtgtcccaatgaggcacgttgacatagaaggcgttgacctctcccaagatctcggccgcgaaaatgaagcagaggatcgtaatttccaggggcggcggcagctcgatccgcagccggacctgcacccagcttggcacatacagcagcacaatggtcagaatacagaaaaacgcaccctcgtagttatccagaatgatctggcgcaccagagatacgatcaccaaggcccgcagaatataaaagacgatgaacgagctcttatgttcccgcagttccttgtccatggcctgcttgaacgtctttttcaaccagccccgctcttttcttgtttttttcaatatggttcctcctgtccggcggctgtgaccgctcatcattgcaacagaataccacaaaaaatggcttgcgacaagataaaccggtcaggcacttggctgcctttgcacaatcagcggtcagctgacaccggccagataacggcccgcagggcttcaaggtcatgggtcaccgccaaaaaacggagggagcacactgcgtcggcggtaaaggccaacagcagccaccacgtcacaccgacgggaacacggtccgccagcgccagcaccggcggcgtcaccagatagacagccgggaacagcagcagtccccacgccagggaaaatggcaaacacacccggccacggaaatttccaaaaaccccggtgtagtcccagaaggacactcccaaaaaggtctccccccaccagtggtaaatatattccacagaggtggcggtcagcccgccccagaggtagagcggccacccggaacgaaggctcggcggcagggccagcaccgccgccatgcccagtccgtataccgggcagagcggcaggagcagcagacatcgtctcctccgccggggagaccgggtcacggcagcaaacagccgctccagcacccatcctaaaaggctgaagctccagaagatccacaaaaattccgccatacgccgccctcctctgcttgatgccctgtcagtatcggcaggccgccaccgccttatacgcttgcgcgggagaaaacaatatgctatactcaaacaaggctatttcagaaaggcggggataccatggcggatagctgggagcgtttaaaacaggaatgtggcgtctgccggggctgcgcgctggcggacaccaggacccatgtggtgtttggggacggctgcgagacggcggagatcatgctcatcggcgaaggccccggccagcacgaggacgagcagggtattccctttgtaggccgggccgggcagctgctggacgatatgctggagatcatccatctggaccgcaccaaggtctacatcgccaacgtggtgaagtgccgtccgcctcagaaccgggaccctctgaatgtcgaacaggatgcctgcatcggctatctgcggcggcaggcagcactgatgaagcccaagatcatcgtctgcctgggccggatcgccgccaaagccatcatcaaagaagatttcaagatcacccaggagcacggccaatggttccagcggggcggcgtccagatgacggccatctatcacccggcggcgctgctgcgggatgagcagaagcgcccggagacctttctggatttgaaaagcattcaagccaaggtacgggagctgtgcgagcatactgaatgttaaaaaggtacgggaacttacgttcccgcacctttttcattttcgatttcaattctcaggctgtggcgattatgtcccggttcagcacaaagtattccacgccggaatacagggtggtgatggcgatcactgccacgcacacggtattgagccagccggggatcggcaggaacatgagcacaatgcacaccatggtgctggccgtcttcaccttgccggaccaaccggcggcgataacccggcccttatcactggcgatcatccgcaggccgctgacggcaaactcccggacaaggacgatcagcagcgcccaagcaggcatctggccgatctccacgaaccagagcagtgccgccgtcaccagcattttatccgccagaggatcggcaaacttgccgaaatccgtgactaagttgtactttctggcgattttcccgtccagcagatcggtgaagctggcgatgatgaaaatggccaccgccacccaggtagcgccggggaagtcccagtacagcaccaccatgaacaccgggatcagcaagatccgcagcatggtcagtttattgggtaaattcataatatacgtcctttcgcagggttttcaaggaaaaacaatcgccttcacacaagctcgccggtggtctcgccgtccatggtgccggtcaggcggacattcacaaagctgccgggagcgatctcgctgtcggcggtgaaccagatccgtccgtcgatgtcgggggactcagcatagctgcgtccgtagaacatctgagcctgagaatcgtacccctcgcagaggacctcccgctcttcacctaagatggagtcattgtaggcgtcaatgatgtcagactggacatccaccgccagctccgcgcggcgctgggcctcttccatgtccacgtgctccatgagggccgccttcgtgccgtcctccggggagaaggggaacacacccgcccgctcgatgcggacctcccgcaggaagtcgcacaactcctcaaaggccgcgtcatcctcgtagggcaatcccgcaatgaggctggtccgcagcaccagaccgggaaccttctcccgcagctttttcagcagggccagcaggttcgccttggtgtcccggcggttcatggcctttaaaatggtatcgttgcagtgctggatgggaatatccagatacttcacgatcttcggctcgctggcgatcacgtcgatcagctcgtcggtggtgtccgtggggtagaggtaatggagccggatccaatggaagtccagcttgcaaagctccttcagcagcttcgccagctgatgctcaccgttgaggtccgtgccgtaccgggtgatgtcctgcgcgatgacgatcagctccttcaccccggcggaggccagctccgctgcctcgtccagcagctcgttcatgggacggctgcggtacttgcctcggagggaggggatcacgcagtaggcgcagtggttgtcgcagccctcggcgatccgcagataggcataccacgggggcgtggacaaaatgcgctcaccgctttggttggcggtgtggatattccccagatggcagggcttttcgcccttttccatcacctcggcgatggccgtggcaatgtcgccgtagctgccggtacccagcaggccgtccacctccggcagctcgtggaaaatatcctctttatagcgctgggtcatgcagccggtgactaagatctttttcacctgccccgcctttttcagctccgccatctctaaaatgttctcgatggcctcctcgcaggcggacgccagaaagccgcaggtgttcaccaccaccacgtcgcagccctccggctgggcctgaatggagtagcctgcctcggcgcacagagccatcatctgctcgcagttcacctgattcttggcgcagccaagggaaatgaatgatacattatagctcaaaatggattcctccggtatgatcgaatacgcccccccgggcggaaataacgaatgcgcaatcagaaccaaaaatttcacagtctttgagactgatccccggctccgcggatataacctccgggatcactcctcccagatctcagaaccatagcggccccaggcggacctcacctcgccccaggaaaacccccgacgcaaaagggcgtccgtcagccgcttcttctccttatcctctggggaccggccgtggagcttgctttgcaaaaagcggtcgatctgctccccgtccgggggcagctcgtccagcgcctcgtcccaaagctcctgaggcacgcccttttcccgcagcttttctctggcccgctggggaccatatcccatatcgccgcagtgccgcaccagtgcggcggcataggcgccgtcatccagcgcgccgatggcttccagccactctccggcatagcgggcctcagtctctgaggctcccttttcctgcaatttcttctccaggtcccggcggctcatggcccgacggccaacgaggtccgccgccgtggtcttgatgttggacaccccggcggcctccttcagccgcgtcagggtttcctcgtccaattcatcgccggagcgcagaccaaaggtcagcaactcctgctccgtcaccttcagcagactgccgtctgccaggaataccagcacccgcccccgcttatgcttggaggcttcaatgcggtcaatcctcatcgttgaaatcgtcagcggagacgttcaccgccttgccggcggccttggcagcggcgatccgggactggttgcccatcagcttatcgaaattggcccggatctgcgcctccacatcggcggcaatgtcgggattttcctccagatacttcttggcggcgtcccggccctgaccgatgcggacctcgcccatggagaaccaggaaccggccttggtgatgatacccagccggacgcccaagtcgatcagttcgccggtgtgggcgatgccctcgccgtacataatgtcgaattccgcctcccggaagggtggcgccactttatttttcacgaccttggcccgggtccggttgcccaccacctcgccgccgtttttcagcgcctcaatccggcggacgtcgatgcggacggaggcgtagaacttcagcgcccggccgccggtggtgacctccgggttgccgtacataacgcccaccttctcgcgaagctggttgatgaaaatgacgatggtgttggttttacccaccgcaccggtgagcttccggagggcctggctcatcagccgggcgtgaaggcccacatagctgtcgcccatttcgccctcgatctccgcccggggcaccagcgccgccacggagtccaccacgatcacgtcgatggcgccggagcgcaccaacgcctcggtgatctccaaagcctgctcgccggtatccggctgagagatcagcatttcatcgatattcacgcccaaggcccgtgcgtaggtggggtccagcgcgtgctccgcgtccacaaacgccacctcgccgccctttttctgggcctctgccgccacatgaagggccagcgtagtcttaccggaggattccggtccgtagatctccacaatgcggccccggggcagaccgcctacgcccagcgccacgtccaaggacagggaaccggtggggatcacgtccacctgcaaattattctggtcgccaagacgcataatggagcccttgccgtacattttttcgatctggcccatggccgcttcaatggcccgcttccgatcctccgccggtgcggcactggccacgggggctttctcttttgccatacgttcttcctcccaaatctgattttctatcttgcttgcccggtctgccgggcgttcttactcgctgtaaacctctccgcagagggtgccgaacaccacgcgggggatgtcgttgtggtccttcaccacctgaatgtctccaaaaccctgggtgcgcatgatccggagcaccgcgtccgcctgaccgatgcccacttcaaaatacagccgcccaccgggggccagagccgctttccacttctcgctgatggcccggtagaaatccagaccgtcctcgccgccgtccagcgccagatggggctcgtagtccttcacagaatgatccagtcccggaatatccccatgagggatgtaagggggattgctgacgatgcagtggaattcccccaaagcccggtccggccgctccaaggcgttcaccgtcatggggatcacccggcccgtcagggcgttccggcgggtgttctggcggcagatccgcagagccccgtcggaaaactcgcccagtaccacatgggcctgaggggcctgcgatgccagcgccaggccgatacagccgctgccggcgcacaggtccaacacccggcaattgcccaaggactgcacatagggcagcgcctgatccaccagcacctccgtatccggccggggaatcagcacctccttggagatatccagaggcaggccgtaaaattcccactcaccgatgagatacgccaccggctctcccgccagatggcgggctgtcagctcccgcacccggcgttccagctccggcggggcgtacagccgcccgtcccgggtcagctcctcccgggtcttgttcacgccgaagcaggtcagctcccgggcctccaaggtggtgtcgatgacgccgccccgcttcagttcccggcgaatatccaaaaacaagtcattatatgtgatcgccatgcgtcgtcgcaaagtccgctgaacttcgtttctgcctgtggcaaaaactgcgttcactcccttgctcctcctttttcttccgcaaacgtttcgctggttgcggaagaagtatttctataattgtcaccatgcgtccttgcccttttcgctgggcagaaccagttccagcgaacggatggcacactcgatcatgctgtcatccggctcgttggtggtgaaattctgcatccacaggccgggggccgtcaggaattgggccagcttgctgtcctgcacatggcgccccacccagcggttgaactcataggtgatgcccactaccaacggcagtaggagcagatgcaccagcgtccgcaatcccgcgttggtgatgggccagatgccgaacaccacgctggaaaccagaatggacacgaagatcaccacaaatagaaagctcgttccgcagcggggatggtgccggggctggatgcggacgttctccactgtcagcggcagacctgcctcgtagcagaaaatggtcttatgctccgccccatgatactggaacaccctgtaaatgtccttctgcttggagcagaggatcagatacgccagaaagatcgcgattttcaaaaggccctccaccacgttccggccccacaggggaaagccggggaaaaagtgaaggatcccgccggtaagcagcgtcggcagcaccagaaagaggaaaatggacattcccacgcccagcagcacggccagacccacgatagccttttccagcttttcgctgctgaggtgtttttccaaccactgttcaaatttggagggctggctttcttcctcctccgggtaaaagtccgcggagtacatcagggccttcacgccgctgaccatcgccgccagaaaatttacggtgccccggatcaggggaatgcccaaaatggggtaacggtccttgatgagcttcagctcctccaccttttccaccaattgaccgtccttgtcccggaccacgatggcctgcttttcaggcccgcgcatcaaaatgccttcgatcagcgcctgtccgccgatactggtgcggaaggcgccgctggaatgttccgccatagataaggttcctttctgtttcgctgtttcagtatatcacactgttgtttgaaaatcaaacatttgttctatttattctttttccgggatgcagatggtcaccactgcaccgccgccctcggcattggcaatgtcgaaggtgccgccgtggagccgcacgatctcgtcgcacacagccagaccgatgccgctgccccgggccttggaggagcccttgtagaatttctgcttcacatagggcaattctgccgccggaacgccgggaccgtaatcccggacccggaccacctgcaccgttccctcccgggtcagggaggcatcaatgcgccggcctgcgccgccgtgcttagcggcattgtccagtacgttgcagaacacctgcttcagccgctccgggtcaccgctgatgggcggcaggatctcctctcccggttcgtagcgcagttcgatcccctcctgtcggaacagctcccggtaggtaaaaatggcgtcctcaaactctgcctgaagatccatttcttccagctgcagcgtaaagcggccatcctccatcttggaaaattccagcagctcctccaccatggtagagagccgccgggactcgttgaggatgatccgcaggccccggtggagctggatctgatcccgctcccggtctgccagcagcgtttcgccccagccgctgatggctgtgagcggcgtccgcagctcgtgggacaccgacgagataaattccgttttcattttctcgttctggccgatcttcatggacatatcgttgatattgtccaccagctcgcccagctcgccggtatacttgttttccagcgtgaagccgtagcttccctgagagatccgcttggcagcgtcagataccaccgccaccggctccaccacattgttgatgaaaatcaggtttgagcttaacaccaacagaagacacagtaaagccaccagcaccactgccagcaccgtcatccgcacctgaacgttgacctgccgcagggaggtgacgaatcgcaggacgcctaccaccttgccgttcaccgtcagagggtgagacaccgctaagatctgttctcccgtcttggggtctgcgccccggaaatagctgatacggttggtttccaccgctctggaaatatcctccgttccggggcgggtgcccaccgtcaggttagatgtggaggacgcctgaatacggcctacgctggacaggaactgcatttctacccgttccttgtccgcatagtcggaaatggcctgattggcccgctgcaagtagttggcgaacccctgatccataaaatagtccacaaaggcgccggactgcgcccgggcctgccgttccagaccgtccagcattcccttataatagtaattggaaatgcccagagatacgccgcccacgatcagcgccagcagcacgaagatgggcaccacagagttgacgatccaacgctggcggaggctccgcacccgcgtggcttttcgtttttgacttccctccggcacgaagcatctcaccctttcttttcccattttgcggggcaaaatgggagccctttcatcttacttgcgcggcggaaatgaattccgccttg

SEQ ID NO: 12211 - DNA, 5547 bp, Unknown
  gut microbiota DNA sequence
aacttataaaaagcaaaagtcctcgaaatcagacgatttcgaggacttttggtacgccgtgagggattcgaacccccggccttctggtccgtagccagacgctctatccagctgagctaacggcgcgtactgccttgctccaaacagcttgtttataatagcatacccaaaacgaaaatgcaagagttttttaaaaaaaattttcacttttttgtgggccttgtaaatcaacagaaaacttgctataatatctgaaaaatacagcggaaaacgcggaaatgcggtgttgatatggagcgaagcgcaatcaggagtgtggcgttcggaggatttgacaaggaagatgttgcccgctatatcgagcagctctcacaggagacggaaaaactccgggaagaacgggacgctttacaggaaaaagcagactgcttggagaaggaagcagacgaactgaggactcaggttcaggaactcaccaaggccagagaagaactttcagcagagatggcgcgtcttgcgccgctggagaaagagaatgcccagttaaaggaacaggtggaggcgctgcgtccggacgcggaggcccatgtcatgctgcgcggtcaggtgggggctatcgagtgcgaggcccggcagcgggcagcagagctggaggagcacacggcgggacagatgcacaaggcgctggacctcttccggcagcagtaccagattttgatgagcacatttgagacggcttccagccacatgacggcggaactgcggaaaatggaagtcacgctggcacagcttcccaggaccatggatcagaccggcgtggaactggatcggctggcatcggctctggaaaagggtactgatgcaaaaagtgacaaaaagtaacaaaatgttgttaaaaaaatcacaggggtgaacttccactcctgtgatttttttaacacgatgcagacaaaattgattgatatataacaaacaaacgtagggaggacaaaaggacatctggtgaaattgacaaaaagacgggcaaaaaagaaaaagacagaagcactttctcctgtccggttcattgtagcataaaaagttagaaaaagtaatatccaaagtaccaagaaatatggtggttgagccgggcggttcttgtacaaaaaggggaaagtgccagaatttaattttgttttcttgttttcttggaaataatctcctatactggtaaacgtaacaatgaatgaggaaaaaaacagcatcggtttgagggaaaagccgaaaatttagaaaatctattcttctggaaggtttccggcagatagtattttcgggtatttgctgtagcactttgcaggaaggagggtgaacgagagatgtccatagaggcgatcagacaagtcacggaaacggaacaggccaacaagcagagcagagccgccgcagaggcggaggcgcgccagttggtcctggacgccgagcggaacggcacggagcttttaaagaaggtgcggtccgatgcggcggaacagggcaaggacctgctgcggcaggcagaggaacgggcggcgctgcgggcccaggagatcgcgcagaaggcggaggcggagagccggcgccagcgcgagcaggcggaacagcatttggatgagaccgccgagtttattgtagaaagggtagtgaaacactgagatggccattgtcaaaatgaaaaagctccatgttattgcaatggcagatcgcagggaagaacttctgaaaggactgctgcacctgggctgtgtggagatcagcgaacccggggaggtccttgcggacccccaatgggcgtcgctgtttcagcggagcggctcgtctcttgccgagtgtaagggacagctcaccgacgtcaacacagcgctggacgccatcaaacagtacgccaagttgaaggacggcatgttcatcaaacgccatcccatcacggaagcggaattcctggatgccggcgctgcggaaaaggctcaggcagcctgtgacgcggtgcgggagcagttggggatcctgaccaaggcccagagcgaggctggacggctggagagccgcgctgccgccctgaagccgtgggaatcgctggaccttccgctggagcgatccggcaccgctcacaccatcttccgtctgggggtctgccccggtcagacggatgtgggcgccatccgcgttcagatggaagcggagggcttggcggcggagctgtatgagatcagcgccgacaaattacagaagtatctgcttgtgatcgtccaccgcggcgatgaggagaaaacacaggagctgctgcggcccttcggcttcagcgcggtgactttccagggaatgaccggaacggcggcggagaatatccgttctctggaacgggagctggaggcaaacaaaaagactcaggatgacgccgctgccgccatcgcggccagtgcggaaaaccgggacgcccttcggatctacgccgaccggctccgggccgaggcagccaaggaacagtgcgccgagagcgtcctgacggatgaaacggtgctgtatttccagggctgggtcccggcggagcaggaaaaggcggtaggcacgttcctgacggaaaagggctgcgcttgggaaacgctggaccccacggaggaggagatccccgacgtgccggtgcagctgaaaaacaactggctcacgaaacctttgaacatggtgacggagatgtactccctccccagatacgacaatgtggaccccaaccccctgatggcaccgtttttcatcctgttctacggtatcatgatggcggatatgggctacggcctgctgatgttcctggcgggattcctcatcagcaaaaagtacgcgcccaagggcacggcggggaacctgttcggactgatgaccctctgcggcatcagcacctttatcatgggcgctctcaccggcggcttcttcggagacttcctgacccaggtggtcaagctcaccaccggcggcgatttcactctaccggctctgttcacgcccttggatgataccctgatgatcctcatcggagccatggcacttggcatggtgcagatcatcaccggtatggccatcagcttcgtgcggaagctgaaaaacggtcaggtgatggacgctgtatgggaagagctgacctggtgggtcgtgtttgccgggatcggccttatggccgccggcatgaccagcgtggtcctctatgttggccttgccatggtggtccttggaccggtgctgaccaacaagggcttcggcaaaattaccgggatcttcggttctctgtacaatcacatcaccgggtatttcggagacatcctctcttactcccgtctgatggccctgatgctggcgggcagcgtcattgcgcaggtgttcaacaccctgggcgccattcccggcaacatcatcgtgttcctcatcatctcgctggcaggcaatgccctgaacttcgcgctgaacctgctgggctgctacgtccacgacctgcgtctccagtgcctggagtatttcggcaagttctacgaggacggcggcaagcccttcaagcccctgatggcggacaccaaatacgttgacattacaaaataaatcattatttaggaggaaccctattatgactgagttggctcaaatgtttgaattgcagcagagtgctactttcttcggcagctggggcggtctggctctggccctgctgggcgctggcctggcggctgttctctccggcatcggctccgcaaagggcaccggcatggccggtgaggccggcgctggcctgctgtgccaggaccccggcaaattcggtaaggtcatgattctgcaggtcatccccggcacccagggcctgtatggcctggtggtgtggttcttcgccattttccgcatgggcctgctgtccggctccctgcccgagctgaccattgcccagggcttccagtatctggcggcctgcctgcccatggctttgggcggcctgttctccgccatcgcgcagggccgcgtggctgctgcgtccatcaacattctggccaagaagccggatgactggtccaagggcatggtgctctgcatcaccgtggagttctacgccattctgtccctgctggcttccatgctgatgatcatcaatatcagcgcctgatccctgtaagaaaggggattcaatgatgaacggaattgataccattatccagcggctgaataccgacgcgaaagcggagacggacgccctgctggaaaaagcccgccaggaggcggcggcggtcgccgcccgctatcaggcccaggcggacaaggaagtggccgatctggctgcccggaacgagcgtctggcggcagagcgggaggaacgtctcatcagcgccgcccagatggaggcccggaaaacggtcctggccgccaagcaagcggtcatggaggagacctacgccaaggcgctggaaaagctgcggaacctgccggaggcccgttacgtagaggtgctgacggagctgctgcttcaggccgcgcctcatggtgcgggagaagttctcttctccgcccaggatcgggaaacggttgggcaggccgcagtggacgctgccaacggaaagtccggcggcaagctgaccctctccggcgagaccgcgcccattcaggggggcttcatcctcaaggacggcaacgttgaggtcaactgtgcctttgatacgctggttcgtttgcagaaggcggaaacggcgggacaggtggctcagcggctgttcggctgaggggaggtcataccttggctaacaaaatcaaagatacggattatctggcgatctccgcccgtgtccgggccatggagaccacgctgctgacggcggagcgcatggagcgtctgctggaggcccgcagcgatgaggaagtctccaaacttcttcaggactgcggctatccggagctggacgccgcccggccggaggctatggacgcggcgctgtctcaggcccgggaggagctgctcactgaccttggtgacggcgcgccggaccccagatatatcgacatattcaagctgaaatacgactatcacaatgcaaaggccatcctgaaggcagccgctatgggtaccagcccggaccggatgctgatggatatgggccgcatcggagcagcggagctgaaaaccgccgtggaaagcggagaactggacaaactgcccggtgctctgccggcggctgtggcggaggccaagtccgtactggataccacccgggacccccagctcagcgacatcgtgctggaccgttggatgtaccgggacatggcccaagtagcagaggataccggcagccagttccttcgggggtatgtggagacccagatcgatgccgccaatctccgggcgctgatccggacgctgcggatggggaaaaacgccgattttctggcgggcgttctctttgagagcggcaccgtggaaccggcggcaatcctggcggcggcgaatcaccccgccggcggtctgaacgagatctacggccccacccggttcgcacaggcggcgga

SEQ ID NO: 12212 - DNA, 1321 bp, Unknown
  gut microbiota DNA sequence
gcgaaggccatgggtggcgtgcaggccactgcaaacctgggcctgagcctggttccgacccagtttatgtttgccggtctgttcctgatctccgcatttatggcgaccgccatgggcacatccatgggcaccatttccgctgttggccccatcgctgtggctgttgctgagagcgcgggcctgaatctggctctggcgatcagcactgttctgggcggcgccatgttcggcgataacctgtccatgatctccgataccaccatcgctgcgacccgtggctgcggctgcgagatgcgggataagttcaagatgaacggcgtgatcgccgcagttgccgctgtgctcgccatggtcatctataccgtggtcggcagcgctgctgagctgaccggtgatttctcctatgaattcattaaggttattccctatatcttcattctggtgttcgccctgaccggatgcaacgtgtttattctgctgctggccggtatcggcgtagctggcgccattggcttcgcgaccagttccttcgatatccccggctttgcgcaggctatgggcagcggcatgagcggtatgtatgacatctgcctgatcgccctgctgctgcgcggcgttggcggtgttgccgaggaactgggcgctattgactggctggtgaagaagatgcacgccagcgtaaagacccgcaagggtgctgagtacatgaccgccggcatggtctccgtgttcgatgcggctatggccaacaacaccatcgccatcatgatggctgctcccctggtgcgcaaggtcgtggcggagcacaatgtggctcccaagcgtgcggcctccatcctggatattttctcctgcgtggtccagggcatcattcctcacggcggccagatcctgctgtgcgtctctctgaccggcctgtctcctttctccatcatcggcgccaactactattgcttcctactggcgttggtggctctggctacgatccagttcggtctgggccgtaccaaggaggaaaaggaaggcatccgtatgtacgatgagaacgatgaggtcgtcgctctgaagtgattcgtggtatctcccatttaaatgaaaggatagacggacactggccgatctgaccaccggctgcgtgcagtgacaatggatccataagcaatgaaacagggcgatcattccgtttcggatgatcgccctgttcgcccctgtttttttgaaaaagattgacaagacagaacacttataataaaatcacaaaagaggaatatcggcgctgccgcaagcccattggcattggttctcttgtcggtgtcatcat

SEQ ID NO: 12213 - DNA, 260 bp, Unknown
  gut microbiota DNA sequence
attgataaatattacggcaaaaaccacgttctgaaggatctgaacctcaccatcgaggacggcgacttcatgaccctgctggggccctccggctgcggcaagaccaccaccctccgcgtggtctccggcctggaaaagccccagaacggcatcatcctgatggacggcaaggagatcgtcaacgcggcggaggcttctttcgccccgcccagcaagcgcaacctgaatctggtgttccagtcctacgcgctgtggcccca

SEQ ID NO: 12214 - DNA, 1207 bp, Unknown
  gut microbiota DNA sequence
atacgctgatccaggagacaccggaggacgatctgcccggggaaaacggcattgccatccgttacagcaaggacttcaatatcgtgcaggccaacgagctgctgcggagcaagcagtccgatctgacgctgatggaatccaagctgatccgtctggcagtctcccagatcatgaagggggacaaggacctgcggacctacaaggtcaatgtctcgcagctggcggaatttctggaggtgcctaagaccaatgtctaccgctccatgcaggacatcaacatcagcctcatgcagcgggtcatcttcattcgggacaaggaagtgcccgataagaagggcaagcccaactacaagatcctccactggctcagcagcgtggagtacaaggacggcactttgacctaccgcctcagcgacgagctgaagccgtacctcatcggcctgagcgaaatgttcaccctttattcctatgacagcatcatcaagctgcctaccaactattccatccgcctctttgagctgctgaccagctgggtgaatatcatcatcaagggggagaacaccccggccttcccggatatctccaccgacccggacgagattgtgctggccatcgactacctgcgggatttcttcgactgcaacgataagtacaagagcgccggtgactttgtgcgtaacgtcatcgaggtcaatctgggctttatcaaccagtatacgaacctgaaggtctccttccgcaagcataagaagggccgttccatctcccatgtgatcttcaagtacgagaacacctggaacaacgaccccaaggcggaggagcacaacaatcagatgctggataccatccgcagcatcaaaaacggtgagcctgcccagtttgaaacggacaaagaggtcatcaccttttaaatcagcgtaaaagcctacatagacaaagcccaggaacgtaacgttcctgggcattttttagcgggatcgtccggaaaacaggggatagcggcggaaaatgccggtcagacccgggcggcagcggccgcaggagagagcgaaggagagttttggcgatttaaccaacaggaaacgcctatttcctacattttgaaaaaaatttcccttgaaacgaaaaaattcttgtaccgtacatcgatgtacggtacataatagaagcagggaaaatcaggaaaaggcaagcgaatggttgaatg

SEQ ID NO: 12215 - DNA, 13247 bp, Unknown
  gut microbiota DNA sequence
cggcgcgtcggtcctgtttctccagctcttcggtatgatggtccctgtgccgctgctgatgggttttggaagttcctggtggctgcttcgccgcagaaactccctctgaataccgtttttcccatgtatgcaacttaaaaaaaaggctgtgagactatgatagatactgtattgttcgatatgggcggcactctggaggacatctgggtcgatgacgaaagccgccattcttccattcagggtgtgctggatattctgcacgctcacggcatcgatctgaacatggactttgaaactgcggctcagagcatcaatgccggctgggaacgttacggcgcttaccgggacccccggcagcgggagctgaagccggaggagatctggggcagcttcgttttgacggatttcggcctgaatgaagattctgtgcgtccttacgccgaggagctggcccacatgtgggagatcacccactatcaccgtactctccgcccccacgtgaaggaaatgctggtagggctgaaggggctgggtatgaagctgggcgtcatcagcaatacggccagcctctatcaggtgtttgacgttctgaaaaactacggcatccgggattacttccaggatgtgacgctttcttccgtcaccggatatcgcaagcccgaccccaacatttttctggtctccctccatcaggtccagtctgaccccgccagttgtgcctatgtgggcgataccctctcccgggacgtcatcggccccatccgcatgggcttcggtgccaccttccacattgactcctacctcaccaagctgaaggacaccaacgttcccgcggacgtgaagcccacttacagcgtgaaggacatttatgaggtctacacgatcctgaaggacgcccgctgatccctgttttgatgtatgacaaaaagtgcccggaccgctgtggcggtccgggcactttttgcggctttcagttggggcgcagatcagcagtccgccaacgcaaatattcccgttctcgatgtctgttccgtgatttgttgcttttccgcacttttcctgcgtaaaagtcccgcagagagtattgctctctgcgggatttttaacattctcttgattttcttttttggggggcggtctatgccggagacttactcataccgggtgcctgcgccgtccaccatggcgtcataggcccgctttaccttatcgtagttcttatcccggtccagcgccacgccgcggcccacaccatccacaatgcggcccacgccgatagcatccagcttttcgtccagctctgccagcagcttgggtgcggagccaggttccgtggagcggccgtcaaagatgatgtggaagaatacctgatccagtccggcatcccgggccatttcgcagatggccaacgggtagtcgatgcagccgtgagaggatttataagtgagatacgccagcagatgcagcgccgtgccgttctttttggcgtgttcgatggcctgtaagaagatgggattcttcttgaagctgccgtccttcacagcggcgtccagacggacgtcatcctgcatgacgcagcggcctgcgcccagattggagtggcctgcctcggagttgccggcctttccgcttcccaggcccacatgctcgccggaggcgtggagcttgctccaggactgctccgccagcagggaatcccagtagggggtatccgccagatggatcgcgtcgccgtcatcgccggagccgagaccccaaccatcgcagatgatgagcagcatcttccggtccttgccgaaatcgtgtccctccgccagagatctgccggtcatctccgcaggctgggggatacccatgacgttcagcaccgtaggcgccacgtcacccagacagccgtcccgcagggcaatggggccgctgtgggcggggtccatcagaatgaaaggcaccagattggtggtgtgggcgccgtcaggcttgcctgcggcggtgtacagcttttcaatgttgccgtggtctgcggtgacggccaccacatagcccttggccagcgcgtcatggaccaccacatccagatagtgactgacatgcttgcaggcttccagcttggcagcggtattcagggtgtggccgatcacgtcgccgttggcgaagttggtcaccacgaaatcgtatttgcccaaagcgcccatgacctgatccgccacggcaggcaggctcagctcaggcttctggtcaaagtcaatgcccttgggagacggcacgcacacgtcatcctcgccggggaagggcgcgttctcgccgccgttgaagaaaaaggtcacatgggcatacttctcgctctccgcgcagtggaactgattcttccccgcctcgctgaggacctgagccagaggcttcaccacatgagacggcgcaaaggcgatgggcagatccttgaacttatcatgatacatggtcatgatgacgaaatccagatccttcagctggttccgctgcaccttgttgaagtccggatcggtgaacagctccgtcagctcgatctcccgctcaccgcggcggcagcagaacacggcggcatcgccgtctccgatcttgcctacaggcttgccgttctccaccaggaccatgggttccagatggtagtcatcctgccccgcctgatacgctttttccacggcccgcgccagctgcgcgccaccgcgcttgaattcagacataaaaagtacctccttatgaagtcaaagcggtgcatgaaacagttctttcacgcaccgctgcgcatttttttatccggctgggacggactcactgtccatcctccggcgggatcagcttttccacggccacctgcccccgcttggggaagatatccagcaggtccgggaagcggtagaccttggcgtccggacggttttccgccgtcagcttcaggggcttatccttccggtactgcaccgtgacggtcataccgaaatcgacggccttggcgccgacgatgtcccggttcagattgtcacccacatagcagcagttttccggttcagcgcccacttcctccatggcgtaatagtagatcgcggggccgggcttgcggatataggtgaccgaggactgctggaccgtctggaaataggggcgcaggccgtcctgatccagccactcgtccacttcccgcttgcccaccagatccgagatgatgcccagggtgtaacctcggcggcacagctccttcaccgtatcggcgccgccctccaccaccgtgcggcggcccttggtctgccggtactggtagcaaagctccgaggcattgcgccggatcagctccggatcgcagtcataggccagccagcgccgccacagtacctcttccggggcctcgcacatatatttcagcgcccattcccggtatacatcgtaccgcttgtcgatcacatcctcgaaccactgggtaggatcttccgtcttcacgccgcacagctctgcgattttcgcccgggcggcagccagataagccgggtccttgtcaatgactcggaaggtaccgcccagatccagaaaaatataacggatgtccgtattcatggcttgcttcctccttttcaccgggctgctggcccggaatgcgtcatcagggcagaatgttcagaatctcccggaaatcttcaatcacatagtccgggcggttttcctccgtaaattccacgggatgcttcttctccggagaccggaaaataatgttgcagccgatgccggccttcttggctccggcgatgtcgcgcttgatgttgtccgcaacggacacgcactcctccggcttcacgccgatctgctgacaggccagatcatagatctcagggcagggcttgcgcatgtggcatacggaggagaggatcaccgtatcgaaataggaatccagaccgtcctcctccagccagtcgggcacctcgttctcaccgatgaggttggagatgatccccagcttgtagccgcgctcatgcaggcccttgatgacctccacgccgccgtctaccacctcgcggcgccccttgcactgccggtactggaagctcagctcatggcacacctgacggatccgggccgggtcatagtccggcagcagccatttgcaccacagctcttcatctccggattccttgaactcgcccaaagcccacttgcggtacggctcgtagcgctcctcgatcatctgatagaattcctcataaggcatatccgtgcctgcgatctccgccattttccgacgggcgtggcgcatataggcctcctccaggaaagcaatgcgcagagtgccgcccaagtcgaaaaagacggctttatactgtttttccataggtcctcctttaagcccgctcagggaagatgtccaacaattcagaaaggctggtgatgacatgatccggggtaaactccttgccggtggccttttccttgttcagcgtatccggctcatcgatccggatcatcataccgaagccggcagcctgagtgccctccacgtcccgcaccgggttatcgcccacataggcgcagttggcttccggcgtaccgatgcagcggcaggccaggtgatagatgtccgggtccggcttgcgcaggcgcaccttggaggaaaggatcgtggtcttgaagcactgggccacgccgtcagcggccatccaatcggggatctccgtctccgtcacggtgttggcgatgatgccaagggtatagccccggcggtgcagctccttgatggtggctacggcgtccggccgggccacccggcggccgtcatggtcgcgccacaggcgggtcagcttgggggcgttggcaaaaatcatattcggatcatattccggcagcatgtactgggtccacagttctccctcggaagcatccagcagggtggtcttggactgcttgcggtatgccttccagcgctcctccagcttggcaaacagggcgtcgtggctctccgtggtgccgatcagttccatgagaccggcttccgcccggtcaataaactcctggtccggcaggacaatgcgcagagtgtttcctacatcgaagaaaatggtttggatattggcggtcatggcagttcctcctttgaaattcagggtcgcggcccaactgcgggaaagcgcggcgatcctcggagtgtgacgccccgagaatcgcaaacgtttgcgatttctgtttttattttataggagttcgcccctttttgtcaatatcccaaatgtcaaagctcagacactttttttgctggattgcccaaaatgccttaaaaatttaggttgatattgacagaagagcaaaaatcagctattcttgattcgtctgaagtaccttggcagttttttctgccaattttcttaaaaagtcggaaacgtttgcataaacacaaccttcgcaagggagtcaactttatgaaaaatgtaacattaaaggatgtcgccaaagcagcaggcgtctcctatgctaccgtatcccgtgccctttccggcagctcccagatcggcagcgagacccgggaacgggttctgaagctgtgcgatgagatgggctacaccaccaactttgtggccaggtccatggtgaccaagcgcaccaacctcatcggacttgtggtcccctctgtggacaaccagttcatgtcggagcttgcctaccacgcggaagtcagcgcccgtgcccacggttataatatcatgctctgtgattccggtccggacctgaagcaggaaaagaccgtgttcaagctgctgctgggccgacaggtggatgggatcctcatcgtccctcagagttccaaatcctacgataacctcaaatcctatctggatcaggtccccacggtgttcctcagtgaaaacctgcggagccagccccagagctatgtggccgttgacaacagccggggcacctatctgggcacccaatacctctatgagctgggccaccgggacattctctatttcggtcagcgtcccggttccacgacccatcagctccgagcggacggatatatgaaggcctgtcatgaatttaacctcacgcctcactttttcaacagcgaatattcccgctcttccattcagggtggatatcagttggccaaggagctgttccggaagcctctggactgcaccgcagtctttgccgccacggactccaatgccttgggtattctgacggcggcagatgaaatgggcattgatattccggggcatctgagcctcatcggcttcgataacatcagcgccacggccctctcccgcatcgacctgaccaccgttgaccagcccaagcgggacatggcggtgcaggcggtggatatgctccgggacaaaattgaaaacggcactcagggctatgtccaccagatcctgctgccgacgctgatccagcggggcacctgccggaagctggatccctccaagtgatctcactgtaaattcgggacggcctgccgcccctggtagaaaggaacatacaaccatgcaaggttatctttacgatcctcatacccatactgcggaaaccagcaaatgcggccatctgcctgccgccgacgttgtggagcgctatgtgaagcacggcttttccggtctggtggtcacggaccatctgcatccggagtacctctcccgcatcgacacggagcatgactggcagaaggccatggaccactatctctccggctacaaggcctccaaaaagcggggcgacgagctgggcttcgatgtgattttgggcgccgagctgcgcttcccccagaatgacaatgactatctggtatacggcatcgacgaggactggctccgttccaatccctatatgtgctgcaccagtgcccgggaattctacgagaaattccacaatgaagtccttatcatccacgcccacccctaccgggacggcaacaccaccgtgtttgaggacgctgtggacggcacggagatcatcaacggcaacccccgccacgaaaatcacagcgaccggggcgtggagctgtgccgccgccatcccaactatttccgtctggccggatctgacacccaccaggacggtgatgaggcccgtgcgggtgtcatcctgccggagcaggtccgggactccttccagtacaaggcaatgatcgaatccggaaacttccgtctctggggcccggatttccaggacctcattgacatcgacgaggaaatgcgtcagggcaagtaattgcctccccatcagaataacgactgactttgaatccccggcaggccgccacgcttatgatggcctgccggggttcgttgtctccccggcgagctgcggcaaatttgtaaagctgtctcctggagccagccacagaaacacaattccccgttttttgtcggttatttgcggatttgcgcttgtattttgcggaagagtgtggtaaggtaatccacggttacggaatgcggcgaaaaggggagcgccttggcgccgcgctcagattgatgacgaaaccagattgcgagggaacccgtgttccgggttgagaggatcccagtaaggatcgaccgcccctgtttctcctggtgacgccgggagagctgtcagcatctgcttgaagtcaaattcggtatgtgctgcaaggcacatattttttttgcgctttgagtagaaaatcaaatctggaggtaaatcccatgaaaaagtttcttgcaagtattctgaccctgactctgtgcctggggctcgccaccggctgcgccggcaagcagaccccggcggagaacaacacggaaagcgccggtgagaccggtgtgaaggagatcccctctctgaagatcgccttctccccctacgccgatgcggaccagatcaccaccgccacagagcctctggagcagctgcttcaggcaaagcttctggaaaagggctatgacgtgaaggatatcgacatgaccgtgggcacaagctacaccgccgtgggcgaggccctcagcgccggcagcgccgacattggcttcatctccggcggcaactacgtcctcttctccgacgattgcgacgtgctgctcaccgctctgcgctacgccatcaacaaggattccgagaaccctgctgactggaatgacggcaccatcgaggaaaacaccaaggatatgagcacctattaccgctgcatcattctggccggacccagcgaaaagggtcaggaattgcaggccaaggtcaatgccggtgaagaactgacctgggacgatctcaacagcgccacttggtccgtcctcagccccacctccgcctctggctacatctatccctgcctgtggcttcaggatcactacggcaagggcatcagcgatctggagcacgtggtccagtctgactctcacaccacttccgtggcccgtctggccgccggtcaggtggacgtgatggtgtccttcggccatatccgcatcaagaacgcccccaagtgggagaccgagctgggcggcaccgctcccatggtggagcagaccggcatcatcggcgtcaccgagggcatttacaacgatatgattgcttacagcaagaactccgataccatggcggatgaggatttccgcaaggcgctgggcgaaagcttcatcgagatcgccgacaccgacgagggccgggagatcatcagtgtgttcagccaggttggctacacctggggtcaggactccgattatgacggcgagcgggccgcgcaggagctgctgaagtctctggaaggctaagtcccccctttaaaaaacacttgccccgcggcttctcaggagccgcggggctgaaaggctatttatgctgctggaagtccaacatgtccgtaaagaatttcaaaaccgcaccctcgccctgactgacgccagcttttccgtcagtcagggggattttgtatctgtgatcggtccctccggtgcgggcaaaaccaccctgttccggatcctcaacggttctctccgctgtgacggcggcgccattctggtaaacggcgttcactttgagtctgccgaccgcaggacccgccgggccattcagaccaccatcggcaccatctatcaggatttcgcactggtggaaaatgccacctgccgccagaacgtgctgaacgcctgtctgccggacatggcgttcctcccggcggtctgcggctttttcggaaaggagcgcgtcgccgaggcggacgccctgctggaccgggtgggccttgcggacaaggtccatgagccggtgaagaacctctccggcgggcaaaagcagcgggtagccatcgcccgggcgctgatgcggcatcccgcgctgctgctggcggacgagccggtagcgtccttggaccccgtcaccgggcggcagattttagaattgctccgggacattcagcaggatcaaaagctgaccgttctcatgaacagccacaatctggagctgtcacaagaattttccagccgtctcatcggcctgaaccaaggaaccgtggtgctggacgccccggcggacaccccggcgaaggagatcctcgccgccgtctaccaccgtcaggaggatcagccatgacccgttcctccggaaagcgctggctgcggacgctggcacttttccttcttctgctggccgcggcgcggttcaccgactgctcccccaccctgttctgggcgcggcggagccatctgacggacctgatctccgccatgctcccgccggattgggggtatgccccccgaatcctggccccgctgctggctacggtgcagatgtccgtcaccggcacggcgctgggatcgtttctggcgctgctgctggcccccctgtgcgcggaaaatctccatgcccctaagccgctccggtggacgctgcggctgctggtgcaggtgctccgctccttccctacgctgattttagcgctgctggctacgttcttgtttggcttgggcaccttctccggtaccgtggccattacggtctacacctttgccattttgacccggctgacctatgaggatatcgaatcggcggagctggccccctaccacgctctgtgcgccatgggcgcggtgcctgccaaagtctactggcgggccgttgtgccggggatcgccccatcctatttcttcaatgttctgtacctgttggagaccaacgtgcgccacagttccattctgggctatgtaggggccggaggcatcggtctgctgctgaacgaaaaaatttcatggctggaatacggcaaggtgggcatgatcctgtttttcctgttcctcaccgtctgcgtcatcgaggggatcagcggcctgctgtcccagatcatccgggaggaacggagcctgtctcctcttgggaagcggctcctcaccggcgctgccgttctgctggctttggtctgtacgctgtctctccagcccccggacttctcccatatcagcccccgggcggtgcaggccatgatttccggcctgttccaccccgactgggctttcttctttgaaacggataccagtggcttggggtacctgctgctggagaccgtgtgcatcgctctggtgggcacctgcgccggaacagttatcgcagtgcccctgtccttcctctctaccccctgcctgatgccaaagctcccggcgctgctgttccgggtggtcatcatggcgatccgctctgtccctttcctgatctacggcctgatctttattcgggtggccggtcccggcccctttaccggcgtgctcactctgggcgtttgcagcgttggtcttttgagcaaacggttcacggaggccattgagtcgctggacttccgggcctatcacgccttggaatctatgggcgtccctctcctgctccgcatccggtacgccgtgctcccccagctgctcccggcgctggcctcggcggtgctgtaccgcttcgacgtgaacatccgggaagcgtcggttctgggactggtgggcgcgggcggcatcggcgcgcctttgatcttcgccatgaaccactacaaatggagcgaggccggggccatcgcccttggactgattctgctggtctggtgcattgaccgcctctccacctccctccgccggtaatataaaagagctgactgcattgcagtcagctctttttttcacgcaactgaacaccgtttggacttttctcagcccgcgtcggcggcgatggcctgatcgatgagggattgcagcgtctccgcctgattcttctcggtgatggcgcccacgatgggctcgcccacgatgttgccgttccgatccactacataggtggtggggaaggcgaagatgttggcggtaaaggctcccgccgggctgctggaatcgaaatacacgttctgataggtggcgcccttcttggccaacacgtccttcgcgtcggcgatggccgtctcgtcgccgtccagcgtaaaggcgttgacgccgatgagtgcgccgcccttttccgccagttccttgttcagcgcgtccagatcgccaagctcacccacgcaggggctgcaggtggtgaaccagaaattcaccacggtgacggcgttggcggagaacagctcgtcgctcttgacctcgttgccgtccagatccttgccctcaaaggcggggaaggtctgcgcgtcgccgttggcgtcggtctcctcattcagaatttcgggatgctgcttttccagctcggtcagcttattctcgatctcgctgatctcctgcgcggacttcttcagcagcgcgtattcctcatcgctgaactggtccttggcggattcgatggtgtccagcaggaaatcgccgtaattcttgccgtcctcctgcatggtcatgcccttgtccgccgccagaaagaccttttcccaaagctccgtattctccgccaggatctcgttctctctgtccatcaaggatttataggtagcggcggcctcctccgtctgggccgtgtcgccgctgttttcggtcttgctgtcacccttcgcgccgcaggcggccagagacagcaccatcagcgttgccagcagcagcgcggtcaatttcttcatcttcatgttgattcctccgtgttttcttcaatgttgatattttgttttccgtctccaaagccatagcggaagctcacggccccggtgggacaagcgctgacgcacatcccgcagcggatacactcggtatgattgggcgttttcgtcacatccacgtccatcttgcaggctctggcgcatttcccgcaggaaatgcacttattttcgtccaccttcatctggaatagggacactctgttgaacagggcgtagaacgcccccagcgggcagagccatttgcaaaacggccggtagaacaccacgctcagcgcaaccaccgccagtaaaatgccgagcttccatgtaaacagcttgcccagcgctgcccggatgccggaattggcaagggacagcgggatcgccccctccagcacgccctgcggacagaggtacttgcagaaaaaggggtcccccatacccacgtcgttcactaaaaacgccggcagcaaaacgaccatcaccagcaaaacggcgtatttgagataggtcagaggcttcagtttctttgtggagagctttttcgtgggaattttatgcagcagctcctgaaaccatccgaaggggcagagaaagccgcagatgaagcgtcccagcaaaacccctaacaggatgagaaagcctgtgatataataggagaaacggaacttcgatgagcccaccaccgcctgaaaggagccgatgggacaggccccggacgccgcgggacaggaatagcagttcagccccggcacacagacggtttttcccgccccctgataaagacttcccttaaagaaattcggcaggtgaagattggtcagcagcgccgcccccgcctggatccatccccgccagcgggcaaggagatgggaaattgtttgatgttttttatccaatacccacacactccagacatactttaatggccttgctcagcaccgtggccgtttcgccccgcagtacaccgacgcacaccatggcggccccagccaacagcaaaccgacctgtgccatcgtctttttcgattgcggcaatttgctcactcccttcattgctgccttattgtaccacaggagatgtaagattttcgttaagaacagaaagttaacagaaatcttatctgcctgtgctataatgaacacaaatggatcactatgccggaggtttttatgcgtattcttg

SEQ ID NO: 12216 - DNA, 2209 bp, Unknown
  gut microbiota DNA sequence
cgtgccctttgtgagaccatcgtccgcagtctccgccgccttgcttacagtgtggatccctgttatgacggtgacaccgccatcgacctgcttggctcggagcggtacgatctggtgctgctggatctgaacctgccgggagcggacggcatgacggtgctccgtacccttcgccagaccgaccgggagacgcgggtgctgatcctctccgcccgcagcgaggtcgctgacaaggtggaaggtctggacgccggggccaacgactatctggcaaagccctttcatttagaggaactggaggcccgcatccgcagcctgaccctccggcagttcacccagaacgatgtggtgctccactgcgggcccctgtccttcgacacccgctcccgcgccgccaccgccgccggtcagccgttggccctgacgcgaaaggagaccggcattctggaatacctgctgctccaccaggggcggcccgtcagtcaggaggagcttttggagcacgtctgggacaacagcgtggacaatttcagcaactccatccgggtacacatttccgctctgcggaaaaaactgcggacggcactgggctatgaccccgtccgcaaccgcatcggcgagggatatttgattgaggaggagcaggcatgaaaaagctgtctttgcaatggcggatcaccctgatgacggctctgctcatctgctccacctgcatggcgatgaactggctgattggctgctccggccggcactatatggactccattggtgccaacctctccaccgccatcgatccctcggagggggcggtggaatacttcgaccccagccgggaggggcttgaccccaacctgaccatcgtgatctacggagcgcaaacctctttcacagcaactaactggtatatcacggcggcggtgacgctgttggggggcattctggcctatttcgtcagcggccgggcactgagacctctgcggaccttcgtggcgcaggtggaaaaggtacagcccaacaatctggcggacatgaagatcacggaagaggtgctgccggaattccggcagttcagcgactccttcaaccagatgttggagcggctggacgagggcttcacagcccaacggcaattcaccggaaacgccgcccatgagctgcgcacaccgctggcgctgatgcaggcgcaggtggagcttttctccgccgagcacccggacgtattgccggaaaccgcagatttcctccgccttctgcgggagcagacggagcggatgacccagatgacaaggacccttctggaaatgtgcggcttgcaggcggtgccctgtacggatcacatcgagctcggccctatgatcgatgaaattttcgcggatctcgctccgctggcagagaaaaataacgtcatgttagagcgggagggagacggcaccatgaccggcagcgacacgctgatctaccgcctgctgttcaacctgacggagaacgccatcaagtataaccgccctggcggctccgtgcgcctttccgtgacgccggagcctgaaaaactgttgattcgggtggccgacacgggccggggcatcccggaacactttcagcggagcgtattccagccctttttccgggtggacaaatcccgcagccgggaatacggcggcgtgggcttggggctttcgctggtgtgggagatcgtcaagctccacggcggtaccgtgtgcgtggagaacagctcggaggcaggcaccaccgtggcggtgtcccttcccctccggtgaaccgctttaaaaagagcctgctttctaaattagaaagcaggctctttccatatataagttctacttttttcgcagttcctgaaggattttcgcgatcatgtagatcacatatcccaaaaagatgacccccgcaggcacgatcacgaaaagcaggaaaaacttcccgacaatgtcatatagggcagcttcgacgatgcttcccattccgttggcccccctttcgccggatttcaaagcgtcaaaagtgagaaattagatgttcgtgacccaattcgctttcattcttgaattaattttaccacatggctttttcacagtcaaaacgttttggcagcaaactgacagtatatcatggaaaacccgtcggtccgctgcgttgcagcgaaccggcgggttattgcaatcattcccactcaatagtcgcggggggc

SEQ ID NO: 12217 - DNA, 2697 bp, Unknown
  gut microbiota DNA sequence
ccagaaggcgctgaagaaattgggattccggaagatgcccacgtagttggtgtacttatcaatctcaccttctttgccgatccagttgtaaagcgtcaggttatccagaccgtagccggcgccggtggtgatctggaaggtctccatgatcagcacgaagaagggcaccaccatggccaggaacaggaagaccatcaggaacaccatgaggggcttcttggccttgcccaactgcatcagcgtggcgcggccgcccttgccgctgacggtggcgtaggacttccggacgcccacgatccgctggttggagaagatgatgagggcggccagcagcaccagtacgatggacatggcatagccgacagcctggggaccctggtcgatgaaggtacgcatcttggtagccagagtgtagtagccgatgcggttgcccaggttggcggggacgccgtatgtaccgatggatttgctgatggtcataacggtggcggacagcacagagggcaggatcaggggcagagtgatgtgccgcaggatctgcgctttgctggcgccctgaatctcacccatctcctccagctcggagttgatggagcggagcgcgccggagaccatgatgtaggagaatgcgtaatagtgcatggacatgcacagcacgatggcgatggggccgtaagccagccagtcgggaacgggaatgcccagaccggccaagaagccgttggcgccggaggtggagttgcggaacatggccagccaggccagagccttggtccaggaggggatcatataaggtacggtcaccagcaggcctaggatcttcttgccggggagatccgtgcggatcatcagccacgccagaacggagccaagaggcaccgaaaccagcacggtgaaaaagccgcagataaaggagtttttcagcggcccccacagcacggcgctggccagcttaccggtgaggatgtatttccagtagtacagggtgaaatcgcccacgtggccctgaacccggcgcaactcgccttgagccagcgtaaaggtgctggagatcatggtcagcagagggatgatgatgaggcagaacaggatgatgagactgaccagcaccaccatgttaaaggggtttttcagcacattcaggatcaggttctttaaacgccgcttggtcaggggttttctgggtaatccatttttcgacacgataacacctctttctgaagtctgccgggggatcgcgggggacagcagcttgctctcttttctcagttctgtgcgcagtctgaccggcggtgtgccgtcctccggtcgcaaacgtttgcacttccttgctaccattataaagaattcttaacggaattgtcaaggaggattatggctattttcccatgatttttttattcaatttcacgtacactgtgtaaagtgcacaaataaaaagaccgacctttggttgttatttttggaggaagaaaaaacgaatttgacgcgaaaacgtatacgttttcgtaaaatgaaacgaacgctctgatgctgtcgaatgaaaacgaacgcaaaaaaggagacaggctcgtcctgtctccttttatatagactgtgaaaagctgtcaggctctgagggcttggtcatcctccagggtcagccgttctgccagcagggcaatgaattccgcattggagggttttccgcgctgactgctgacggtgcagccgaagtatttggggagtgtctccggcgaagcgcggtcccaggcgatctcgatggcgctgcggatacaccgttccacacggagggcggtggtgccgtaacgtcgggcgatctcaggatagaggatcttggttacagccttgttcagtacacttggatcggcggcggtgatcaggatcgcttcccgcagatactggtagccggagatattggcaggcatacctgcatcatgaagcatgtgggtgacgcgggctttcagagaggggcgggtggctttcggcttttcccggaacaggttccgcatccggtccaacagtgtttccatccgaaagggttttggcagaaaataggcagcgcccagctccgtagcttccgtcagcgtctggtcggaaacaaatgcggaggtcagaatggtcatgggagcatagccaagctcttgaagttctcgcagagcgctgagaccgtccagccccggcaggatcacatccatgatcagaatatccggttcctgctcctgaactttatccagaacttcgtccccggtttgtgcaatttctaccagaaattctcctgttctttccatggcttcccgcagcagaatgcggaattccgtgctggtatctgccagcagcaccgttctgcgctgttccatgttcccacaactccttcccaataagatcatgcccgcagatgtcactgcgggcatgatcttgtgtatattatcaaaatatcataaaattccgtattttacaagttaaaaactgggaaataggtgtaaaatatccgcaaagattttgggcggactgctggaagtccgcgatttttccggatgagcctccgaaactggcctgcggtcctgctattgaccggctccgctgcccacaggcttttccagttctgcccgcagcttttccaatgcccgcttctcaatacgcgatacatagctccgggaaatgccgaatgtggaggcgatctcccgttgggtcagg

SEQ ID NO: 12218 - DNA, 2722 bp, Unknown
  gut microbiota DNA sequence
ctcaataggggcggaggccgattccaaataccgggtaaaaccgggaaattccgacaggtcaaattcctgtgcccatttccggtggggcatcacatcatgccgccgtccgatgtccgccatgctgcggtagagcagcagcccacttgtggtgtgggcggcgttgctccgctggacatacaggccgctgaaggaactgtcagcactgacaagagatgtgttcagcaccacgaacgcgccggagcagtccgcctgacggacatactggcacagcggctccagcatagcctcctccagccgctccacagcgtccgcgtccccatccagtttggaaagatccgttgtctgtttttccagaatggcggtcatgtcctcggagagatgaagccccattacggagacattccgccacagggattccatgtccgattgaaacgcctccatccggaaggtcagcgatttcgccagctcctcccgggggcttttcagctgtcccagcagaagaaggacagcgaacagcgttaccagcagcagcgccgccagtgcgcccatgtagaggaacagccgccgtcgcatggagggcttggcctgtttcagtttggaaaaagaaaacccggacatgggccgtccccctctttcagcatgacagtgttctcaatggatagcgcacagcagcgcccaggtttcctctgccaatgtgtcaatgctttcaccggcagcagcacgggcgggaagcttctgctgcatttgccgcagaccatcataaagttggctgacctttccgtagtagccctcaaagcgaggctcggataagggagtgtagctttcctgcatgattttcagggctgcgtaaagctgacggtagctttcagtcggttccgggaacttatcataattttcgatggcgtcaaaggcaccgttccgtaccggcatataaccggtctgggccacaaagtccagattccgctcactttccgtcagccagcggacgaacagcgcggcagcctccgccttctggtcagtggtcttgtaggcacaaaggcccacgcccgcctgcgtcatcagagcgtctgcacctgccgttttcggcatgggcagtacatggagatccatgggctcctgcgtgccgtcccggtaggtaacggtatcgttatagtagaggatcgccgcggaggagccgagaccggagagaacatcgcctgtcatgacctgcgtgttggaatagagatcggagaccaccacatggccctgagccagagagcgggcgaagccgctgccgttgcacattagaagctgggtggatttggaaatagggaagagcagcagggttccgtcctccgtcatgccgtcggccagaaagccggggacaaagttagagagctcctctgctgtaaaccgggcgttccaatctaccagattgtccgagcccagcgccgtggcgtcgctgatgtggcaggtgaacagatcgggcatttccggtgcgtctctgccgcccttctgggcttccttgaggaagccgccgatcttggaggcactgctgagattggtcacctgtacccggacgcccttctcctgccccacggtacggttgaattcctgcaccagcagatccataggcgagccggactgctcgccgtaaacgtgccagaagttcagcgtcaccgggtcgctctcccgaagcagggacttctctccgcagccggagagggtaaacacaagggcggataccagcagcagggaaaacagacgctttttcatgggaaaccctccaaaatcgagaagctgttcataaatcagcggtatttttgaagcttttcggtaaaatttagccttcaggaccctaattcggagaaattagggttaacaaaataagagatccatgctatacaaaaagtgaggtaaatttgtcaaagcggggcggcagccgctgcccggcttcaaattcatacactttattgtagcacaccccacggcgtttttacaaggcgaaaagcgggaaagaagggggaaatacggatggttcaggcgaagaaaacggccgcctaccgggtcatcgccggtcccggcggtaagcgggtctttcggttctactgcgacatttccggtgagctgtgctgcgtgaccaagtccattcgggcggatacggaggacgaggcactggagatcgcgtgggagacggaggggcggtgggcctttgaccgatgcccccaatgcggccggtatgtgtcctccgccatgttcaacatcaacgcggagcggtgtctggactgcgccccctgggagaacgaataccctgtgttctgccaccactgcggcatcaggctgaaagacccggacgccttcttctgccccgcctgcggggcgcggctgctggtgggcggcacagaggaagaggagggaaggaccgaatgacggagtatgacctggaaaccaaaaaggccttgcgccgggtgtcccttctggaatatggcttcgggccggagactctgcggggacgcaagatctgcccggcctgcggcaggggcaacggcgcttaccggacagactgtatctcctgcggcgcagcgctgccaaaggagaccctctatgacttctaccgcgcccgccatcgctgctgtcccggctgcagtgtggtggtcacggacgttgcggtgtactgtcccgaatgtgggacgcggctgtctaaagagacgggagcaaagggggcgtctggatgagcattttc

SEQ ID NO: 12219 - DNA, 1786 bp, Unknown
  gut microbiota DNA sequence
ggatatcccccagcgccacatagtagtgccggtcaaacaggaaaccgttcagatacagcgctttttcccctacgccgcaggggccgaagtgcttgcagtttttaacatccgcagtcaggatttccgccggtagggcggtgctgccgagacgcacaggcgcaaataacatagtgttcctccgtgatcgttcattgatagcttcaaaagcggcggaaaggagagagtctttccgccgctttcggattgattacttagagcttacttgcccagagtttcgtattgaggcttcacgtcgcgcttcttgatgctgtacaggaagatgcccaggaacagcgcggcagcgatgatgccgacgggataagcaacagcagtgttgtaaacaaccgcgccgtcagcagtcttatggttcaggaactggcccaggcactcgttgcccagcatgaagtaggtgatggacacagcgctcatgaaggtagcggggacagcggtgatccagtagttcttcttctcatagaagaggtacatggaagcggcccacagcacgatcatggccagagtctggttggtccagctgaagtaacgccagatgatggtgtagtcgatcttgcccagagcgttgcccacgcccaggatcgcgccgatgcccagcacggggatgcagagcatcagacggctcttgatggacttctgctcaatgtggaaccagtcggccagcaccagacgggcagaacggaaggccgtatcgccggaggtgatggggcaggcaatgacgcccagcatagccagcgcgatgcccacgccgcccatggtcttggagcaaacgtcgtacacggtggtggggccgccgccgcccatggccagcaggtcagcgccggtgtagatggcgcagccggcagcagcccagatcagagcgatcacgccctcggacaccatggcgccgtagaacacgaaatggccctgcttctcactcttcatgcagcgagccatcagggggctctgagtggcatggaatccggaaatggcgccgcaggccacggtgatgaacatgaagctccagatgggcgtgccctggggatgcatattggtgaagttgctccagatctcggggatggcatagcccttggtgaagatgcccacggccacgcccacggccatgatgatcaggcagatgccgaacacggggtagatcttgccgatgatcttgtcgatggacatgaaagtggcaatgaaatagtacaccaggatcacagccagccagaacagcttgttggtgaggataccggtgctgccgccgttggtgaacagcagctggatcaggccggcggggccaacggcgaacacggtgcccaccatgatcagcagcacaacgctgaacacgcgcatgacgttcttcatggcgccgcccagatagatgccggagatctcggagatcgaggcgccctcgttacgcacgctgagcataccggagaagtaatcgtggacagcgccggcgaaaatggtgccgaaggtgatccacaggaacaccacggggccccacagcgcgccgctcaaggcaccgaaaatggggccgagaccggcgatgttcagcagctggatcataaacagcttccactggggcagaaccatgtagtccacgccgtcgttgatcttgacggcgggcgtctcacggtcatcgggcccgaaggtccgatccaccagggagccgtagatgaagtaaccgccgatcagcagtgccagacagagtaaaaagctaatcatcttaaacgctccttccaaaaacacgttt

SEQ ID NO: 12220 - DNA, 845 bp, Unknown
  gut microbiota DNA sequence
ttgtcaatcctgaaaaagaaaacggtggaatttcaggcgttccgctgaaatatatttcattttccaaaagcccttgacggtggatgcttgacttgctatattatgtgcgtaaacacaaatgtgcaaagcacaataaacgagaaggaggggcctatgatttttcagaaatccgcctgcattgagacactgtacacggaactgccctttttagagcggtttcgcgccgccaaggccgacggcttcgattttgtagaattctggagctggaccgacaaggatctcgccgccgtgcgagatgccgcggacgatgcggggatcggcatttccggcttcaacggggacgcggagctgtccctcatcgaccctgcccagaaaacggcctacaaggcctttctgcggcgttctctggacgccgctatggagataggggcaaggtccgtcacggtccactcaaacggcctgggggagggaggaagggtcctttgcccatacgatgacctcagcgatgctgtgaagctctgcaccatgttcgacacgctgaaaatcgcggcggaatgggcggaaacttgcggcgtccggatcaatctggagccgctgaacgtcaccacggaccatcccggcaatttcctccgccatacccgcacagcggcggagctgacccggctcatcggctccccgaagctgaaagtgctgtacgatgtgtaccacatgcagctcaacgagggcggcctgtgcgaccatatccgcgcctacgccgaccagttcggccacatccatgtggcggacgcgccgggccgtcacgagccgggcaccggggaaattcactacccggcggtgttcgccgc

SEQ ID NO: 12221 - DNA, 12011 bp, Unknown
  gut microbiota DNA sequence
ctgccgtaaagtccgccgcggacgctgccggggtcggcatttccggcttcaacggggacgcggagctgtcccttatcgaccctgcccagaaaacggcctacaaggccttcctgcggcgttctctggacgccgccatggagataggggcaaggtccgtcacggtccactcaaacggtctgggggagggaggaagggtcctttgcctctatgacgacctcagcgacgccgtgaagctctgcaccatgttcgacacgctgaaaatcgcggcggaatgggcggaaaactgcggtgtccggatcaatctggagccgctgaacgtcaccacggaccatcccggcaatttcctccgccacacccgcacagcggcggagctgacccggctcatcggctccccgtacttgaaggtgctgtacgatgtgtaccacatgcagctcaacgagggcagtttgtgcgaccatatccgcgcctacgccgaccagttcggccacatccacgtggcggacgcgccgggccgtcacgagccgggcaccggggaaattcactacccggcggtgttcgccgccttggagcaggcgggctaccggggcctcatcggctacgagctgttccccaaaaccgacacgaaaaccgccgtccgggccatcatgtcggactgaccgatattgcagaaggagaggaccttatgtcagattacagcgcttttttcctgatgaagccggaggatgtgaagcggtacgccgtggacgtgctccattttttccagccggaggaggaaaccgattgcgttgagatcggtgacggcaacatcaactatgtctttcaggtccggtcccggaaggacggccgctccgtcatcgtaaagcaggcggacaagctgctgcggtcctccggtcgtccgctggatctctaccgcaacaagatcgaggcggagaccctgatgctggaggcccggctagctcccaaattcatcccggaggtctatcattacgatgagaccatggccgccctctctatggaggatatttccgcctacaaaaatctccgcaaggagctggcggcgggccgggtctacggccatctcagcgaaaatctctccgattttctggcccagtccctgctgcccaccacggatctggtgatggaccggcaggaaaagaagaagcaggtcaaattcttcaccaatccggagctgtgcgacatcacggaggacctggtgctcacggagccgtatctggcccagcccatgaacccccggaacaagaatatcgtcacccccggcaacgaggacttcgtgcgggagcatctctatgaggacgaggccctccacggggaagtcgccgccctgcggaacggctttatgaacaacgcgcaggcgctgatccacggcgacctccattccggctctatttttgccaatgagcagggcatcaaggtcatcgacccggagttcgccttctacggccccatgggctacgacatcggcaatgtcatcggcaacctgtttttcgcgtgggccaacaaggcctataccggcggcagcgccgaaacgcagaccgctctggagcaaaccatccgggagacctgtgacaaaacggcggaaaagctggcggcggaatatgacaagctggtgaccttcccgctgtactgcgcttccgccttccgcaaggcctatctggacggcgtgatggcggactcctacggctacgccggtacggagatcatccgccgggtggtgggcgattccaaggtgatagaggtcacctccgtcacggacccggcccagcggctccccatggagcgcgccctcattgatttgggcatctatctcatcaaaaaccgtgccggcggcctcaacggggcggctgtgacggaggaattccgtaagatcttggcagaggggaggggcacacatggtcagaatggatgaaaatatgccgtttctgctgcaatatgaaaacgttgcgtggtacgaaaacggcaaggtccgcattttagaccggcggatctaccccacggaggtccggttcgtggagtgcgctacctatcaggaggtggtgcaggccatcgcggacatggtgacccagagcgccggcccatacaccgccgttggcatgggcatggccttagccgcgtggcaggtgcgggacaagggcgctgcggagcaggatgccttcttgcagcaggcggcctatgatctggcccacgcccgccccaccaccgccaatcgctacggccagatcacctatcgctgcgccgaggtggccaaggaggcgctggcggcagggaaggaccccgtggaggccatcgtggagaacacggtggaatccctgaaccgccggtattccaccatgcagatcgtgggcgaccatctggcagagctgatcccgcaggggggtacgattttgacccagtgctttggcgagaccatcatcggcaccgtgatccgggccgcccgctgtcagaacaaggacttcaaggtgttctgcgccgagacccggccctatctgcagggggcgcggctgacttccggctgcttcgcccagatgggctttgataccacggtcatcaccgacaatatggtggcctacgccatggagcgggagggcatcgacctgttcacctccgcggcggacaccatcgcccgggacggccacatcgccaacaagatcggcacgttccagatggcgattctggccaagtattttggtattccgtattatgtcaccggcatccccgatcaggacaagcacagtaaggatgacatcgtcatcgagatgcgggacccccagcaggtcctcagctatcggggcatccccaacaccgtgccggaggtcaaggccatctatccctccttcgacgtggtgccgcctcacctcatttccggcgtggtcacggataaaggtgtctatgtgccctatctgctggatcactattttgattctgatgtaaagaagttctattaagaccggaaggagagacgcgccatgctgatgcaggaagagagagaactggtcgttgaatacggcaaaaagatgagcgccgcccggttgagcaccggaaccagcggcaatatcagtatttacaacgctgaaaaaggcctggtggctttgagcccctccggcatggattatttttccaccaccccggaggatgttgtgatcctggatctggagggcaaggtggtggacggtaagcggaaaccctccagcgagtgggctctgcacacaacgttctataagcataagccccacgcaagagccgttgtccacacccactccgtctactgcacgacgctggccgtactgggtgagcccatccgggcagtacactatgtgatcggtgacgcaggcgcggcggaagttccctgtgccccctatcagctgtttggcacagaggcgctggcggaagcggctatggaggtctgcggcaagagtgatggtgttctgctgggcaaccacggcctcgtatgctgcggcaaggatatcaagggtgcttacggcctcgcctgcaatctggaatacatcgcggagatccagtgccgcgccatgagcattggcaagcccaatgttttgacggaggagcagatggctgaggtcatggtgaaattccagtcctacggtcagcccggtgcgaaaaagaccggatattgaggggagcgttacgatgcggaactttgatttttacagccccacctacttcgtgttcggaaaggaccgggaggcggagaccggcaggtatgtcaagcgcttcggcggcagccgggtgctggtggtctacggcgggcagtctgccaaacgctccggcctgctggaccggatcatggcctgcctgaaggaagaaaacctgtacgccgtggagctggggggcgtaaagcccaatccccgcagcggccttgtgtacgagggcattgacctctgccgccgggagaagatcgacttcattctggccgtgggtggcggcagcgtcatcgacaccgccaaggccatcgccatcggcgtaccttatgacggtgatttctgggactttttctccgggaaggtgccggagcaggctctgcccgtgggcaccgtcctgaccatcgccgcctccggcagcgaaggctctccggattccatcatcaccaacgagaaaaccctagagaagaacggcgcggaagccgactgcctgcggccctgcttctccgtgctggaccccgcccttacggaaagcctgcccgcctaccagaccgcctgcggcatcacggacatcatggcccacacctttgagcgctatttcaccaatacgccggacgtggaggtgacagaccggatgctggagggcgtgctgctggccatgctccacgagggccgccgggtcatggatgatcctcacaactacgaggcgcgggcaaacatcatgtgggccggtatggtgtgccacaatgacattatgggcgtgggccgtcagcaggactggaacagccaccatttggagcacgtgctctccgccaagtatgactgcgcccacggcgcgggtctggcggtcatcatgccggcgtggatgcactactgcgcggagcacggcggcgaaaagcgtctggcccagatggctgtccgggtctttggctgccaaatggacttcgacgatcccaaacgcacggcgctggagggtatcgaggccttccgggcattcctccggtccatcgggatgcccctgacctttgccgagatcggtgcagacccggcagatatcccggagctggtggagatgaaccacatcggcgacggcaagaccggcggctatatcggtctggaccggcaggctcatttcgacatctacaatcttgccgccgggagctgcgttcccgaaaaataaatggatatgacataagtgccgcgagggcgctcctgtcaggagcgccctcgcagtgttctttgctcctgctgctttgtgaccgctaaagctaatgtataaggtatacaaggtccgggttacttaccgtttacaagctattagcgtatacacaaatcagaaaagtgtgttcgttgcgaagctgatgaacggatcgtcctcgcagctttggcgttcccaatgcgccttgcttcataaagaagcggaagaccttgtatcgtaaggctttccgcaaaagcgccgcccgtgctttggtaaaaaatccgaagcatgggcggtgttaaattttgtcaaaatttatcttgacatctaaccgtgatcagagtaccataaaaccaacttttttggatttaactctttaatccaaaaaagcgtacgtcatgtaaggagagacgagaggagaaacactatgtacaattttgcactcgcgtttgtgatctgcggcgtcgtgtatttcatcggcgaagcagtctcaaacctgacgaaggcctggatcccatcggttttcgtcaccgccgccgtacttctggtaggcttctggactgttattcccaccaccgttgtaagcgactccatgctgatcccctttggcagcaccatcggcatttacctgcttatcacccacatgggcacggtcatttccatcaagcagctggtatcccagtggaagaccatcgttgtgtgcctggctggccttgccggtatgtgcgcgctgtgcctggtcattctgcccggcattatcggccgtgacctggtggttgccggtctgcctccgctgaccggcggcatcatcgctgccaccaccatgaagacagctgcggaggctaatggccttaccgaagccgccatcttcgccatcgctatgtactgcgtgcagggctttgccggctatccccttaccgctgtctgcctccagctggagggcaagaagctgatcaagggctatcgcgccggtgagtacaagctggaaagcgccgtcagcgatgtggacgccgtcaacggcaagctcaacaacggcactgctgaggagcacaagaagctgattccccctctgcctgccaactggaacggccctgtggtcatcctgctgaagctgggcatcgtgtcctggctcgcaacccagctgggcaccatcgtgatccccgtcatcaacatgaagatcagcggcgctgtgtatgcgctggttctgggcgtcatcttcaccagcatcggcttcctggatgaaaacgccatcaataaggccaactcctatggcattatcatgttcgctctgatgatgtatgtgtttgacggtttgaatggctgcacccccgagatgctcggaaacatcatcggccccatgatcctcctgatcgtggtgggcgttatcggcatggtcattctgtgcttcatcgcgtccaagatcctgaaggtctccttcctgatggccaccgccacggccttgaccgcactctacggtttcccgcccaatgccatcatcaccgaggctacctgcaccgctctggcgcagaccccggaggagaaggaattcctgatgagcaagatgttcccgcccatgatcgtgggtggcttcaccactgtgaccatcacctccgtggtaatcgccggcatctttgccgaaatgttctgatccagtcatccgcaaagctgtccggctctttccgccggacagctttgttcataaaatcagtcttgcacattcagaaaaaaccgctacaataaagctaccacagattatatgaagaaaggatcatgtgtattatggatatcaaagctcttgcggaacagtacaacgattacatcattgatcgccgtcggtattatcacacctgcccggagctctccggcgaggagaagaacacccgcgcccatctgaaggaggatctggaggcactgggcatcaccgatattcacgagttggagacctgctacggcctgaccgccaccattcacggcggcaagcccggcaagaccgtggcgctgcgcgccgatattgacgccctgcctgtcaaggaggagaccggcctgcccttcgcctcccacaacgagggcaagatgcatgcctgcggccatgacaaccacatggccatgctgctgggcgccgccaagatcctcaacgaggtgaaggacgagctttccggcgacgtgcgcctggtgttccagcctgcggaggagaccgccgtgggcgctctgcagatgatgaaggagcatgcgctggacggtgtggacgccatttacggcgtgcatgtctggggcacctatgacgccccgggcatcgctttccccgccggtaacctcatggcctgctgccacggcttcaccattgaggtggagggcaagtccgctcatgcttccgctcctcacgagggcgtggacgctgtgatggtggcaagcgccattctccagtccatccagcaactggtctcccggatgaacgatcctctcaacccgctggtcatcaccgtgggcaaggtcacggccggcaaccgctggaacgtgctggccggccacgccacactggagggcaccgtgcgtaccttcctcaccggcacgcaggtggaggacgcgctgcgtaaggtggccgagtgtaccgctgcagccttcggcgccaaggcgaccctgagctatcagtacatgacggagcctgtcatcaacagcgatgagcagctcaaccgcattgcacagaccgccgttaccaagctttacggtaaggaatccctcattacccccgcacccctgatgggcagcgaggacttctcctggtttggcaaggacggcaccccctatatctacggctttgtggccagccacaataaggactgggattatatgtacggcaaccatcacgagaagtacgacgtggacgagacgatcctccatcgcggtgccgcggtggccgcgcagttcgccgctgactacctcgctgagaccgcacagcagtaattcagctgaggaaggagcggaccatggacatcaaagcattggcacaggacgctgccccttatgtggtggagcgtcggcattactaccatcagcatccggagctgaccggggaggagaagaacacccgggacgccatccaccgggatctggaggcactggggatcaccgatatccgggatatggtcaactgctacggtctggtcgccaccatccacggcggcaagcccggcaagaccgtgggcctgcgggcagacacggacgcgctgtccttccaggaggagacgggactgcccttcgcctcctgcgaaccggggaaaatgcacgcctgcggccacgatacccacattgccatgctgctgggcgccgccaagctccttcaggagcaccgggaggagctgcggggcgatgtgcggctcatcttccagccggcggaggagcacgtcatcggctctaaggctatgatcgcagagggtgcgctggacggggtggacgccatcttcggccagcatgtctggggcacgctggatattccctatatcgacgttaccgccggtccccgcatggcctactccggtcgcttcacggtggatgtgctgggtacctcctcccatgcggccacgccccatctgggcgcggatgccatcaccggcgctgcggcgatcatcaataacctccagcagtatgtctcccgcatgagcaaccccctggaccccgtggtgctcaccatcggaaccatctccggcggcaatcgctacaacgcgatcgccaatcatgtcaccatggagggcgtcactcgtgcctacttcctggataagcacgaggaggccatgcggcagatcgtggagaacacggcggagggtctgggcatgaaggctgtgctcaagtatgcccatgtggtgcatcccgtgatcaacgatgacgatgacctcacagagatcgcccagaaggccgtggtcaagctcttcgacgaggagacgctctgccatatgcccgccatgatgggcagcgaggacttcgccaattacgctgcggaaattcccgccgtgttcggcttcatcggctgtcgggacgaggccaacggcatgatctacaacaaccaccacgaaaagtttacggtcaacgagtctctgcttcccaagggaaccgcgctgatggcgcagtttgctgtggattatctggccggcaacgcgtaacaaagggcaaacagcaggggggagggaccctttccgaatggacccgctccccgccaaaagacggcgaaagaatataaaaaacggccagcagccaaagcgctgctggccgttttttatgcggcacggcggggagaaaagacttttttgacacgataagaggggaggctgtcgataaagaggtagattctccgcgacggtaaggaagggtgtgcgcgggaaacccaagaagggatacaccgtcggctcaagccaaacagcgaatcctgcgtatccagcgtgaacgcatccttcgtgacgttttgcagtccgatgcgctccatttccgccttgagcatatcgccggtggcaagctccgcgtcggagcctgctgtccggtagccaagcgtttcgttgctgcggatgtcctccagcttcagcgccagatcataggcgtaatccacgtttaccgtgtcgagataggcttgtgtggggtcagccgcgggctgtgcggcgtccgcagcgggctgcttgccgcaggcagtcgcggataccagcagaaatcctgccagcagtgcactcacgattctctttttcatgttttttctcgcctttgcagtcatagaccggcggaagaacgaaaaaaagccacagacgcacctgcgcccgtggcttgaaacatccaaacagagagaattacccttttccgcatagaccggggagcaccgtgcatgcagtccattttatcactcttattgattaacaaaaggcgcacacctcttccaaagcagtttgggaggggttagcctttttccttattcccctggtttcgtatatactcggtaataagttcgtggctgcgttcactcacagtgcaaacaaaataagaacgattccagagatagggtttccaatagaacggagcaaggtattcggcgaattcttttctgagtagtcttgccgttaccgtcttgtaggaacagaccagggaggacaaagccacttgaggcggtgcctcgaagagaatatggatgtggtccttatcggtgtttacctcattcacgtagcactggaagttctcctcaaagatacgatacgtcagttctgtgagccggtccttaaaggctccgtctatgaccggatgcctgtattttgttactacaaccaaatgatattccaggtcataacaactgtgtctattcgttcgatagctcatgtttacgccctccgcatgtcgctttacaaccaattcttgttatggtataataataccataatcaaaggcatttagcaacaggaggtgaaagcgtatggcaaagatagtttcaagctattgcacgaaggtcattggcgaaaacagaatcttcaaagataccattcgggtttatcgcgatgcgctttctcttcttatccgcatcgtagagtctgaatgggataccggtcttggagagctctatgcgaagtccacgctcaaagcacagaggacagttgaactgcttgttcatgcaagccgtacgagtgttgccaagtatcctgaattcgacaaacagttctataagtaccccagttacctgcggcggtccacgatttccgaggcgcttggcgccgtatcttcgtaccgtgctgctgtttctcattgggagagtgcaggcagaaaagggaaagaacctaaactccagacctctcgttcagctatgccgactttctacaaagacaatatgtacgaagacaacggtgatgggactgcccgtctgaaactttatcacaagaacgactgggtgtgggtaaaggtccggcttcgcaagcaggacactgactatatccgggaacattgggataaggccgatgcttccgcgcctaaactcgtgaaacggaaccgccgttatgccttatgctttgcctttgaagaaacggttgcttacggcacgaaaccactcacagaccagaccattcttgctgttgaccttggcattaacaccgacgctgtgtgcagcgttatgcgtccagacggaactgtcctcgcacggaagttcatcgacttcccgagtgaaaaagaccggctgaatacgcaattgggccgcgcacgcagaggtcagcgagagaatggtcatcgaggcggcaaccgccacatgaagaaggctgttcgcatcaacgaggacttgtccaagaaaatcgctccggcaatcgttcggtatgccgtttctgttggggccgacatcattgttatggaacatcttgacttcatcgggcaaaaacccaagcacaaaaagcagcggctccacatgtggagaaatcgcgacattcagaaaatcgtcatgcatcaggcccaccgcaatggaattcgtgtgcgttttgtcaacgcacgaaacaccagcaggttggctttcgatggttctggcgaagtagcccggaatagtaccaacatggcgctgtgccggttccaaaacggaaagcagtataactgtgacctgaatgcgagttataacatcggcgcacgctactttatccgagaatacttaaaacccatcccggaaacggaatggtctctaattatggcaaaagttccagaattagagcgaagaacaaattgcacattatccaccctctttagcctctacgcggtgctgaactgtcaaacagtttcagtttctgagtcttggccgcacggtggaaatgagtctggggcctaaagccccggaagcaccatccatggcggtcacgcttgggtggtgaggtttactcgtttacaagttgtgtgcgccagaacgtaataagcaacttaaaaacttgaactcttccgctcgatcaataaggcaacaaagttgccaacccgcacccgcggtgcggtccccggctcttcgacgggttttcggcatttgacccggccgtccgtgtagcctcgatccctcgtcggagggatggtcaagacgtgcatatgcacaggcgttctgaaaaagaacagggcaactttaacacactgaaaataaagatgtcaagatttttttgcag

SEQ ID NO: 12222 - DNA, 1218 bp, Unknown
  gut microbiota DNA sequence
tgcatagctttccgcatccgaaggcctcttgcataaaggctacaaaaacgttgaaattttgacttagtaatttggtaacgaattaccacgctaaagcgttgacaaatgaaaacgtccctgttatgataaatgccatcaaaagggcggcaccaacgtcccgaaaccaacagaaacgagggcaaggatatgaaaaaggcaatggcaattttgttggcggctgttctggcactggcctgcaccgcctgcggcggcagcaagaatggggagaccaaggaccgtctggcgcagatcaaggaaaaaggctatatcgagctgtgtaccgagccctatttcgccccctatgaatatgtagaccccaacaagagcggggaggaccagtatcagggcatggacattgaggtggccaggtacatcgccgacaagattggcgtggacctgaagatcacggccctggactacaccgccgttctctctggcgtggccgacggcaagtacgacttcgccatctccgccatcgcctatgccccttcccgggcggaggccatgcggctcagcgatgtgtactactcctccaataccggctatggcttcatcgtccggacggaggacattgacaaatataatgacctggattccttgaaggatgccgtggtcatcacccagagcggctccgttcaggaagcgctgtataaccagtatatcaacggcgcctgcaaggaattcaagctggtggccaacatgactgacggctatctggccgtggccgagggcaaggccgatgtgtgcatctgctccactgcctccgcccagctgtacgccgatgccaacggcggcatgtccatccccgactaccgctttgaggtggaccccaacatgaacggcacctgcgtggccatgcccatggaggggacggaatctctggcggagctggtgaaccagtgcatcgccgagctgaaggaaaacggccagacggacgtctggtacagtgaatatgaagagcaggccgcggctctgggcatcgaataagcggcaaaatcggttttaggagcggaatcccatggaaaaggtcatcaaggtttggttgaaatattatccggtgtacctctcaggcctgtggggcaccctctggatctcggcagtcaccgtgttcctgggggccctgctgggcatggtggtggccctcatgcggatgagccgcctgaagatcctccggaccgt

SEQ ID NO: 12223 - DNA, 1311 bp, Unknown
  gut microbiota DNA sequence
cctttttcagatctctggacatcaggaagaaaaaggcgcagaccgcatacatgaagcctacaacgccaatatcagtttttttcatagtgccctccagttcgcactgcattgatgcggaaaaataaggcgggagcaaccaccggctgctcccgcacaaaatggggatcagtcgccccaaacgtcggccagactttcagtgaagtcctgctgctgcttgatcagagcggcggtgtctgcgctgttcttatagtcagtctccatcccagcggcctcggcagccttgagatagtcggcgtcctccatcagcttctggaaggcatcctcatagaacttgatcacattctcgggggtgccggcaggcgccacgatgcagcgggaggaacccagccactggtcatagtaacccagttcgcccatggtaggcacgtcgggatagccctccagacgctcctgattgtagacggccagaaccttgacctcagaggtgaaggaagcgaagtccgctaccttggccacggagaagtccacctcgccctgacggagcgccagcagctggtcggcggtgccgccgtaaggaatgtcggtatattcaaagccggcagaagtagccagaacctgcgcaccgatgtggttagatgcccggttgccattggtggaagccttcagcttgccggggttgtcctttgcgaacttcaccagatcctccagcgtgttgaactgggagtccgccttcaccagaaccacggaggtctccgtcacatggttgcagatgggcgcgaagctgtccacggtatacgttgccagaccctcggagatggtggcgttaaagttgggcaggttgatgaagcccagcgtgtagccatccggggccgcctgagagagggccgtccagccaatggagccggagccgccttccaggttttcaatgatgaccggcttgccgatgtacttttcagcataggcggccagcacacgggcggtgttatcggttccggaacccgctttataggatacgatcatggtaacattttccttgggggtccagttctcatctgaagtggagggctgatcggaagtgcccggatcagtcttggcgctgccgccgcaggcggtgagggccagtgcgagcgtaccggccagcagaaggctcaaaaaacgtttcatcttcatagcaaaacttcctcttttcctttcttaactcccctgaaattcgattgacattcgtttttcccaggggtccggatcatatgccgttcaatagcaggtgcacctatcggattgggcatattgcctatattcagtcaagcatac

SEQ ID NO: 12224 - DNA, 2897 bp, Unknown
  gut microbiota DNA sequence
ggtgacaccgtctccaccggcggcttcgttagctgcgcctgccccgaggcgctgaccaaggctctggaaaaccgtttcgtggaaaccggccacccccgcgacctgacactgttctttgcagccggtcagggccaccgggacggcaccggcggcgaccacttcggccacgagggtatgtgcaagcgggtagtcggcggtcactgggaccgcgccgccaagctgggtgagctggctctggccaacaagctggaggcctataacctgcctcagggcgtcatcacccacatgtaccgcgacattgccgcccacaacatcggcaccatcacccacgttggcctgaacaccttcgtagacccccgtcacgagggcggcaagctcaacgagtgcaccaaggaagacctggtgaagctggtgaacattgacggtgaggagcgcctgctctacaagcccatccccatcaatgtgtgcctggtccgcggctcctacgccgatgaatacggcaactgcaccgtccaccgcgagatcggtcctctggatgtcaccgcccagtgccaggccaccaagaactccggcggtatcgtcattgttcaggtggagaagatcgtccagggcggcaccctggacccccgcctggtgaagatccccggcatctatgtggatgccatcgtcgtgggctctcccgaggacaacaaccagtgcctgggcatgccctatgacggagctctctccggtgagttccgcatccccgtggacgatatcccccccatccccatggacgccaagaagatcatcgcccgccgggccgctatggagctgcctcaggacgccatcgtgaacctgggtaccggcgctcccgagaagattgccaacgtctgcgctgaggagggcatctccaacaagatgactctgaccgtggaagccggctccatcgccggtgtgccctacggcggcacccagttcggcggcgcagccaactccatggccattctggaccacaacgtccagttcgatttctatcagggcggcggcctggacgtggccttcctgggcctggccgagaccgctcccaacggcgacctgaacgtctccaagtttggcacccgtctggccggcgctggcggcttcatcgatatcacccagaacgccaagaaggttgtttactgcggcacctttaccgccaagggcctcaagaccgagtgcaaggacggcaagctggtcatcacccaggagggtgccaagaagaagttcgtcaacaaggtagagcagatcaccttctccggcgattacgccaacaaggtgcaccagcccgttctgtacatcaccgagcgcgccgtgtttgagctgcggcccgagggcgtgacgctggtggagatcgcccccggcattgatctccagactcaggttctggatcagatggagttcatgcccaagattgccgatgacctgaagctcatggatgagcgcatcttccgtgaggaactgatgggtctggctaacgactaaacatccctctaaggggggagcgatccccccttagtccccaaattaattaggaggataacaaaaaatggcattgatgaccccccaagaatacattgagtccctgcggaagctgaacacccgcgtctatatgttcggcgagaagatcgagaactgggtggatcaccccatgatccgcccctccatcaactgcgtggccatgacctacgctctggctcaggatcctcagtacgctgagctgatgaccgtgaagtccagcctcaccggtcacaccatcaaccgcttcacccacctgcatcagtccaccgaggacctgatgaacaaggtgaagatgcagcgtctgctgggccagaagaccgcttcctgcttccagcgctgcgtgggcatggacgccttcaactccgtcttctccaccacctatgagatcgacgagaagtacggcacccactatcacgagaacttcaagaagttcctgacctacgttcaggacaatgacctcaccgtggacggcgctatgaccgaccccaagggtgaccgttccaaatctcccagccagcaggctgatcccgacatgtacgttcatgttgtggagcgccgtcccgacggcatcgtggtctgcggtgccaagtgccaccagaccggctccatcaactcccactggcacatcttcatgcccaccatctccatgggcgaggctgataaggattgggctgtcagctttgcctgccccaccgacgccgagggcatgtacatgatctacggccgtcagtcctgcgacacccggaagatggaagaggacgcctctatcgacgtgggcaacgccaagttcggcggccaggaggctctggtggttctggaccatgtgttcatccccaatgagtacatcttcctcaacggtgagtatgagttcgccggtatgatcgtggagcgcttcgccggttatcaccgtcagtcctacggcggctgcaaggtgggcgtgggcgacaccctgatcggtgccgctgctctggccgctgagtacaacggcgtggagaaggcctccgccgtcaaggacaagctcatcgagatgacccacctgaacgagaccttgttctgctgcggcatcgcctgctccgctcagggctttaagaccaaggcaggcaactaccagatcgacctgctgctggccaatgtctgcaagcagaacgtcacccgcttcccctatgagatcgtgcgtctggcagaggacattgccggcggcctgatggtcaccatgccctctcaggtggacttccacagcgatatggttgttggccggaacggcgagaccatcggccagatctgcaacaagttctttgccgctcgcgagggtgtttccaccgagaaccgtcagcgcatcatgcgcttcatcgagaacc

SEQ ID NO: 12225 - DNA, 10932 bp, Unknown
  gut microbiota DNA sequence
attttgcaccaaaaggtgcctgttttgctacttcatcctccgatagttccgctaagtgaggatagtattttcaatacatcttgctgcgtaagtagctagccgggcgcctttggagggatcaaagctggagatccccttgataagtccaatggtcccaatggagatcaggtcatcctgatcggaactttgcgcatagtatttcttcacaatatgtgccacaaggcgaagattccgctcaatgaggacattccgggcctccgggtccccctgagccagacgttccagccacatcctttcctcactggcggaaaggggccggggaaaggacccgctgcggtccagccgcagagaaaataaaagcgtattggcaaacagcatcagcgcggcagagatcatgcgcaccacctcctgttcacctttatgacaggaagggaagtccctatgtcttgcggcggcggggacggcgtgttaaaatgaatggcagagactgatggcggctgcagagagactgctctgattttttcatgcggcggcagctgctcccgttgacagatgacgccaacaggtgtaaattacataccggtttctataaaaaagagcccctaaaacgaaagtacagatcacgtgctctggagatcaggctcagggtcttgcttttcagtgcggccatggaccgaaaactgcgggggcattttaattaggagcgaacgcaacatggggctgggagaataggagcactgacctcggtgcactggcggtgcgccggccggggtttctgttcttattgactgcggatgcctccgggcgtatgctcgttgagaggcgcagaaaggtggaatgaacatgcggtataaggagtttggaaaaaccgggatgaaggcgtccgagatggcgctgggaacctgggggatcggcggagcgggctgggatgacaatccggaagagacccgtattgatgcgatctgcgccgcagtggaaaatggtgtcaattttattgataccgcaccggcctataatgccggtgcagccgaatgtctggtggggaaggcgctcaagcagagcggaacgcgccaaagggtcatagtggcaacaaagtgcggaaatttctacatgggaaatgggacgtatgttcgtgacggacactatgacaaaatcattcagcagtgcgacgattccctcaaaaacctgcagacggattatatcgacctgatgctgattcattggccggatgtcaataccgactttgctgagactgctgacgcactgaatgcgcttaaaaaatccggtaaggttcttcatatcggtgtttccaactttacaagggagcaaatggaggagatcggacagtattgtacgttggaagcctatcagccgcagtactctatggttgtccgcacaaatgaagaacagatgaagtgggcggctgaacagggcatgggcgtcatgacatacggatctctgggcggcgggatcttaacaggagcattccggaagctgacaacctttgaagccacggacagtcggaaccgtttttataagcatttccaggagccgatgttctctaaggtcatgaaggtcctggaagtcatggatcggatctccgctgatcgggataacgtgcccctgtctcaaatcgcactgaactggtgtgcacagaaggaatttgtttcttcctgtattgtcggcgcacagagcagacggaagatcgaagaaaactgcgctgtctatcagtggatgctgacttcggaagaaatcgccttgctggacgcgacgatcgagcagtatctggtgaagcaataagctaatagtgaagaactgagggagaggggactttcgtccgatccgaaaagcttgcttttagggatcgaaaccgtttggaagccttctctcctgaacgatatacaagtggtacagctttaaaatgcatattgagaaatgatgatcattgccgcaagcgctgtgcaaatagcacaaaaaatgttaaatatttataaaaattctcacaattgaaaaacaagaaatagtatgatattttaaaaaggatcaatttggattgtttgtgatttttttcgcattccaatccattactgtggcaatcgtccggtttggccaaatgcggcttggtccgcaagatgggactccatagattttggttaaaacattctcttgtaccggcgcaaagtctgttgagattttgatgtttttacatgtttaaatcagtgctcgattcggagcactcttttaaccccctgtttcgtgcacgaacacggaaatggcaatgagatacgatatgtgaggtcagtgtaatggtaaccgttgaaatggtggcaaagatggccggtgtgtcgcgtggaaccgttgaccgcgttctccaccatcggggagaggtcaagagcgaaactgccgagagagttcgacaggccatgcgcgagctggattttcagccgaacacattgggccgagctttttcaatagcgaaaaagagaaaccggatcgggatctttctatcagcgcgtgaaccggactttcaagaacagatcaagcagggcatagaagacggtgtcgcctatgcacagcagcatggaatcgaagctgtgatcgaagtggtttctccggatgatgagctgctgtatttgcagaagatcgatgagatgatcgcttccgaggttcaagggatcgttttacgcgggatcgagtccaaggcgtttgacgaacggcttcagatcctgaagaatcagggaattcctgtttttacgtataaccaagatgtgcggccggcactgagaaactgctatgtgggcattgactcctgccgcgccggaaaatgtgcggcgcttttgatgcggcagatctccccacctgacggatacgccttgatcgtgggcgtaacgccccagcataaggacagcgaaaaacggatagagggatttctggagcaatggggccttgccccaaaggcatcgtcaggataccggatcatttatggagaaggctatcatgatgttgcatacgctcgtacgcgggatgccttgaatgagatgccgaacatcacgggtatcttcgtcagcggcgcgggcctgagcggcgtagcgcaggcggtatacgaacgagggaccgccgatgttcaaaagattgtggggtttgacgccacacagcgaaatattacctacatgaagaatggtacagtccaatttttaatcgatcaaagtccttatcagcagggatataaagcggtccaactgcttgtagattatctgtttgaggggcgagcgcctgatgtgtcctgttattatctcgacgcacatatcaaaaatgctttcaactgctgagtccaaaagaccttggcgggcaaaggctgcctatccgtacatgaaggcgcaggggggaggcgtgattttgaacgcttcttccttcgcagcgctggaccccaatgcggggcgggcaacatacagtgccgcaaaggctgccgtgaaaaatctcagcgcatccatggcggcagagtttgcggccgccaatatccgggtgctggcctatgtgccgggtatgatcgcaacagagatcgctgcggagagcattgagaagtacggtgatgcgctgttggcggacatcccgtgccgccgcttcggtacgccggaggacctgggaaaggtattggtgtttttggcctcggatgccgcaggctacatgaatggctgtcatgttgagatcagcggtggaaagcgctgtgtgcagaatcctcagttttcctatcaataagcgaaacaacatatataaacgtgtaagacaggctgtccgtttagggcagcctgcctcgttttttgcttggaatatagctcttggcgatatactgacgatcttaatgacgcaggagaatgtttcacggagaagcgcttggttctcgttgtcccttatgcttttggcgtcggagtggttctgttctgccaaatcagccaacctgctcctgttccatcaccgcgtcgatcgatatggctggaccgggccgtcgatgtccgccagagccttttctataacagcgggaaggtcctccggcttggcgtggatgtttgccacctgaggcagggctttccattgcctgaaactgagactctgcggcgtccagtaccttcttgccgacgatgatggcggcctttatgacgggaagggaaatccctatgtcttgcggtagcggggacggcatgttaaaatggcagaaaagggggtgggagaatggcctggtatgtctatatgctccgctgcggggacggcagcctgtacaccggctccaccaccgacgtggcccgtcggctccgggagcaccagaacgggaccggggccaaatacactcgcgcccggcctccggtgtcgctggcctacacagaggaggctccggaccgctccaccgcccagcgccgggaggcggctatcaaaaagctgccccggaaacggaaattggcgctgatcgaaggaggtacaccatgaacctgaaaaaacgcttggttctgggagaaaatggtagtagcgctggtaagctattgggccgcattaccggaatcggcccgggcagatacaacagatgtggaggcagtgtacaggcactatgccacgaagcgggaagaatgacagtcctgtgataataatttttaaaccgtctgtgttcctgtgaatgatggcggcctgccgacggaacaggttatgacagcggatatgaaagaaaggaaaatgtgagagttatgagaagaaaggatcgtgaagtcagcgctgagcaggcgtgggaaattgtggagcgctgctcctatggcgtactggctatgacaaagtcggacggaacaccctatgccgtgccggtgaattttgcacgggaggggaactgcctgtatattcactgcgcgcaggccggtgaaaagacggactgtctgaaccaccagccgcaggtgtgtgtcacctgtgtggagggcggcgcatgggtggaccagccggccctgaccacgtgctacgcctccgcagtcatgcttggcaaagcggaggaactgacggatgaggcggacaaggtaaaggcattgcggttgctgtgtatgagactggcgccggagcatcccagaagccatggcgatttttcggagtgccggggaaagacagcggtctggcgcatcaccgtggaacagatcaccggaaaggcgaatccgggaaggatggaatgaaaaaaacggtgccatgagcaatgctcgtggcaccgtggcttttattgagaaatctgtttttctaccggggcctttcgcttcggcggaaagcccagaagacagagaagcgcacccaaaagggaatggaaaatcggtttttgattccactttatgatccgatagagaaacggcctgagaaccgagtatacattccctacatctacaaagaaggcgatacaaacaaagagtgaggacaggataccgcagagaacaatggccaaaaggccccggcgaagacagcggacccacggcttttccgggagcttgactgccgcggcgagagacaatacttgtaccagcgaccagcccagaagcaataagaatacgggccgcaccacatacatcaaagctgcggtccaacgcgggtcatagtggaagctttggatatcctgggctgtgggcaggaaaaaccgatacagcagatagatgaccgcagtcagcccacagcctgccgcagcttggatcagagcagtttttcgtccttctggcaccggcgggccatagaggacagcgttggcgtctgtatcaaaaatttccgctaaccgcaggatctgatccacatcgggccgggtgcggccattttcatagttggaaactgtctgctgggtgacaaacagctgctctgccagttcctcctgcgtcagatgcttttgctgacgcagatcccggatgttttttccaatgtcacgcatcatgcctcacctcaccgtcagtctatcagaagccgggagaaatgtcacgcaaggaatcctttccatggtgcgctttcaatggaaaaagcttgctcagttcgcccggaggtgaatggagatattttccaacccgtaaaatggctcggcggcggtgggggtcagcccctccagcacatcagactcgtacagtgtggagaccgtcttgaagcagatgggcaggatgggagcctggctctgcaggtaccgacacaggccccggaacgctgcctcccggtttcctccggagcggcagccctccaaaagctgatcgcactggagatcgctccatccaccgtaattgagactgccgccggtggcgagcagggaggaaacgtcccagtccgccgttagccgtacctcaccgtaataaaggtcaaagcggccagcggccagtgcggcggtgtattcctcccaaggcagctccacggtttctgtggcagcgccggcagctgtaaatgcggcggcgatctgccgggccatggagaccttgaagctgttttcgctgttgaccagcaggcgcagcgtgcggctgggccgggtctcacaggcattcagagcatcggtgaaggccaccacagaatctgtctgctccaagtctgccggatagagaggggatgccggagaaacggggaactgcgctgccttagcgtggccggaaagcaagctgctcaccaaggccctgcggctgacgcccagagaaaggcagcggcggaacgcggcatcgtccagcccctttgcggagacattgacccccagatactgaaacacggtggtgtcggcatcatcgtagctgacgctgccggaaacggcaacagggtccgtgccggtgagatctgccacgatcagctgcacatcccgggaagaaaagcggtagagcatggactcctgatccgctgtaccggtgagggagatccgttccaccggttgactgatgtgccgccaccagttctgactggcgatcagacagctttcgctgctttcgtcatagaggtaaggaccggttcccagagggacgctgtgcttctctgtgctggacttcagaatgggaatgtccagcagagcgggcagaccggtattggggcggttgagggtcagggtcaccgcaccgtccccggcggaaatgcttttgacatccgacagccgtctggcgtagcgggcagagctgcgggcggcggtgagggtggccttcacgtcggcggcggtgaggggagatccgtcggaaaacaccacgccgtcacggagggtcagcttgtaggtcagtgtttccgaatcgtaggtgtaggatgcgcacagcagcggctggggcgtgaaggtttgatccagccggaacagtccctcataaaggagggaggccaccgtctgctgaacgccgtcgggacaggtgaggggattcagaggctgcccctctaaatagggcagggcgaacacggcgggcagaccgctgtgttcttcctctacgggggtctcctccgacggaaaaggcaattcatctgcggaggattcgtcgatctgggcgcagccggtcagaagggagagggtcagagtcaggaccgccgcccaagcggtgattcgtttcataggccctccttcagagaaatgacggccacttggacgcctcgctgatcgcccattttccggtgcgaccagaacaggtcggggcggcaggcggtgcagctgccggagacctcgatccgctccggcagcagaccggcgcgcagcagccattggcggttcagtccggccagatccacatggaatttagggcctttcactgtgatataggcgttggcaatcgctcccagcgcggcccgcatggcctccggaacatccccatcggtctcaaagcagcaggggccaatgcagggacccagcgccgccagcagctcggcgggacggctcccataggccgcactcatggctgccacagttttctccacgatcccggcggcacagccccgccaaccggcgtgaacggcaccgatggcctgatggacaggatcgtacagcagcacggtgccgcagtcggcggaaaagaccgtcaggggcagaccggggacgttggtgatgagagcatccacatctgtgtagtcccggggacggagcagacccttcccggcgtcctctgccgtgacggtgcggatgttggctgtgtgggtctgctgactgaggaccgcacgggtctcgtccaggcccaaagcggcgaaaaagcggcggtaattttcccgcagcttttccgggccgtccccctgtccggggcggaggttcaggctgtcccacggggcgggggacacgcctcccctccgggtggaaaagccgtgagggacatcattcaaaacatcggcggtgaaccacaccagaccggtttgctcatgctgttgaaagggcatagttaacctcgcttgttctcttaaaaaatgccctctggaaagccagagggcagggatatgatattttctggagttcccgttcccctttcggcagtgggaaagggaaacgggaaactgatcaacgccgcagggcggcgcggcttgcacgggatcttacagatccgggtgatactccttgcaggtgcacttcttccacttcaagccgctgccgcagggacagggatcgttgcggccgatcttcacggtctttttcacgggctgctttttaggcgtggtgccatcgccgcccacgttttccacggtggccttggcgacccgctcccgcttgacctcctcgtctttccgcagacggacggagtacagccggcggacggtctcatcctgaatggcggagaccatttcctcgaacatttccagagattcccgcttgtagacgtccacggggttgttgttgccgtagccctgaagccggacgccctgcttcagatcgtccatggcgtcgatgtgatccatccagtattcgtctaccacccggagcatgatgacacgctccagctcccgcatgataggcgtggtgacctcctgctccttggcctcataggtcttttcggcggcggcgatgaacgcctcgtcaaagtcctcttgggtcttggaggaaatttcctcgtcggagaattccacggcgcccttggcgaagtagataccctccatgcccttgagcatctcgtgatactgggcggcgtccagctgctgattttcaccgaaggccagtgccacatggttgctgacggaggtgtgcatcatgtttagcacggtctccttgatgtccagaccgtccaacacctgacggcgctgggcgtagatgatctcgcgctgcttgttcatgacgtcgtcgtattccagaacggacttacgggactggaagttgcggctctccacggtggtctgggcgttttcaatggcccgggtcagcatcttgttttcgatgggggtatcctcgtccagatcgaatttctccatcatgttctggatgcggtcgccgccgaacagacgcatgaggtcatcttccagagagatatagaaccgggtctcgccagggtcgccctgacggccggcacggccacggagctgattgtcgatccggcgggattcgtggcgctcggtgccgatgatgaacaggccgccggccgcacggaccttttcagcctcttccttgatgatggccttgtgataggccatccgctcggcgaacagcttccgggcggccagaatatcttcattgtcggtgtcagcgtagccggtggcgtccacgatgacttcctcagagtaaccggccttcaccagatcggcccgggagaggtactcggcgttgccgcccagcatgatatccgtaccacggccggccatgttggtggccacggtgacggcgcccagcttaccggcctgagccacgatctcggcttccttctcgtggtttttggcgttcagcagattgtgctgaatgccttccctttggagcaggtggctcagcagctcgttcttctcgatggacacggtacccaccagaacgggctggcccttctcgtggcactccttcacctgctggatgaccgcccggaacttgcccgcctcggtcttatacacaacgtcgtggtggtcctcacgctggttgggacggttggtggggatctccacaatgtccagattgtagatggtgccgaactcctctgcctcggtcatggcggtaccggtcataccggacagcttatcgtacagacggaagtagttctggaaggtgatggtagccagggtcttgttttcactgttgacgttgacgtgctccttggcttcgatggcctgatggagaccgttggagtaccggcggccgaacatgagacggccggtgaactcgtccacgatgatgacctcgccgtccttcaccacgtagtcaatatcccgcttcatggtgccgtgggccttcaacgcctgattgatgtggtggttcagcgtggcgttggagggatcggacaggttctccacatggaagaattcctcggccttggcgataccggaggcggtgagggtggccgtcttggccttctcgtccacgatgtagtcggcgtcgatgtgggagtcctcttcctccttgtcgtccacctgcacgacgacctttttcttcaggcgggagacgaacatctccgccatatcgtacatctgggtggacttttcgccctgaccggagatgatcaggggagtacgggcctcatcgatcaggatggagtccacctcgtccacgatggcgaagctgtggccccgctgcaccagctcgctggagtagatgcacatattgtcgcggaggtagtcgaagcccatctcgttgttggtgccgtaggtgatgtcggcggcgtaggcgtctttgcgctgctgagcggtgaggccgtggatgatgaggcccaccttcagacccaggaagcggtggaccttgcccatccattcggagtcgcgcttggcaaggtaatcgttgactgtgaccacatggacgcccttgcctgtcagcgcattgaggtaggagggcag

SEQ ID NO: 12226 - DNA, 171 bp, Unknown
  gut microbiota DNA sequence
tgccaccagggtcttgccctcgccggtcttcatctcggcgatccggccctgatgcagcacgatgccgcccaccagctgcacccggtaggggcgcatacccagcacacggtccgcggcctcccgcacggtggcaaaagcctccggcagaatgtcatccagggtctcgccgtt

SEQ ID NO: 12227 - DNA, 1020 bp, Unknown
  gut microbiota DNA sequence
tccacgcagagggcaacggtgcgctgggtgacttcttcctgcatggcctatcatctcctttctccgctgccgtataggtcgtggttcaccagggacgcatagtagctgtcgatggtggccgaggcgttatacagggcagccagcagatatttcttgatgttgcggacataggtggtgttctcccgcatacggtccaacacatactcgatgtgggaactgttcagcttcaggaaccgggatttgaccacctccgccggatagtcgtccccggcaatgcggatcgtctccctgcgggaacagacggtgtccaccatgagctccaccaattcattcagcatatctcggtccagccggtcatcccggcatagatagtcatactcgatattctccaaaatgagttcccgatagctctctcgctcccgcatccagtcccgtccggtccggttagcccctgcgggggtttgggggcttgattggataggatttgatccttccgtacttggtgaatcagtattttgttcttcaggatttcttttttctttatttaattgcggccggttttccagacatgggttatccatatccgggttttccgtatctggacaagccgtatccggctcgtcctcacacggctggcccgtatccgggggatggggcgtctcgtagatgacatactccacatccacgatcttgcctttgctgtcccggagccgattgcggactatgtatccggctcgctccagctccttcagggcggagccaatgctatccgtaccctccttgcagattttagccaggcccctggtggtgtagttccagttctccggcaaggacagcatcatggagagaagccctttggatttcagtgacagccccgcgttgcgcaggtggtgattggacatcaccgtgtagtcgcgggttttctcaatgcgaaataccgccatcttatcacctcctttcggcggtctggaaaagtgtttgttttcgaggaaaagacggcctctatgccgcccagatgcc

SEQ ID NO: 12228 - DNA, 2110 bp, Unknown
  gut microbiota DNA sequence
atgtcaaccattgtgtatcaaaggcactcgttgtaaataaccccgcgcacactctcttcgttctggaagatttgtccggtatccgtcatgccccggagcgtgtcaaaacgaagcatcgctatgtttctgcatcgtgggctttctacgacctcgaacagaagctcatctacaaggcgaaacagaaccaatcttccgtaatcaaggtcgaccctcggtataccagccagtgctgtcccgtctgtggacacacagaacaggcaaaccgcaacaaaaagatacatctgtttacctgtaagaactgcggctacaagtcgaacgatgaccggatcggcgcaatgaatctgtatcgcatgggaatcaactatctctatgatagccaagtacctgatacagttgcggcagagtaaactttgccgcaaagggtgctgtcaaccaccctacgatgtaacgccacttgagacagcaatgtctcttggggttaaaggtcggaggagctatccgttactacgactgggcagttacaagcccatggccttttggccgtgggttgttgactacagcacattcaaagcacaaaagcaacccgttttctaggcaattattttttattattccaaaatttcgcacattttaaacgattgaacaaaaaaacggaacagatccgaaaggacaacagggaaggggggcgaccccggaacggaggaatatccatggcacgcttactgatgaaaaacgcatcccacatcgtcacctgcgaccccagcgacaccgtgtacaccgacagcaatttgttgatggaggacggcgtcatcacctacatcggcccggaggaacagcaggcggaggaggtcatcgacgccgccggttgcatcgtctatcccggcctcatcaacacccatcaccacctgtaccagaccttcagccgtaacctgcctcaggtgcagaatctggagctgttcgactggctgaaggccctgtacgagatctggaagaatctggacagccgggtgatctaccacagctccgtcaccggcatgggggagctgatgaaaaacggctgcaccacctgcttcgaccaccattacgttttcccgcaggggcaggcggaggggctgctggacgcacagttcgccgccgcggaggatctgggcatccggatgtacgcctcccgtggcagcatggacctgagcaagaaggacggtggcttgccgccggacagcgttgtgcagaccgtggacgagatcctgcgggattgtcagcgtgcagtggagacctaccatgatccgtcccgattctccatgcggatggtggcgctggcaccctgctcacccttcagcgtttccgaggagctgctgcggcagtccgcaattttggccagagatctgggcgtgcggctccatacccacctctgcgagacgaaggacgaggagcgcttcgtccgggagcggtgcgggatgcggcctctggaatacatggaatcccttggttggatcggcccggacgtctggtacgcccatggcatccattttaacggggaggagctgcgccgtctggcggagaccggtaccggcgttgcccattgtcccatctccaacatgaagctcagctccggcgtgtgccgggtgccggaaatgctggaattgggcgttcccgtgggccttgcggtggacggcagcgccagcaatgacggctccaatctgctggaggagctgcgggtggcctatctgctccaccgtctccaatccagtgaaaaggctcccagcggctacgacgttctgaaaatcgccaccgtgggcagcgcgaagatcctgggccgggacgacatcggctctctggaagtggggaaggccggagacctgttcgctatcgacacccggcgtctggagctggtgggggcggatctggaccccaaatccctgttggggaccgtgggctggaaaggcccggtggattacaccgtggtcaacggcaaggtcacggtccgccacggaaagctggtgaatctggacgaggaaaaagccgcccgggaggccgccgcactggtgcgggactacctgtcccgctgagaccggcctgctctatcctgcgttgaagctgggccatttggcaa

SEQ ID NO: 12229 - DNA, 11682 bp, Unknown
  gut microbiota DNA sequence
ccccagcctttgaacaggtgctgacctccacctatcagccctgcagcatgtaataagaaaaatgtttatgccccgtcccggatcattccggggcggggctttgtcttgacaggaccatacgggtatgttatggttggaacgtctccggaaagtgtttctgaccggcgacaccatgcccgcataccgttctgccggtgaggatgctccgaaccgaaagatgaggaaggataagatcgctgtacatttgtcatcccctctgctgaacggcaggggggatgtattactttatgagaaggagagaccgctgtggaagctgtggaaacgcgggtggccgtcattgccatcattgtccgggagggcacgcaggtcgcggtgctgaatgacctgctgcaccagtacgggccgtatatcgtggggcgcatgggtgtaccctaccgggagaagggcgtgaacatcatcagcgtggccatggatgcccccggtgacgtcatctccgccttgtccggcaagctgggccgcttggagggcgttaccgccaagaccgtctatgccccggcagggagcgtatgaaaggaagaaaagccatgaactggaagaaaaaactgttggcgctggggctgtctctggccctgaccctgtccctgactgcctgcggccagaaggccgccgaaccggagcagccggaggaacctgcccaaacggaagagcctgcggccgaagcgccggatggtacagaggcagacattgctcatttcagaattgccgccctgaaaggcccgactgctatgggccttgtgaagctgatgaaggacaatgatgaaatgaccggcgcactgctgagctctgccaaaccctacgagggtgaggtgggcaatctttacaccttcacgctggccggttccgccgacgaggtgacccccgccctcatcaagggggagctggacatggcctgtgtccccgccaatctggccgccgtgctgtatggcaagaccggcggcgccgtggaggtgctggccgtcaataccctgggcgtgctgtatatcgtggaaaatggggaaacggtgcagtctatggcagatctgaagggtcagaccattgtggccgccggtaagggcagcaccccggaatatgcactgcggtatctgctgacggaaaacggcattgacccggacaaggatgtgaccatcgactggaaaagcgagcacagcgagtgcgtggcggcactggcctccggccaggcggccatcgccctgctgccgcagccctttgtcaccgtggctcagacaaaaattgagggccttcgcatggcactggatctgacagcggagtgggaaaagctggataacggctccggcctcatcaccggcgtcatcgtggcccggcgggacgtggtggaggccaatcccggcgcggtggacagcttcctccagaattacgccgccagcgtggagtgggtcaacgccaacaacgcggacgccgcccagctgatcgcggagtacggcatcatcgaggccgcccctgtggcggaaatggccctgccctactgcaacatcgtctgcatcaccggcagcgagatgaaggacaaactctccggttatttgcaggtcctggccgacgcggagccttcctccgtgggcggcactctgcctggggatgatttttactacggcggataaaaacggaaaatccgagaaggcagagctacacttggcctatatctgaatttacgatagaaaggagcgccgcctatggacaggaaaacagacctccgcctgtgggcggtggctttctggctggcggtctggcagctggcggccatggcgctggcggcggtctatccccacggtgagctgctgctggcgtccccggtgaatgtgctgctgcggctggggcagctggccgtcaccgccgccttctggcggacggtggcctggtccgccatccgcatcttcggcggatttctgctcgccacggtgttggcggtcgcgctggcggctctggcggcctggaaaacctggttccgggggctgatggcacccttagtggcgggtatcaaggcggtgccggtggcgtccttcatcattctggccctggtgtggctcaacagccagagcctgtccctgttcatctcggcgctgatggtgttcccgccggtgtacctgaatgtgctggagggtatctgccacacggaccgtcggcttctggaaatggcccgggtgttccgggtcccccttgggcggcggctccggggcatctatctgccgcaggtgatgccccatttccgcacggcggtatctttgggcctggggctttgctggaaagccggggcagcggcggagatcatcggcctgcccgccgggtccatgggagagcggctatacaccgccaaggtctacttccagacggcggatctgtttgcatggaccgtcaccatcgtggcggtgtcagtggtatttgagcggctgtttttggcgctggtggaccgactgatgagaaaggcggggctgtgatggaagtcaaaaacctatgcaaagcctacggagatcgtccggtgctggaaaacgtgtcttttaccgtcggtgtgggagtcacggccctgtgggggccgtcaggcgtgggaaagaccaccctgctgcggatcctgttgggtctggaaaagccagacagcggtgaactgatgggaacggccgtccgttggagcgccgtttttcaggaggaccgcctgttagagggactggacgccttgggaaatctccggtttgcgctggggacggactacgaggaagcgaaagcggcggccatgctcacggcgctgggcctgacctgggagacgggcaagccggtgcgagagtggtccggcggcatgaagcgccgcttggctttggcccgggcgttgctggcagtatcagacgccgtggcgctggacgagccgttcacagggctggatgaggaaaatcgccggagagcagtgctgtgcgtcgccgccgcggcggaaaccaagccggtgattttggtgacccatgaccggacggagctgaacctcctgcgggcgaatattgtaaatctataagtaagaaacccgccgctgacaaaagtcagcggcgggtttttgctggattcaatttccaaaaccgttttgcttaaggtggcggcgcatatcggcaagggcccacaccagactggcgcccagtgcgatcccaagggcataaagagcggtctggcgggcaaagtccgccgacagatccatgtcctgctgaacggcatagtacatggcgtaatagaggggccgccccggcaccagcgggatcagcagcgcggggatcagaaacagcgtggcgggcgcacccataaaccaagccagaaactccgcatacaacgcggcaaaggcggcggcggtcagggtggggagcaggataccggaccagatcgaggcggccgccagatagacgccgcaggtcagcagaccccccagagaagcggcgaacatataccgccgacgcaggtggaacaccagacaaaaacccagcgccccggtaaaagatgtgagaagctgcacgatcacagtccgatccctcccatcagtaaaaaggcgctcatgaagcccatagccagcgccccggcccacagcagcgtttcgatgagccgcatggcgccggagatcggggagcctaccatggtgtcccggacggcgttggtcatggccagaccggggatcagcagcatgatgtcaccgatcaggattttgtcggcgtggagctccggcaggaaaaaggcgcacagggtaatgctgatgccaacagccagagcggagagcagattgaataccaagcggttggggcactgagggccaaagtgccgctggaggcggcagatcaccaagccaaacagggcagccaccagaccatccgtcatggaaccgccgaaaaacagggcgcagcttcctgcggccagcgcgctgcccaggtagaccagcagtggcttgggggtttctgccgtgatctgggcaacttcccggcgcagctcatccagcggaataggatcggcgcagcaccggcggctcagatcgttcagcgcttccagaacggtgaaatccgtgccgccgggagtcaggatccggcgggtctgggtgatgtcccgcccgctgggcagcgtcatggttaccacgatgctggaggtgatgacaaaggcattcatccgaacagccccgtaggccgtgcccatacgggtcagagtgtcctccacccggtttacctctgcccctacggccaaaagcgcttccgcaatgtccatgagacagtgcagcaggacctccggctgcgccgggacagggatcttatctgcgttcacgtcactcaaaagccgaagagcatagagcgatcaatgtcggccaggctgtgagcaccgcacatggccatggtgtccgcaagctctgcctgaagcttgtccacataggcctgcacgccttcctgagcgccgccatagaccgcggtgacgaaggggcgggcgatgagcaccgcatcggcacccagggccagagccttgaacacgtccatgccggagcggatgccgccgtccacaaagaccttcatcttgccgcccacggcgtccacaatggcaggcaggacctcagcagtggcggggcactgatccagcacacggccgccgtggttggagacgatgataccagcggcaccggcttccagggcctttcccgcacccttcaccgtcatgatgcccttgaggataaagggcttgcctgccatggcagcgatgtccttgagctgatccacggtcttgctgccggcggggggagtcatccccttcaggaaaggcagaccggcggcgtcaatgtccatggcgatggcgcagggatcagcggccttcaccagatccatcttctgccggatggtgtccagattccagggcttcacagtgggaacaccgcagccgccgttggctttcagggcatccgcagcgccttccatgacggcgggattggtgccgtcaccggtgaaggcgaggataccggctttggcgcagccctccaccagtacattgttatagcgcagatcgtcatatttgtcgctgtaatgcatagccacggcaccaacggggccggccattacggggatcgtcagcttgtggccgaagaaatcataagaggtgtccacatcaccgttttcgcagatggtgtccatattgacgcacagttcctgccatttctggtagttgcggatggcgccggtgcccagacccttggcgccgggaccagggaccgtgtttttgcaggcgaggccgttgcacacagggcaggcgtggcatttgcccatgcaggtccgggcctgctccaaaacatcctgataagtcattgcagtttcctcctgaatcgtatagctttgtaaaaatcccgttaaagatcaaacatattcccgattggcctcattttacagcaggcggcagaaaaatacaagtcggtaaaatgttgagagcggcggaactttttggcgggaatttcgtctatataagtagaagagcggcacgaccgctgaaaaggaggaagcgctatgaaaagaaggttatttgtctgttttcttgcactgaccatgctcctgagcctgactgcctgcggagccgccagcaaaactgcggcttccgttgattccagcgccaacgaccaccctgcggaaagccccgccgtgacagaggagaagggatatttcgacgctgacaccaacggctatgatgacgagggccgggacagcggcggaggtgttctggaaaaccagaagatcatctacaccggggacatcaatctggagaccacggagtttgacgaggccgtcaaggcgctggcagcactggcggaggtcaagggcggctatctggagagcagcaccgtaggcggcgggagccggggctaccgatgggcggattataccgtccgggtgccctccgctcagtttcagagctttctggatcaggccggggagcttgcccatgtgacgtggcggaacaccaatttggaaaatatcacagagacctattatgacacggcgggccgcctgaagacccagcagatcaagctggagcggttgcaaaagctgctgtcccaggcggaaaacatggaggacatcatcactattgagtccgccatttccgaaacagagtggaatatcgaggacctttccggcaccctgcggcactatgacgcgctggtggacttcgccaccatcaacgtccatgtgtcggaggtctataagtattccgacacggaggaactgccggagaatttcggagatcgcctgagcagcgctatgagccggggctggcattcctttgtgaacggcatggaggacttcgccgtggcgctggcgtacagctggatgtggctgatcctgtgggcggtcatcatcgcagcggcggtggtcatcctgcggaagatccggcggcggaacgggacgaaaaaaccgctgttcaagaagaaaaacgatgtaaaaccggatgacaagtccggtgatacctgatagactaaaggcagcgggagaccgctgcctgagactgtcgataaagtagtaaattctccgcgacggtaaggtagggcagccgttagcggctatgccgctctacggatgccgcataccccttgcgggtaaagggtatgcgcgggaaacccaagaaggggaaacgggcgaagcgccgccagcggcggataaagcgagcctgtttcgaggaaggcccccggttttcgggggcaaagcacacggaaaccggctgggccgacggtgtattcctgcaccatgcggggagaaaagactttttcgacacgctgaggcagcgggagaccgctgccttttctgatattttaggagggatcgttatgaagctgacctggctgggacacgcctgttttcttttggaggaggacggctatcgcattgtactggacccgtataccggcgtggcggggtatccgcctttgcacatacaggctcacgccgttttttgcagccacggccattttgaccatcacgccacagactgtgtggagctgctgccagagcgggaaagcccgtttacggtccgggaggtagagacctttcatgatgaccggggcggcgcgctgcgggggaccaacacggtccggatttttacagccggcggcctgtctgtggcccatctgggcgatctggggcaccagctgacggtggagcaggcagcggccatcggcccggtggacgccgtgctggtgccagtagggggcgtttacacagtggatgccgccggagcaaaggcagtgtgcgatgcgctgcatcctcgctgcgtggtgcccatgcactaccaccacgcaccctacggcctgacggaggtggacagcgtggagccgtttttggagcagtggtcctcggaggcggtccaccacctgcaaggagcggcgtttgagctgaccaagcagactgccggggtcatggttccttcgttttgaagaatagctcttgacaaaacgatgaatactatgtaatatagttttgaaaactatattacacggcaatgaggtgaccgtatggtacagaacagacaggtgaccctgttaggggattccatcttgaaggggatccaggttgatctgggtgaccggcgctaccgtactcgtaatgagatcaatgtggaggcactggaatcggaatttcagctttccattcataatgacgcgcactttggagccacggtccgcaagggcagccgcttgctggaccggatgctggcccggaaactgccctgcgacatgatggtgatggacttcggcggcaatgactgcgacttccgttggaaggagatcgcggaggaccccacgggggaccatcagcccaacgtgccgctgccggagtttgtggagctgtaccgagagatgatccggcgggtacggagccacggtatccggcccatccttaccaacctgccgccgctggacagcgagcgctttttcaactggtggtgcggagatctggacaaagaggctgtgatgcgctggctgggagacgtgggcaacatctatgtctggcaggagcggtattcccgtgcggtggagcgtttggcccgggaggaaaatgtgccgctggtggatgtccgtggagcctttttggactacggccacctggagcagactctctgtgctgacggcacccatcccaacaccgttggtcagggcttgatcacaaaggcatttcaggattttggccgggggctgcggctggccggtcagaccgtctgacagaaggacaaaaatacgggtcggttttcaaaaccggcccgtattttttacagctttttgaagatgtggatgcggaaggatgcctgacagtccagattttccaacgcttccatccgctctacgcccgccttgggggttttccagcagtagggtgtcatacggaagagggattgaatatccgcctgatttgccagatggagggtgaagtccaccggaacgatggcctcataggtgaagccctcgtagggagtttctttttcctcgttggggtagggcgcatcgtagaggacccgcttcagctcccacagatggtcggcgccgggtaccacatagagaaaatggcctccgggcttcaggacccggcggaattcgtcaatggccaagggggagaagcagtccagcagcaggtctgctgtttcattcgcaaagggaagatgatagcaggaggccaccgcgaactccacctgcttttcccgtttggcggccagccggaggatggatttggagatgtcgataccggctatagcgggcgttttcccggcggcggtcagggctgcccggatgccggcagtgtagtacccctctccgcagccggcatccaaaatcaccggatgctcgcccacaagcggcaaaatctggctacaaagcgtatttaagagcggcatataatactctttggataggaaatcccggcgagctgccgacatagccttgtcatcgccgggatcggcggagtgcttctgattggggggcagcagataggtgtagccctccttggcgatgtcatagctgtgtcggtcagcgcagcggtagacccgttcctcccggtccagcggaccgccgcagacaggacagcggaacagagatttcatacgatccctcctatgcgttcagatcttgggtcacgtcatggatccacttgccgctgcggatccggtgcaggccgaagggaaccttcaaagcggattccgtggccatgatgaagcagaagatggcgatgggagcgtggagcaccagccccagcagcaccagcagcggcagggtgaagcaccacagggggagaacgtcgatcagcatggcgatccgcacatcgccgcctccccggagaacgcccacaatgccggtggtggcaaaggcgtggagcggggcagagatggagtagcagatcatcatggtcacgcagagagacgctgaggcggcggtcatggagaacagaggcagcacgtggggcttcagcacgagccagaacagcagctgctccgctattgcgacaccaaagccggtgcaaaaggccacaaaggtcagggcctgaccaatgggataggcgtttttgccgcccatgcccacctccttgccgacgatcacggcggccgccgctgccacgccgaagatggctaccgtcaccatcttgtcgatgttgcccgccacggtgtaggcggagatcaggtctgtgctgcccgccatgtggcccatgatgacggtgtagagtgaggtgccggtaccccagagggtctcgttcagcagcaccggcgtggagaatttcacaaagctgcggaaggtggccttgccgggccggagaatacaggtgggcatcaggggcatctgcttgcagcgcagggcgtagacaagggaaatgacaaattccaccacacgggaggagaaggtggcgatggcggcgccggtgatgcccaaggcgggcagacccagcttgccaaaaatcagaatgtagttgcctgcggtgttgcagacggtggaaatggcgaataccgtcatgccgaaacggggattctcaatgctctgttgcatcccgatgtagatggaggagagggagttgaggatataggaaaagcccacaatgcggatgtaggaggtgcccagttccaccagacgggcattgtcggtaatgagcatcagcacctgtcgggggaacagccccatggtcagggcgcagatggtggaaatacctcctgccacaaagaagccgatacccatgacccggttgatggattcccgatccccccgaccccagaactggctgatgagcacgcgggagccgctttgcagaccgaaaacgatgagctggatgatgtagatgggtacattggccacggtgacggcggacatctgctcctgaccgaccagacccaccatgaaggtatccatgaagccaagagaggtggtgatgaggttctgaaggaccactggcagagccagtgtaaagacccggcggtagaagccgggctcccggcgaagatagctgaaattcataaaatgaaattccttattcagaataataaatggaatccatgttttgtcagggcgtgtacctgacaaaacatactttgcggttcacaagtgtgcgagcgtagcgagctctccagaggggcgtctcttgcagctttgcggcaattcaccttctgcatagcagtgaaccgtgtggggaattctcaagggggagtctgctcccccttgatattttatagctttatagcatgggcatccggtgatcgtgatgattccggagggcttccgcacaggcgtcgatctcggcgaaggtggtctcggggccgaagctcagccggatgacaccggcagccacccgcttaggcaggcccagagccgacacgacctgactggactttccgtgatgacaggcggagcctgcggagacgcagatcccctgactgccaagatcgtttaccacattctggctgggccagcccgccatggaaacggacaggacatggggggccttgccgctaccgatgatctggaggtccggaatagcggagagcttttccacggcgtaggccttcacctctgccatgtgccggagtttgtcctccagatgatcgcagcgcagctccaccgccttggcgaagcctgcaatctgggcagtggcctccgtgccggagcggaggcccatttcctgaccgccgccgggcagcaggggccggggattccgaacccgggggccgatataaagagcgccgatgcccttgggggcgccgaccttgtgaccggagatggcgatgaagtccgctcccagagctttggcagagaaggggactttcaaaaagccttggaccgcgtcggtgtggagcagggttttttcgttgacagccttcaaacccttggcgatgtctgcaatgggatagatgctgcccagctcgttgttcaccatcatcacggacaccagcgccgtgtccggccgcaccgccgccagaacggattcggcggaaatgtcgccgttttgatccggcaggatggtcgtgacctcccagccctcctgctccagctgctggcagcagttgaggacggcgtggtgctccacggcggtggtgacgatgtggcggcccacatggcggttctgccagcaggcggcccggatggcccagttgtcaccctcagtg

SEQ ID NO: 12230 - DNA, 1653 bp, Unknown
  gut microbiota DNA sequence
tccgttttatatgagcttcatacaaatggaaaaacgaacaaaaagggggatggccagcggccatccccctttgctgcacgattcagaaaaatttaaacgcgcttccagctggcgccgtccttggtatccacgatctcgatgccctgagccttcagctcatcgcggatgcggtcggcctccgcgaagttcttggacttcttggcctcgtagcgctgcatgaccagcgcgtcaatggcgggatcgccctcgccggtgacggtgtagccgccttcggccttggcggtctgggccttggcattggcttcccgcactgctgcggctttttccagcagggacaggctcagtacctgatcgtagctgttcagaatggccagcttggtggcgtcattggtcttagccttcagggcatcatacagagcggtgacgcccatggaggtgttcagatcgttgcccatctgctggaggaatttctccttgtactccttgagagcagcttcatccacggtgccatcctctggattcagggcggcgatcttggcgatcagcttgccgtaggcggctgcggcgttgtccagattctcccaggagaataccaaagccttgcggtagtggctctggaggcagaagaagcggtaggacagaggatcataacccttttcctccagcagggacacggtgaggaactcacccttggacttgctcatcttgccgtggttggtgttcaggtgggccacatggaaccactgggggcaccagggatgacccagatagctctcagactgggcaatctcgttggtgtggtgggggaaggcgttgtcaatgcctccgcagtggagatccagatactcgccgttgtacttcatggagatgccggagcactcgatatgccagccgggatagcccacaccccacggagaatcccacttcaacgcctgatcctcaaacttggacttggtgaaccagaggacgaagtcgttcttgttccgcttgttggtgtcctcttctacgccctcacggacgccgacagccagatcctcctcgttgtggtcgttgaacacatagtagcgctccagcttggaggtgtcgaaatacacgttgccgccggcaagataggcgtagccggtgtccagcagcttggtgatgatcttgatatagtcatcaataaggccggtggcgggctgcaccacgtccgggcgtttgatgttcagcttgcggcagtcatcaaagaaggcatcggtatagtacttggccacctccatgacggtcttgtgctcccggtgagcgcccttgagcatcttatcctcgccttcgtcagcatcagaggtcaggtggcccacgtccgtgatgttcatgacacggttgacgctgtagccggaatagcgcagaaacttttccagcacgtcctccatgatatagctgcggaggttgccgatgtgggcgaagtgatacaccgtggggccgcaggtatacatttccacatggccgggggtgtgggtggtgaattcagctttcttatgggtggcggagttgtaaagatacataacattcatcctttccgggtatttgtttgacgcggacacgggacgaaaaaacgcctcccgcgccggtttggcacgagaggcgatcaaaaaaccgcggttccactctcattta

SEQ ID NO: 12231 - DNA, 6536 bp, Unknown
  gut microbiota DNA sequence
ctgtgtactgccgaagttctcggcgcccgcttgtcaaagcagcttatttgccgttttctgaggttgctaagcagtattctctgtgcggtccctttttctgctaatatgcagatatccctgtcggcaatttcagttgcaaacgctttccctcccccaaccacagcggggctttgtgcttccagcagaattgcgtccaacagaacaactacggtctcgttgggatgcatggattcatcaagtttcggttgtctaattgtattagattcgtcatcaacttataccacaagatcgtaatttcgattgcaccataaaatttatgagtgactcataaactgaccaatatctttcgctttcgttgtattcactctatgataggcacaacaagagagctgcaaggctcactatgaggttcattcgttcttcctcctaagaatctcatattggttttctttcagcatcgtttacgtttttaggatatggtcaagtcggtcaaagcagccccggactgccggggtcatcaggttgatgagcacaccgtccagcaaggcaaagattaccgtgccctcccgcaccacgcccagccccagaccggcccgccagcaaatcagcagagcaaaaatcacataggcaaaatccaaaaatatcttgcaggtgccatagcgcatacggacccgctccgctaccagcgcacagaacgcctcggcgggatagttggtgaagttgcagtttttggtaatggtaaagcccagactgatcagccccattccgcacaagaagcaaagcatctgctggagatacccttggggagcaaggtgctggaacggcgcaaagcggtagcggaaaaagttcagcagaacgccgtgagccaaaatgggaagcagttggaagcagcgctcccacttgaacttgctccgcagcatgagaatctggagcaaaaaaaacacgccgtacaggtaaatgctggcggtccccaccttgatcccggcggcgcccgcaatagcggaggctgccgccgtggaggtggtctgccccagtcccgcgataatgcccaatgtgacgcctgcgcacaaaactgtgacgcctgccagcatttccaccgcatgaatcaatcgttgtttcctctgaacagacacggagagcctccttgttataaggatgccggggctactgggatcaaaccagcggccccggcaaagcaattattatggtaaatcagattagaagccgatggcaatggccacgcccatggaaacgaacgcgaacaagaaatagatggccatcaagggcaggaagaacttgtaccacttctggacaggcaccttggcatagttcaggaaaatcatcagggtgccgtagctgaaccagaacatattggtgatgccatcgccgaactgataggccagaacagcggtctggctggtgaggcccagctccatagcgatgggaacgatgatgggagccagcagagcgcccttgccggagccggaggggatcaggccgttgatgaaggacaccagaattacgatgccgatagcggcggccagcgggggcaggcccttcagcagctgcgtggcgttataaacgatggtggcgttgatgttggcggagttcatgacccagtacacgccacgagcgaagccgatcaccagcgcgccgcccacagcgccgccggcgcccttaacgaaggagtttgcaatctcagagggatgcagcttacctacgatgccagagaacagcgcggaagccaagaaaacggcggatacgtcatcaatgccccacttcacgccgccgaagcccttctgcataccgatgacggtcataatcatagcggccaaaatgctcagcagcaccgccacgtggcggccggtaacggtgacgtccttgctggtgtccagcaccagatcggagacgtctacgccgtggactaaactctttgcggggtccttggcgatacggttggcatacaccacggtgtaggccacgccgatgatggtcatgatagcccacagcacggcgcggaagcccaagcctacgaacacgtcgctgtcagcggacagcaggcccatgttctgcaaaatgccgttgcacacgcctacggtgtagagattggtagggccggtaacgaaaccgcccatcagtccgatgatcagcacggcacaggccacgatgccgtcatatcccagtgccaggatcatagccaccaccaggggtgcgaaggggatcagggtctcgatccagcccaggaagccgccgatgacggaaaacagcaccatcaaggcgatcagcaggaacgtgcgggagccagagccgaatttatggaccatcttggtgatgctggagtcaatggcgccggtgctcttgtagatctccagcgcaccgccgatcaccagcaccaggatcaccagattggaggtatccttgatgcccatgggcacggcccggaacaggttgaatacattgttaaagttaaaggcgttcttgggcagagcggtataaacgccgtctaccagggtaccgggggtaatgatgaacgtgaacagccacgccacaacaactaccgcgaaaatcaggacaaaggggtttaggtttaagggtttcttctgtttcataggtttcttctcctctccaaatatcaaagctgcgtaaagcagggattccctatgggcgcagaaagcccggacgcttacttaggctcgttggccagtgtctgaactgccgccagatagcctacggtgccctcctccatcatggcaatgtcgatgctgtcccgggtggtatggcacagcttgatctctgccggagaatagcccagacacttgacgcccttggcggcatagtggccggtgtcggtggcgaaggcccagggcttggtctgaatctcgcgacccacggcgtcctcaatggcggccttgaccttctggatatagtcggcgtcagcgctggcgacgaagggattctcaccctgatagccgcgtccctccacgccggtataggtagtcagggggaagtagagcagctccgccttagcggtgacgccgtccacatggcagtttgcgatggcagcttccagctttcgctggacttcctccggggtatcgtccccgctctggcggtagtccacatagagcacgatctcattggggatgatattggtgccctcctcagaggaggtgatgcgggtgcaggacatagtggagctgccgaacagtccgtcgctgcccatggggaccttttgcagttccggcagcaactgggccagaaaatcgaagggattgtggcccacatggggaatagaagcgtggcaggacttgccggtaatggtgatgacgccgcagcagcgaccccggctgccgatggcaatgtcattctccgtagcctcacctacgatggcgtaatccgtcagcattcggttctcctgggtgtggaccatagcgccgtagccggcgatctcctcggagatcacagcggcggtgatgatgtcacccttgggcagcaggccggcttccttcagcaggaagggaacatagatctgaatggccatggtgcctttggtatcggaggcgccccggccccagacccggccctcggcgatcgcgccgctgtagggggggtaaggccacaggctctcatcaccctcgtagaccacatccatgtggcagttgagcatcacagagctgccgccgccggtacccttcatggtgccgaacacgttgccatagcggtccacctccaccttgtcgtagcccagttccttcatcttctcctgcacataagcggccacttcgccctcgtgcagagattgggagttgcgctggatcagctccgaagcggtatggacaatgtcgtccttgtacttcgcggcgatcgttttcaatacctcgttcatagcttcctcacttttcatgttttatgaagaccagctgccgtgggaattgtgtcccgcagcagccggagatcatgcaatagaacgcttagaccttctccagcgcctcatccaactcggcgatgatgtcctccgcatcctccagaccaatggagaatcgcagctgccccatggagatgcctgcggccttcatatcctcagggctgtaggctcgatgggaagtcttggccggataggagatcgtggtggcaaaactggccaggctgggcacaaacttaatcgtggagcactcacggattaaggcgctggccccctgctcgccgccggcaatatcggcactgagcataccgccgcagcggccgtccacaaacagcttggcggccagcccatgcgagggagaggattccagaccgggatagtaaaccttctcaaccttgggatggccctctaaaaaccgcgccaccttcaaagcgtttttagagtgctgttccattcgcagatccaaggtccgcagactccggcacagcagccacgcctccatgggacccataatggcaccgtacagcgtgaagcagcggtggatctgggcaatgttttccttgtcggacaccaccgcgccgccgatcaaatcgctgtgaccgcccaaatacttcgtggcgctgtagaccacaatatcggcgcccatgctcaatggccgggccacggcggcggtggcgaaggtattgtctaccacgagcttgcagccgtgggcgtgggcgatcccggcaatggcgggcaggtcattcacttccatcaagggattgctgatggtctcagtgtagaccaccttggtattggggcggatagcagcctccaccttggctgggtcatcaaactccacaaaggtgacctccacgccaaagcggggcagttcatgcttaaaataatcatatacgccgccatataggactggcgaggaaacgatgtggtcgccggcctgcatattggcaataatggcattgatgatcgccgccatgcctgaggaaaacaccagcgcaccatcagccccctcagctgccgccagcatttcttccgcggcatccgtactgggattggtcattctggagtacacatagccatcggcctctcctgcataaacagcatccagagagggcacgtcatcaaacgtgaacacactgctcatatagataggcagcacctttggaacagaaacactggattgaattttcttcgccagctccaaatcacctgtatgggccagctttgttctcatgtgactttctttcatgatggtcgtcccttctccttgttcattttagcataaaagtttggtggaaccccttgcttttttgtattataacaggtacattcttagaagtgaagcaactgtttttcacatagcgatatgagtaaaagtcattactcgagtggcgtacaaaaggcatttgtctgtattgcgtattgtgaacaggattgtacaggctctctgttcctgcctgaacagccgctatattttcaacagcaaaggagtcctgaacctctatgacacttcagcagttacagtatctggttgcgctggcagagagcaactcgatcaaccaggcagcccaaaatctatttgtctctcagtccggcatcagcaaggcgatcaagcagctggaaagtgaactgggctttcccctgctggaacgcagcagccggggcatcaccttcaccagccgcggcacagaatttctccatgacgcttacagtctgatcaaacagttccataccatgcaggatcactatctgcaaacggaacctcagggcatgattacaatgtccatcacctcccgttactatatttttgtagcgaaagcagttgcaaaaatggcaaatctattgaaggaacacaactattttatccgtcttcaggagggaaaagtcagcgatatcattcaggatgtggcagcccgtcggagtcagcttggctttatatcctactatgataccaacgcagagtttattcagcatgagcttgagcgcttcaatctggaattccacagtctttgcagcaaccagctccatgttttcctgtccaagaaccatccgcttgccaaagaacccaatatcaccctctccatgctcagtccttacccatatatcttctacgacggcggcaacgatccatacggctatactgaggaggtctttttccccgtacatccgcaaaaatccatcgccgtatcagaccgtagctccatgctgaatatcatccgccactcagaatgttataaccttggctccggctggctgttggaaggctacagcgaatccgatctcattacccgccccctctcccttcccgctgacacgaccatgcaggtcggctggatcaccaaacgcggatatatgctggatgccgaatgtgaacagttcctcaagttctgtcaggaagcccaggatgactgctgcaccggaagcctgtaaatttatccgatgtttatggacaaaaacgttccgaacggatgtgttttccatacagcgagctttaaaacaagcaatcttgacagcatcaaagcggcgtcgcagacgccgctttgatgacttccacaccgcaagactatcctgtgaaaacgcttctgagcgttcgcataccctgacccacttttga

SEQ ID NO: 12232 - DNA, 537 bp, Unknown
  gut microbiota DNA sequence
gtaatccgccttcgccactggtgttcttccttatatctacgcatttcaccgctacacaaggaattccgattacctctccggcactcaagacatacagtttcaaatgcagtttcagggttaagccctgagatttcacatctgacttgcatgcccggctgcacgccctttacacccagtaaatccggacaacgcttgccacctacgtattaccgcggctgctggcacgtagttagccgtggcttattcaagtggtaccgtcttctgctcttcccacttaaaagaagtttacaacccgaaagccttcttccttcacgcggcgttgctgggtcaggcttgcgcccattgcccaatattccccactgctgcctcccgtaggagtctgggccgtatctcagtcccaatgtggccggtcaacctctcagtccggctactgatcgtcgacttggtgggccgttaccccgccaactatctaatcagacgcgaggccatctttcagcgataaatctttggcatttcgaccatgcgatcaaaatgcgt

SEQ ID NO: 12233 - DNA, 632 bp, Unknown
  gut microbiota DNA sequence
ccttggtgggccgttacctcaccaactagctaatcagacgcgaggccatctttcagcgataaatctttggcatttcgaccatgcgatcaaaatgcgtcatgcggtattagcagtcgtttccaactgttgtccccctctgaaaggcaggttcctcacgcgttactcaccagtccgccactaagcattcctatcatttggccgaaacctcaatcaagggtgctccgttcgacttgcatgtgttaagcacgccgccagcgttcgtcctgagccaggatcaaactctctataatatggtatctaaacgaccgtagccgcttaaatcaatcatagagtcatttatcatgacttcatttacttctattttatagttgctgctttcggtcgaattgactacggcctattcacccacaacttcgtcgcgagcctcgtgaaaagctcgctccgctggtgctttcttttctcacgttgtttaatttacaaggtgcacgtccctcaagcggaacagtcactattatatcaggctcagtttcatttgtcaagcactttttcaaatctttttcagattttttctttccgatcttttcagatcttcaagcacccgactcattcacttcatcgccgtcaaacagctt

SEQ ID NO: 12234 - DNA, 8611 bp, Unknown
  gut microbiota DNA sequence
ttttcagatcttcaagcacccgactcattcacttcatcgccgtcaaacagcttagttagaataccagacgatcaaggaaaagtcaacacgtctttcgacggtttgttcacttttttccggctcccctaaaatagtttacataatgttattattttccgcacctagctaatgctgattatggctattatcatctgtgcttatctattttttaacgcgtttcgtcattttgccttatcaggtaaatcagctgtcaaattcatgtaaagggccggacactgtctttctgtgtccggccctccaaaaaactactttaagagcagcggttgaagctgttttccctccagtgctgcctctactgtttttccgatcagttcaaaatccgccgccagggatgtaggtttcttctccggatcatcctgtccgaagggcacaaagtaataatgcttccggtttaacagctccccgatgttcttggccgaggcggaaaggccgtcattggtggaaaaggcgatcaccacgggcctgccgcaccgcagatgggatttggccgccatggtcaccgttgtatcggtgatgccatgggccagcttcgccagtgtgttgccggtgcagggggcgatgaccagcacgtcgatcatcccctttggtcccagcggctccaccgacggaatatcgtagagtacctcatggcctgtcaattcctccagctgctccagcagtgcgtcggacgttccgaaccgcgtatccgtaaaagcggcgttctccgacacgatgggaatgaccgtcacgtattcttccgtcagccgtttcagcgctgtaagcgccttttcgtgggtgcagaaggacccgcacagggcaaaacccacccgctccgttctcataaaatgaccccctgttcttttataatagtataaaccgtgtcccggatcacggcccccgccgtcttgggcatcagctttcccggcagtcctctggcccagatacattccaatcccaaagcttcggcggcgctcaaatcgatcccctgaacggacgccacatccacgcagaggcactccggtttcaattcccgcaaacgatccgcaccaaatactggctccgggacggtgttgaccaccacgtcaaatgcgcccagatttccttccagccttccgatgtccgccgtttcgtatccatacgccctggcccatgcaagactttccggccgcagagctgccgccgtcacatgggcgcccatggccgtcagccggtggcacagcagctttccgatgcgcccaaagcccagcaccagacaccgactccccagcagcgaccgttccaagcgttccaaaatcacctggactgttccctccgccgtggcggcggcattggccactgtcaattcttcgcgtcggaaatagtcgacaagcttcaggtccaactccgccgcaagggctgcctgagcaggcttcacctgtcccgccaaaatcagctgatcccgccgaagctggcggaacagcgcccccgcgccccgccgcgggccttctatgttcagggtatccccctccttgcacagcggcagcggcaaaatcaccacctccgccgctacggcagcgtcccaatccatttctccggccacgccgcaggccgccactgtgtatccgtcccggcgcagcagcgccagcaattcctcctgtcggcggtcaccgccgatgattccaaacagcaaaatccacgcacccccttgccccagcgtatgacgccgacgcaaagctgtgcgtggatctcatctgatttttccggccgccgtcagcagcgcatcccggtcattgggcagtgttccgtccatgacctggtccaatagcccttgcagcgttcggcccaccgccgggccggacagtcccagccccagcagatcgtttccgttcaccgccagctgcttcagagaaaagcagctccccttttccagttcccggtccagcatggcctcgatccggtcgatctccttctgccggccacggaattcctccgcctgtcccatgttgtccgcccgctggatggcgagaaggtaccggaaattccgttctccgaagtggttcagcatccggcggacgcccttttccgtctccacccggtgatcatgccactccaccagctcaccgatccgttccttggcagcattgtcgaaccgcagccggtccatgacgccgtcggcaatgcggcgggaaaccacgccgtgtcccatgaaatgtccgatgccctgcgtgtccaaggcgaagcactccggcttacccatatcgtgaaacagcaccgcccagcggagcaccgagtccggcggcgcggcgtccagagcatgaagcgtgtgctcccatacgtcataacagtggtgaggattccgctggtcaaatcccaccatcggcagaatttccggcagcaccgcgccgatcacgtccgggtaccgccgcaggacggacgctgcccacgggccgcagagcagcttcgtcagttcctcgtgaacacgctccggggccatctcccgcagcaagttccgacaggtcagcagtgccttgccggtttccggttcgatggaaaagcccagcaccgccgcaaaccgcaggcagcgcaggattcgcagggcgtcctctgaaaaccgccgctccggatcgcccacgcagcgcaaaattccctcttgcaggtccgcctgtccgtcgaaggggtcatacaccgtccctcgaaggtctgttgccatggcgttgacggtaaaatcccggcgggccagatcttctgtcagatcaggggtaaacgtgacctgttccgggtggcggtggtcggcgtaaacgccgtcccggcggaaggtagtggtctccactttgccctcctgacagcagacggtcaccgtaccgtgcttcagtcccgtgggaatggcccggtcgccgaaaaccttcatggtctcctccggaagcgcggaggtggtgacgtcccaatcctccggcgtgcggcccagcaggctgtcccggacgcagccgcccacgcagtacgcctgatggcccgccgtctccaatgccgccagcgtttcccgcacgtaggcgggaatttttaagtccactcgtttttcccgcatatttcccgcccctttcagttgcattttccaaagacacatactataataaattgatttggaatcggtactactatacaccattttccgccgtcacgcaatcacggcgttttttgaaaggaagagcctttatatgatgaacaatcccaagcccatttccgaatttctggttcccggcaagcgcgcccatctggtaggcatcggcggcgtgtccatgtgtccgctggcagaggtgctggccggtaagggtctgctggtgcagggctccgatatgatggagagcgactccgtcaagcatctgcgctccaagggcatttccgttgccatcggccacaacgcggaaaacttaggagactgcgattttgtgatccgcaccgccgccgtccatgacggcaacccggagatcgccggcgccatcgcccggggcattcccgtctacgagcgggcgcaggcttggggcgccctgatgcggaaataccccaacgccctgtgcgtttccggcactcacggcaaaaccaccaccacctccatgtgcacccacatttttatggcggcggagcaggaccccaccgtgatgatcggcggcacattgcccctgctccactccggctaccgggtgggccacggtgacaccattattctggaatcctgcgaatactgcaacagcttcctcagcttttaccccactgtggcggtgattctgaacgtagaggccgaccatttggatttcttcaaggatctgggggacatccagcattccttccgctcctttgcggagctagtaccgcaggagaccggtcatgtggttgccaactatgataacgccagcgccagaacagctctgaacggtctggaccgccctctgttctggttcagcctccacgatcccaaggccgactgccgcgcggagcacatcacctggaccgacggtctccccagctttgacattgtgatccacggcgaggtctacgcccatgtggagttgaaggtgggcggcgagcacaacatctgcaacgctctggccgccgcctccgccgcctatgtgctgggtctgtccggcagcgccgtggaaaccggtctggccggctttaccggcgcgggccgccgctttgagtacaagggggagtatcacggtgccaaggtctacgatgactacgcccaccaccccgacgagcttcacgcccttttgaccatggcccgccagcttggctatcagcggctggtggtggccttccagccccacacctattcccgcacggccaagctgtttgatcggttcgtggaggaactgaaactggcggatgtggcgattctggcagagatctacgctgcccgcgagcagaacaccatgggtatttcctctgctgatctggcccggaacattcccggcagcgtctactgctctactttagataaggtaactgcccagctgcgggagctggcccgccccggcgacctgatccttaccgtaggcgcgggagacatctaccgggccggtgaaaaactgctgagcgaaacggagggctgatgatgaccgtttctgaaatttacaccaccgcccccacccaaggccctgaaaaggttctggagagcttcgccctgttgaaccagctccacatcccgtacagccgggtggagcacgagcctgccgagaccatggaggcctgcgccgccatttctgacgcactgggcatccgcatctgcaaaaaccttttcctctgcaaccgccaaaagaccgatttctacctgctgaccatgccggaggacaagccctttcacaccaaggacctcagcgcccagatcggctcttcccgtctctccttcgccccgccggaactgatggaagaactgatccactgcacccccggctccgccagtgttttagggctggcctatgacacagagcaccgggtccggctgctgatggaccgggaaacctacgaggcggcgcagttcggctgccatccctgcctgaacaccggcagcctgcggatggccaccgccgaccttctgaacgtgttcctcccccataccggccacacggtcacggtagtggacctgcccaatgaataaggaggcgccatgaaaaagttgattgccgcactgtccctgctctttgttctctccctcaccgcctgcggcaactccgatgccgcgctccaacaggaaaacgaagccctccgccagcagatatcggctttggaggctgaacgggacaatcttaccaaagaaaacaaggatctgactgaggaaaacgccgcgctggacgacacagccccagaatccggggacgatgaggccaatcccatcgaccgcttctttgaaggtgtggatgtcggttcctccacggcagagatgaacgccgtggccgacagttgggccggtgcttgggaatccgaatgtcggaatgttgccaagtggctgaagggacagctcccgcttcaggaggatcaggcattggtggatgcttacatcgcctctgccgaggaacagtccgcccggatggacattatggctatctatcccattgcggacctcactcttccgcagactgaccggagcgcttccagcggcagtctccggggcgtcctctgggccggcgcccaccagcaagtctggaaagacaccttttatcagctgctctatgtggccccggactatgccggcggcgtggattccgccgtgtcctatcagtttctctttgacgtagaggcagcacagacgcagctggactcgttgctttccgcagattgaaaaacgttgtccattgtaaccgaattatagttgacataaaatccaccccatatgctgttctcaaaaacagatgtggggtggattttatgaagcatacgtgcttgcattgttggccgcagcattacctcctctccctcaccgcctacggcggctcccaaccggacgcgccggcactggaaccggtaggccgaccgctcccggtttccgtgaaaagccccccgctcaagctcaacactccttataaaaaaatcctgccgcaatgcggcaggatttttttataataggattctttacttgctgagagcctcgtcgatggccttggcagcagtcttgcctgcgcccatggccagaatgacggtagcagcgccggtaacggcgtcgccgccggcgtagacgtgctcacgggaggtcaggccgtcctcgttgaccacgatgccgcccttcttgttgatctccagacccttggtggtggacttgatcagggggttggggctggtgcccagagccatgataacgcagtccacgtccagctcgaactcgctgccgggaacctcaatgggacggcggcggccggaagcgtcaggctcgcccagttccatcttgatgcagcggatcttattgacgttgtcgttctcgtcagccaggatctccacggggttgttgagggtcttgaagataataccctcttcctcggcgtgctccacctcttccttacgggcggggagctcctccatgccgcggcgatagaccacatagacctcggcgcccagacgctttgcgcagcgggcggcgtccatagccacgttgccgccgcccacaacagccaccttcttggggtgctggatgggagtgtcggaatcgggcttataggccttcatcaggttgatacgggtcaggaactcgttggcggagagaacgcccttgtagttgacaccggggatgttcatgaacataggcagaccagcgccggagccgatgaacacggcctcaaagccctgctcctccatcagctcgtccacggtgatggtacggccgatgacggtatcggtggcgatggtaacgcccagctccttcaggccgtccacttctttctgaacgatggtcttgggcagacggaactcggggatgccgtacaccagaacgccgccagccagatgcagagcctcaaacacggtgacgtcataacccttccgggccaggtcaccggcacaggtcaggccggagggaccggaacccaccacagccacacggtggccgttggaagcgagcttctccgcagcgccggaagcatgctcacggtgccagtcggccacgaagcgctccagacggccgatgcccacaggctcgcccttgatgccgcggacgcagtacttctcgcactggctctcctgggggcagacacggccgcagacagcgggcagagcggaggtagcggcgatgatctgataggcagcctcgaaatcgcccttggcgacctcggcaatgaaatcagggatatgtaccatcacggggcagccctgcatgcagggcttgttcttgcagtgcaggcagcgctgggcctcgtccagagcctgctcctcggtgtagcccagagcgacctcgtcaaagttcttgttccggacgttggggtcctgagagggcatgggattcttcttcaaagacatattggccatggttattcggcctccttcttgaacaggttgcaggtctcctcgtacttgtgggcctcgaagtccttatacatctggttccgcttgactgccagatcccagtccaccttgtgaccgtcaaagtcgggaccgtccacgcaggcgaacttcatctcgccgcccacggacaggcggcagccgccgcacatgccggtgccgtcgatcatgatggggctcatggaaacggtggtggggatgccgtaaggctccgtggtcttggagacgaacttcatcatcaccatggggccgatggcgaacacttcatcatactggttgccggcgtcgatcagctccttcagagcctcggtgaccagacctttacggccataggaaccgtcatcggtgcagacgatcagcttgtcgctggacttcttgaagtcctcctccaggatcaccagatcctcggagcggaagcccacgatggcatggacctcagcgccatcgtcatggaacttcttcagcacgggatacgcaatggcgcagcccacgccgccgcccacaacggcgaccttcttcttgccctcggtctcggtgggcttgcccagaggtcccacgaagtctgccaggcaatcgccttccttcatgtggctgagcttcacagtggtggcgccaaccgtctgaacaatgatggtgacggtgcccttttcgggatcataggcgttgatggtaatggggatacgctcgccgttttcatccgtccgcaggatgatgaactgaccgggctgagcctttttggcaatgaggggcgcttcgatctcatagagagttacggtgggcctcagtgcctcttttctcacgattcggtacatattggtgtctcttcctttcctatctgaaattcttccaacataataaatcgcacattgtctgaattttaacataggtactttcatccgtcaactgctttggagaaaaaaagcgcgaaattctgagaaaccgtgcaaattctttgccatcccaccctttttaacgctcccgcggccgacgcttccctgtgtcaaaaccgctttccgggcctgaaaaccgccgaaaacccgtttcaaaaccagaa

SEQ ID NO: 12235 - DNA, 61682 bp, Unknown
  gut microbiota DNA sequence
caaacaggcgcaatttttccccggaaaaaatttcttcaaattttcgggaacttttttcgttcccctgcgtctatggtatacagtgccgcctcggcggccattcaaaaaactttctgcaaggagaacacacatgaaaaaaatcacttccttggcgctggctctcgcgctggccctgaccctcaccgcctgcggcaagaaggacaacaccgccggaagcggcgattccagcgtacccgctgatgccaccgctctgctgaccgccgtgtgggacgcccactccgacgatgagaagttccccgctgccggcggcgactatgaaaatcccgtggaggacgcccccggcgctgtgagcattgccgacgccgacaatctgaactacatgctgaccctgccggtggaggatgccggtaagatcgacggcgccgcctccctcagccacatgatgaacgccaacaccttcacctgcggcgctttccacgtcaccagcaaggacgatgtggagaccgttgccagcgacctgcgggatgccatccagtctaagcagtggatgtgcggcttccctgacaagctggtgatcttcacctacgatcagtatgtggtgtccctgtacggtgacgaggaactggtgaacaccttccgcgacaagttcaccgccacctattccgacagcaccatcgcttatgacgaggcgatcctgtaacgtttccgcttttctcacagcgtccgcaccgaatcgtgcggacgctgtgaaattcaatgttggagttgccctatgctgttttccagtattccgtttctctatacctttttaccctgcgtcctgatcctctactttctggtccccggctggctgaaaaatacagtgctgctgctcagcagtctgttcttctatgcctggggtgagccccgcttcgtggtgttcatggtcatcgccattgtacagggttatgtattcggcctgctggctgaaaaattccgcgaccggcccaaacaggcgaagatgtgcctgtgggcctccgccattgttagtctggggctgctgtgctactgcaaatacgccgactttttcatcagcggcttcaacaccctcaccgggctgtccctcccgctgctccatgtggccctgcccatcggcatcagcttttacaccttccaaattctgagctacgtcatcgacgtataccggggcgatgtgactgcccagcggaatctcattgaccttgccgcgtatgtggccatgttcccccagctcatcgccgggcccatcgtccggtacgcggatatcgccccccagctgaagcatcgcacccacacgctggccgacgccgcctacggcgcccgccgcttcatcctcggcctttccaaaaaggtactgctggccaatgtcctctatgaactgatctccgcctacaaaagcgccgcgaacgtctctgtcctgttcgtctggctttacgccgcagcctacgtgctgcacctttacttcgacttttccggttacagcgacatggccatcggtctgggccgtatcttcgggttccattttatagaaaacttcaactatccctacatctccgccagcgtcacggagttctggcggcggtggcacatgagcctcggcagttggttccgggactatgtatacatcccgctgggcggcaaccgggtctccaaggccaaatggttccgcaacattttcatcgtctggctgctgacgggcctgtggcacggcgcggcgtggaccttcatcctgtggggactgttcttcgccgtgttcctgacggcggaaaagctctggtacggcgaagctctggcccagacacgattcctgaagcatctctatgttctgctgctgatcgcagtcagcttcgttatctttgatgccgccagtgtgtcggacgccttccgtaccatcggttccctgtttggcctgggtgggctgccccgttccgacgttctggcccgctattattttgacagctactccggcgtgttccttgtagccatcgtgggcgctacaccgctgcccgccaagatcgtccggcagttctccgaggatggcccaggcaaaaagatcatgtccgttgtggagcctgtagtgctgctgggcctgctggcggtggtcaccgcctatctggtggacgggtccttcaacccgttcctgtatttccgcttttaaaggaggtcccgccatgtttgaaaaatggaaaagcattctcacggtggggctcctgtccgcgtttgttctgggttttggcatctgggcggcggtcaagcccgccgatgcgctctccaccagtgagcgccgcccgctggcccaaatgccggaattgtccgcaagcagctatctctccggcaaatttatgtccggctacgaggattatgccacggaccagttccctctgcgggagcagttccgcaccctgaaagccctcatggggctgtatgtgttcggacagaaggacaacaacggcgtctatctggcagacggctccgccgccaagctggaatatcccctgaatgaaggctccgttgcccacgccgccgaccggttccgctatctctacgagaccctcatggccgggaccaacgccaaggtctacctctccgtgatccccgataagaattattttttggcggaggccaacggctatcccgctctggactatcaggccctgacggacgctctccggaagcagacggagttcgccgcgtatatcgacctgttcggcacgctgaccgcagatgactactaccgcaccgattcccactggcggcaggaaaatctgctgaccacagcggatacgctggccgccgccatgggcgccgcgctgccggacagccgctatacagaatggacactggaccggccatattacggtttgtattacggctacgccgccctgcctatggagccagaccatctgacttacctcaccagcgaccttctggacgcctgcacggtgtacaattatgagactggtaagaccaggcctatttatgatctggcaaaaggtgccggcaaggacccctacgagctgttcctctccgggtccgtgtcgctgctgaccatcgaaaatcccaatgcggatacagaccgggaactggtgatcttccgggactccttcggcagttctctggcccctctgctggtccccggctatgccaaggtgacgctggcggacatccgctacctccccagcagccagatgggaaagcacctgaccttcaccgatcaggatgtgctgttcctttacagcgccccggtgctgaacaacagtgaaactctgaaataagccgcaaagcgtctgccggaaatggcaggcgctttggacttttctacggaaataaggcagtttccttttttatcttgtacttttgaaagaaatcatatataataatagcctgataattatgctccggaggtgcgctctgcgtcggagcagcggaaaggaaagttatcctatgctgaaatttcattcggaacagggcgagatctccgtctccagcgctgttttttccaacattaccggcatggctgccaccaactgcttcggcgtgaagggcatggcctaccgctccatgacggacggtctggtccatctgctgcggcgggaggccatgagcaagggcgtcaacgtgatctataacgaggacgaatccatttccattgaactccacattatcgtggaaaacggcgtcaacattcccgcagtgtgccgctccatcatgaacgaggtacgctacgtggtgaataagaacaccggtgcggaggtccgcgctgtggatgtgttcgtagattccatgatcctgtgaggaggacagcagaagaatgagtaaagaaatcaccggtgcgcttttcaagcagatgatcctgcacggggccgccgctatcacggcccagaagcaggccatcaacgatcttaatgtattccccgtgccggacggtgacacgggcaccaatatgtccatgaccatcgccaccgctgccgaggcgctgcgcaaggccgctccctcctccgtggggcaggcgtcctccgtcaccgcctccgcgctgcttcagggcgcgcggggcaactccggcgtcatcctctccctgctgttccggggcctttccaaggctctgaagggcatggagaccgctgacgccgccgccttcgccgccgctatgcaggaaggtgtggccgccgcttataaggccgttatgaagcccgccgagggcacggtgctgacggtttcccgtctcgctgccaagcgggctgtggacactgccgctgagggtgccgacgtggagaccaccttagccgccgccattgaggagggctatgacgcgctggcccagaccacggacatgaacccggtactgaaaaaggccggcgtagtggacgccggcggcaagggctatctgctgattttagagggtatgctggcggagctccgcggcgagcccatccccgaaaatgaggaggagcctgagacgcacaaggaaaaggccgacttcaatgccatggcgcaggaggagatcaccttcaccttcgacaccgtgtatgtggtgcgcaaggcccgggaggacatcgacctcatgcccctacgggcttacctcagcagcatcggcgacagtctggtcatcggtgaggatgacgagaccttcaaggtccacgtccataccgacattcccggcgcagccctgacggaatcccagaaatacggcacgctggagctggccaaaattgagaacatgcgctctcaggccgacgcgctggccgccggccagatcgcccagagcactgatgatctggacgccattgaggaagagctggaaagcggcgagagcggccacaaggtagccgcccccgaaaaggccgtaggcttcctggccatctgcgccggcgacggccttgccgccgtgttccgggatcttggctgcgacgccgtggtttccggcggtcagaccatgaacccctccacggagagtattctggccgggatcgatcaggtccccgctgagaccgtgtttgttctgcccaacaacggcaacatcatcatggccgctcagcagtgccagggactgacggagaaaaacgtggtggtcatccccagcaagactgttccccagggcatcaccgccatgatgaacgtagacccggaggcggaggtcgcatctattacggaggccatgactgaagcgctgtccaccgtcaccacctctcagatcacctatgccgcccgggactccgacttcgacggctttgagatccatcagggtgactatctggccttgaaggagggcaagctgttcggtaccgacacccagctggacgctctgctggaaaagctggcagaggaagggaaggactcctccttcatctccctctattatggtgaggacgtcactgaggacgccgcccaagctgccggtgcccggttccaggccgcctgtcctgacgcggagatcagcgtgctctccggcggtcagcctgtatactactatatcatttcctttgaataatccatcaattacaaacagggcagtccatcggactgccctgttcttgacaaaaggagaacatcatgctgtttttgtgctatcccaaatgctccacctgccagaaggccaaggcctggctggaggaacggagcatttcctatgatctgcgggacatcaagcagaacaaccccaccgttgaggagctgaccgcgtggtatcggaaaagcggtctgcccctgaaaaagtttttcaacaccagcggtctgcaatacaaggccctgggtctgaaggagaagctgcccgccatgagcgaggacgagcagctcgctctgctggccaccgacgggatgctggtgaagcgccctctgctggtgggggaggacttcgttctcaccggcttccgcgccgcagaatgggaagcgagactgggatgatccagacgatcgacttcgcccccctggacggcatcaccaaaattgtgttccgtcaggtgtggagccagttttttggcggcgtggaccgctattttattccctttttctctcccactccccaccacctgatgacgccccgggatctccgtgaagtggactatatccacaacgccgctctcccctcggtgcctcaggtgatgacgaaaaacgccaacgattttctctggacctgcgacgtcctcaaggacatgggctacacggaggtcaatctgaatctgggctgtccctccggcaccgtcaccgccaaggggaaaggctccgggtttctggcccatccggacgagctggccgccttttttgatgaggtgttttccaaaaattcactgccggtatccgtcaagacccggctgggctatgagacgccggaggaatttgccgctctgctggacctctataaccgctatcccatcgcctgtctcactatccaccctcgtgtgcggaaggaaaaataccgggggcctgtccatctggacgtatttgctgacgcactggcaaacagccgcaatcctgtgtgctacaacggcgatctacggacagtgggcgaggtccgggccttggagggccgattcccggaggtcacgcatgtgatgatcggccggggactggtggcagacccagcgctggcccggaagctccggggcggcaaggacaccgaccgagaggaactgacggaatttctgtccgcgctgtatcagggctatacggacttctatcaggggcaggtccccactgccgcccagcggatgcgggaggtatggttctatctgatccatctgtttgacgatgcggaaaagctgaacaagcagcttcgccggttccgcaccccctcggaatatgaacggatccaggcagaaattctggcctcatgtccgattcggtctaacgttcagggggatctgatctaagcacaaaacttcatgcatgagcagcgcgccacgaacatgtacaaatgccagtgcgtgaagttttcgtgcatcatttccggttgccccgcaggggcgaggaaatggcacattttttatttttctgtgcttttgcatagcaaaaaacttctccagtttaactggagaagtttttttgttgaaataccgttatttcaaatgagcctccgcggcggtcagaatgttccgcatgagcatagcccgagtcatggggccaacaccgccggggactggtgtgatgtaggatgccttcggctccacggcggcaaagtccacgtccccgcagagcttaccggcctcattccggttcatggccacgtcgatgaccaccgcgccgtccttcaccatgtcagcggtaacgcaattcacctttcccacggcggatactaaaatatccgcctgccgggtgatgtccgccaaatccggcgttttggaatggcacagcgtcacggtgccgtccgcctgagtcagcagcgctgccatgggcttgcccacgatgttgctgcggcccagcaccacacaccgctttcccgccggggaaatgccatattcccgcagcatttccataactcccgccggggtacagggctggaacaccggatcgccgatgttcagccgccccacgttgtagggatggaagcagtccacatccttttccggggcgatagcagcgatcaccgccgccgcctccaagggcttgggcagagggagctgcaccagaataccgtccaccgccgggtcacgattcagtttttcaatgaggtccaacagctcccgttgggtggtctccgccggaagccggtagggaaagctgcggatgccgcactccccgcagtccgcttccttaccccggacatagacttgcgaggcggagtcttcccctaccagcaccaccgccagccccggctgacggggcagcttggcggctttctccgctacctgggcctttaccttggccgcaagggcttttccgtcaattctcgttgccatgcgtctctcccttttccggtttctcctgtgtttccgtatccggaacggtctcggcgtcaggggtctccacagcctccgtctccaacgggtccgccgcttctccctccgtaggcacttcattcataagggtctccgccaacacggcgtcctccgcttccgcagcggccagacgcgccttttccgccgccacctgatggacccacaggctctccggtgaccgcttcttgatgcggatgttatagaacagcataaaggctgccactgccaccatcacaatactcagcgcctgagacacccggattctctgtccgaacagctcccagttgaagaggtacaggctgtcggtccgcaggccctcgatccagctgcggcccagaccgtaccataggaaatagaaccaggtgttctccccgtcgaaccggcggcccttggacacgatgaacaggatcagcagcaggccaatcagattccagaagctctcatagaaaaaggtaggatggacctcgatgctggtatactggctgacccacagcttcatccgccagggcagggtagtctccccgccgaaagcctcccgattgatgaaattggcccaccggccgatgatctggcctaacagcaggcccatcaccgctacatcgcccatggcaaaaaacggaagcttatggcgctttgtgtaggccaatgccaccaatacgcctgcgatcaccgcgccgtaaatagccagtccgccgtcccagatccggaacatggcaccccaatccaggctgccgtccgtattccggtaaaggtccagatagaacagaacataataaaaccgggcgccgatgatgcagcagggcaccgcccagagcaccatgtccataatgttgtcctcagtcaggccatagtgtttggcctgcttcatgcagagatacagccccgccagcatggcaaatgccagaatgatcccgtaccagtagattccgtggccgatatggatggccaccgggtcaatgttcaattcccaatccccgaacaggccggggaagctgatgggcatgtttttcagtgcgctcacaacaggttcttcctttcggcggcaaagagtttaccccgccgcatatgttttctgcaagagacccaacgggccttttcgtctcttcccaaagacttattgtttcggcacgatccggctgaggaccatccgctccgccgtgacattggttttcaggaacgtcgcaacgtcctccggcgtgatggattcaaatacctccgggaagcggaggggatcatagccgtggaaatagccctccgtcaaggtcacagcgatgttctcaaaggagttcagtccccggagattggcgccgaaggatgccttgcggattcgccggaagtagtcttcgtccacgccctccgccgcgatgcgggcagcctcccgcaggatggcgtcggtgacggcactggcatccttgctgtcgccgccggcgtagagataggccacgccgggcatcatctcaaaggccccgccgaagctggggttgatgaggccctgctcataaagccgctgatacagcgcgctggactcgcccagcagaatatcgctggccatgtcgcccagaatggcggcgcgcatataatcgtcgccctccgtcgccggggcacacttgaagcccgccaggaactgcggtgcggagacctccatctccagaacggtctccttctccgccacggtctccggctccgtgccgtaatcccgctcaatgatggggccgctgagcttgggcagcacccggttggccagatcgatcacatggaccgggtccacgtcgcccaccaccgtcaaaatcatgttggccggggtataaaatgccttatggcagtcatacagcgtgtccgcagtgatttcggcaatgctctccactgtaccggcaatgctggtgcgggccgcatggcgatgatacatggcccgcagcatccgggtgtagatctgccagtcggggttgtcctcgatcatgcggatctcctgaccgatgatgccctgctccttggcaacactctcatcggtgaaatagggaatggacacaaaggacagcaggatccgcaggttttcctcaaaatgctccgtggaatcgaaatagtaggccgtcatggcgttggcggtgaaggcgttgggttccgcgccgtttttcgccagctcctgcagggcgttgccctcccgggtatcgaacatcttgtgttcaagataatgggcgatgcccgccggggtgttcagccattgcccgtccagacagaaccgggtatccataccgccgtagcgggtggagaaaaaggcgtactttttggcgtagccgggcttaggcaccacgcagacctccagcccgttggtcagccgttcccggcagactgcctcgccgatccgctcataaaaagtctctttcacgcttccccctccttccccttcaggaaatacaccgtatccagcttcacggtgctcatggcccggcagatccgttccgccgtcatgtcctgaatggcgcgggccaggtccgccggggtctcatgctgccctgtggcagcctgtcccagataaaagttttccagcttgccctgagaatcgccaacagttgcatagttgttcagcagcgtggagcgggcgccttccagctcccagtcctccaactcacccttctgaacggcctccagctgggccatgatctcatcgtaagcccgctgatagttctggaactcaatgccggaggacacggtgatgaggcccttctgccggtggtagagggaggacgcgtaatagcagagggacagcttctcccggacgttcaaaaacagcttggagttgctggagccgccgaagagggtattacccatcagcagagcgggcatatcgtcactgccgcaggaaaaacccatgcccagcttgccctgggtcacgtccagcacatcctccacatgctgcacggattcccggcagacgtggggcgccgccgtggagatcacccggacctcctcacggggcagggtggcaaatgccgccgccaacgcctgctttacccgttccagatcggcgctgccgctgtatatgatctccagcggcgctgtggagatcagatcgcggtactgggtatagaccttcagcgcttgcagcttgtccaccgtctcctcgtcgcccagacggggcacggcgtaggcctctccatcgcacaacgcccgcagcagacggctgtccgcccaatcccgcttatcgttgatgagagaccggatggcctccagcagattggtcttttcgctttcaaaatactccggcacaaaccggccgtggtaggtgacggggtcacagatcaactcgcccagcagcgccgccgccggttccagcagccgttcgccgccgggggcataccgatcgtcaataaaactggccacaaagcccacgcactggttttcgccttttttccgcactgtgtagtcgatggaggcatcgtagaggttgtccatctttgcggagagcgctcccatatcgggacagcttaccgtaccccgccgcagcaccgccgccagcaatgcgttggctcccgccgtctcccgccgcaaaggcgtgacgaactgtgcggaaagcaaactggttttgaattttctcgccggcagataggtcaggtggacgccctccgccagccggatgcgtgtcgcttccaaatcatcaactccttatggaccgcgcaggcagcccgttcaatgtcaatacagagtttattatatgtcaaatatatgaataattcaaacctttttctgtgggcctctccatcatttttgccactgtgcgcaaaaagcggaaaaaccggcggtctcccgccagtttttccgcataaaacgattcttttttattccagcacccgcaggagattttccgatgcgatggcctgccgctccgcctccgaaaagccgatccgttccagttcaaaaaagaaattctgagcctgaccgcagtcctccatgccctcgcacccctcatagccggagccgaaatactcgcagaagtcaaagccgcaggccacatgctccggccccatcacctcagccatgtgggcggcatgacgggccagcatagccgccgtctgctgccggggctccttatgtacaaagtcgtgggacacattgacccccaccacaccgccggtatcccggatggtgcgaagctgctcatccgtcaggttccggcgaacatcgcacaaggcccggcagttggagtgggaggcgatcaccggcccctccaccagatccataatatcccaaaagctgcggtcactggtgtgggatacatccggcaggatgttcagccgctgcatccggcggaccgcctcccggcccagctccgtcaggcccttgtccggatcgccgccggcgccgcaggccagcaggttttcctcgttccacgtcagcatccccattcgggccccccactgtgcatactgttccagccgctccagccggtcacccaccggctccatgccctccacgctcaaaaaggcgaacagctttccctccgtttgcgctttccgggcctccgccgccgtccgtacaagcgccagccaggggcactctgccagctcctcccgagcgcaggccatcatctcctccgtccgccgccagccgtcccagtccgggtgagcggaccagatggagtcctgttccaccgttgtccagatggaaagccccaggccgccgatctgccccgcctgcaatctcggcaggtgacgccgttcaaagacacggtcctctccggcctgccgccacttggtcacatcatataagaggtccgcatgtccgtcgaaaatcatcatctggtgtctcccctttcttccttatacagtatatctgcctgttcatcccggtgcaactgtaaatttccttgaatttttccgggtttttctccattttccccttgactttccggcaaaaatcctgtaaactgattcctgttgtaaagcgtcacagctttacaggaaaggagttcaacatgaaaaatcagacttatcggatgacgatgctctttgatttctacggcgaactcctgactgaccgtcagaaggagttctttgatctctattacaatgaggacctctccctgtctgagattgccgaaaacgaaggcatttcccgtcagggcgtccgggatgtgatcgtccgggcggaggccgccatgcaggagattgaagacaagaccggcttgattcgccgctttgagcagttccgggggcatctggatgccatccgcagcgccgctgaggatatccgcaccctgaactaccggcagtatgaggacagccgcctgacggaactggctgacaagatcacggcggaggtctccgcgttgaaggagtaacccatggcatttgagggactgagtgaaaaactgaatgcggcctttaagcgtctgcggggcaaaggccggctgacggaaaatgacgtccgggaagccatgcgggaggtccgtctggcactgctggaggccgacgtgagctacaaggtggtcaaggaattcgtggccaccgtaacggagcggtctgtgggcaccgacgtgctggacagcctgactcccgcccagcaggtggtaaagatcgtcaacgaggaactgacgaacctcatgggcggcggcaccgcaaagctggctttcgccaacaacggccccacgatcgtcatgatggtgggccttcagggcgccggtaagaccaccaccaccgccaagctggcgggctatatgaagaagttccacagtaagcggcccctgctggccgcctgcgacgtgtaccgccccgctgctattgaacagttgaaggtagttggcggacagctgggacttccggtttttgaagaaggccagggcgatcccgtaaaaatcgccgaaaacgccctccgctatgccagagatcacggcaatgacctggtgttcttagataccgccggccggctccatgtggacgaagccctcatggacgagctgaagcggatgaaggcaaccgtccatcccaacgagatcctgctggtggtggacgccatgaccggtcaggacgccgtcaacgccgcctccgcctttgacgaggcgctgggcatcgacggcgtggtgctcaccaagctggacggcgatgcccgaggcggcgcggccctctccatcaaggccgccaccggcaagcccatcaagtttgtgggtaccggcgaaaagctggatatgattgagcccttccatccggaccgcatggccagccggattctgggcatgggcgatatgctgtccttcatcgaaaaggcacagcagacctatgacgaaaagcaggccaaaaagctggaggaaaagctgaagaaaaacagctttaccctgtcggactatttcgaccagctccagcagatccggaatatgggcgacctcagccagctggcgggcatgatgcccggcaacctgggcagcaagcttcagggtgcgcagatcgacgaaaaggccatcgcccatacagaggccatcatcctctccatgaccccggaggaacgggaaaatcctcagatcttaggcgccagccggaagaagcggatcgccgccggctgcggtctggatgttgtggatgtaaaccggctgctgaagcaatttgagggaatgcagcagatcatcaagcaggtcactggcggacggaaacccggcttcgggttcggcggtctgggacacggccgcggcctgcgcaagcgcaaaaagaaataaaccgtatattagatgtcataacccggacatttattataaaaacatcaatctatttattacattttggaggtactatcaatggttaagatcagactgcgccgcatgggcgccaagaaggctcctttctatcgtgttgttgtcgctgactcccgtttcccccgcgatggccgtttcatcgaggagatcggcacttacaatccctgcgtggctcccgccgatatcaagatcgacgctgaccgcgccaaggagtggatcaagtccggcgctcagcccactgacaccgtgagagctctgctgaaaaaagtggacgtcctctaatccggagggcggagcatgaaggacttgctgctctacatcgccagaaacctggtggacgatcctgacagcgtctccgtgacggaggttcagggcgaccaggaactgacgttggagctgcgcgtcgcccctgatgatatggggaaggtgatcggccgtcagggccgcatcgccaaggagatccggaccgtggtccggtcttacgcccagcgcaccggcgttaaggtttccgtcgatattgtagactaaaaaagcagctcacctgcattgcaggtgagctgctttttccttttacgaaccgttcaaatcggcgttcagacacccagaccgacatagaacagccagcacagtacatatccggtcaataccgccgtcagtgtgaagggcacgccgatccgcatgaactgccccgccgagacctcatagccctcccggcgcagaataccgcaggcggcgatattggcactggctcccacgggagtcaggttgccgcccagcgtcgcgcctaccagcagcccgaagcacagcaccgtctgatccaccccaagggcggctgccacgccgcctaccaccggcagcatggtggccgtataggggatgttgtccacaaaggcggagattagcaccgaagcccagacgatgatggtataggtcaggaacaggtttccgccgcccattcccgtgatgatatggctgagatcatcgatgatccccgcccgttcaatgccccggatcaccaagaacaatcctgccagcagcgctaatgtctcatagtcgatggccttcagcacgtcctttgccagggctgtgccgtacctgccgcactccgccgcaagccccgccaggaagaatgtcatgcagatcaggccgttggtgatctccggcttgttggggataaaggacgcggcgatcagggaaagcaccgttcccagcagcagacaggtaggcagatagtccgtcaccggcgtcagtgccgcgccgtacagcttgcccttttccttccggaacagaaatagcatcaccggtaccgtcatcagcgccccggcctgcaccacccagaacagacccggacggccccggtaggcaaaaaagtccatgaaatccaatcccatatgaccgcccagcaggatggacgtggtatcccctaccagcgtggctgccccctgcaagttggagctgacggcaatggccagaatgggctgcactggggaaatattcagctttttggagatggcaagtcccaccggagccagcatcagcaccgtggctacattatccacaaaggcggataccagccccgcgaacagtgccagcgcgatgatgagccatttcacgctgggcagcaccgctaccagccggtccgacaggcggtttggcatattggaccggatgaacaggtccacagtccccatggtgcccgccagcatcatcagcacgttccagtccaccgttcccgcaacgtcccccaacggcacgatccgcaggagcaggaacagcgccgccgcggacagggcggacaccgcccggtacttgggcagcaggagcagcagggcgtaaaccacgataaaggtcaggagtgcgatggttttcatagggtatcctccgtacaaattcgatagaactccaaatacggcaaaagcggcactttcgccgcgtcagacagcaaaagtcccgcttcttcctacgcagcccgggtctttcatccggagtggcaaaccgcgcagcgccctgatggcgcaagccgcttccttttacgcatgtcaggataccagacttttctccgtccgtcaagcgaacgcttcgataggataagatatgcgggcctgtcccatttcattcctgcgtcacctccggagcgggaaggcttccccatcagcttcggccagcaggaaagcggggccaccgtcccggctttccctgtccggtcccttactgccgtcgggccgtccggtactcgtcaccggggcggtaaaaggggcagctgtcattggcagaacggaggaaccgctccatctcgtcctcatccagatccgcctcgcagtaattggtatccgcttccggatcgtactcataataaacgcagtcctcacaattcgtcatagcgtgctcctcacttggtaggaatgatctcgatccagtaaccgtcgggatcagagataaagtaaatacccatggccgggttctcgtagcagatgcagcccagcttttcgtggagagcgtgagccttttccatatcctccaccgccagagccaagtggaattcgcactcgcccagatcgtatttctggggatgatcccggagccaggtcagctccagctgaaactccgttttcccgtcccccagaaacgtgaggatgaagctgccgtccgccgcttcctttctgcggaccggcttcagccccagcgcgtcatgataaaaagcgatagaccgctccagatccgtcacattaaaattaaaatggttaaaagcaaacataggttccctcctgttttgatctgcctgcattataccgcgttccgggtctgtccgcaagcggttctctccctttatattttctgccgcggccatttgtctttcccacaaaatctcagagggaacagccttcacgccggaattttgtataaaacgccctcagtttttatgccttctccctcatctttatccattttcacatgcgctttcctgttgacaatttgattccgcaggattacaataagcccataattcaggcagaaaggagcgatccagatgatgttcaatcgtttttacaacatggaaatgaagaatacttctgcgtccgctcccagtgcgaacgctggcccttcctgcgcacataccgcttacacttctcatactgccaatactgctatgatcgctattatggacgccattattatggcgtccattattatttgcggcctgattattagcctgcgtgccatcgccttgattgcgattctggtactggtcgtaggtctgattattcaggaagtgaatacgccctggtgtaatgagttagcgatttaactgtttgatacagtaaagcggctccgccagtggcggggccgcttttttgtatgacttcccccgtattccgcacggccggcggagcggagaaagccccatataaatctgatttcgttttgatgaaaaggagaaccaatatgaaaaagaaattgttagcctttgttatggccgcgactatggtgttcagtctggccgcctgcggttccagcagttccaatgattccagcaattccggcagttccagcgattccgcccagtccggcgacgaggtccagaccttcaagctgggctccatcggccccctgaccggtgacgccgccatctacggccaggccgtggtcaacggtgcccagctggccgtcgacgagatcaacgccagcgactccaagatcaagtttgagttcaagggcgaggatgatgaggccgacggcgaaaagtccaccaacgcctacaaccagctgatggactggggcatgcaggttctggtcggccccaccaccaccggcgcttccatggctgtggctgatgtctgcaacagcgagcgcaccttcatgatcacgccctccgcttccgctgtggacgtgaccgccggcaaggacaacgtgttccaggtctgcttcaccgaccccaaccagggcatttcctccgctgactacatcgccgagaatatgccggacgccaagatcgccgtgctgtaccgcaacgatgacgcctactcccagggcatccacgataccttcgtgaaggaagccaccgaaaagggtatgagcgttgtctatgagggcaccttcaccaacgataccgccaccgacttctctgtccagctctccggtgcccagagcaacggcgccgatctggtgttcatgcccatctactatcagcccgcttccatcgttctggctcaggccaaggccatgggctacgctcccaccttcttcggcgtggacggcatggacggcatcctgaccatggaaggcttcgatccctctctggctgagggcctgatgctcctgactcccttctccgctaccgttcccgaaacccagtccttcgtggaagcttacaccgctgccaatgacggcgtgacccccaaccagttcgccgctgacgcttatgacggtgtctacattgtcaaggaagctctggaaaaggccggctgcaccgctaatatgagcagcgccgatatctgcgaggctctggtggcacagatgacccagatctcctactccggtctcaccggcaaggacatgacctggaacgctgagggtcaggtctccaaggctcctaccgcttatgtcatcaagggcggcgagtacgtcctgcccgaggcttaatgtctctcacctgaacgctgaccgcaaggaccggcagccggggccttccccggctgccccctgcggcgttcaggtccctgtcctcttccgctgtttccatggcggaaatctgggcagaggcgctccctccgcccgtatttctgtcatggaaggctccactccatattctataaagagaaaagaggtattgccccatggaatttctgtcctatttgatcagcggcatcagcctgggcagcatttacgccatcatcgctctgggctacaccatggtgtacggcatcgccaagatgctgaacttcgcccacggcgacatcattatgatcggcggctatgtttccttctgctccatgtactatttaaatctccctcccatcgtggccaccctgctggcggtgatcgcctgcaccgtcctcggcatcgtgatcgagcggctggcctatgcgcctctgcgctccgccccttccctggcagtgctgatcaccgccatcggcgtcagctatttcctccagaactccgctctgctgatctggaaggccgccgccaagacctatcctcccgttgtcgcaggcgctgtgcagcttttcaacggccagctcaccatttcctacatctctctgctgaccatcgccgcctgcgttgtcatcatgctggcgctgaccaccttcgtcagcaagtccaagatgggcaaggccatgcgggcctgctctgaggataagggcgcggcccagctcatgggcatcaatgtcaactctaccatttctgccacctttgccatcggctccgctctggcagccattgccggtgtgctgttgtgctccttcaacacctctctgatgcccaccaccggctccatgcccggcatcaaggcgtttaccgccgccgtgttcggcggcatcggctccatccccggcgcatttctgggcggcctgctgctgggcatcatcgaagccctggccaaggcctatatttccacccagctggcgaactccatcgttttcgccgttctgatcgtggtcctgctggtgaagccggccggtctgctgggcaagatcgtgcccgagaaagtgtaaggtgagcaggatgaaacaacgaaagatcagtaaaaccaatgtggtgaatttctccacctatctgggcatggtcatttttttccttgtgatgaccgctctcagcaaggccggtgttctgaaccgttccatgaccggcctgctggtccccatctgctgctatatgtccatggccgtgtccctgaacctgacggtgggtattctgggcgaactgagtctgggccacgctggctttatgagcgtgggcgccttcgcgggcgtcatcgcttctcaaagcctgctggatgtggtcccctccgccggtctgcggctggccatcgccatgatcgtgggcgcgctgttcgccaccatcgccggcttcatcgtgggcgctcccgtgctgcggcttcagggcgactatctggccatcgtgactctggccttcggtgagatcatcaaggagctggtgacctgcctcatcgtgggccatgacgaaaatggtctccacatcctcttcaacctcaccggcaacaaaactgtggaggatctgggcctcagcgacaccggcatcgccatcatcaaaggtgcgcagggtaccgccagcgtcaagaccatcgccagcttcaccgccggtttcattctggtgatggtgacgctgttcattgtgctgaatctgaagcacagccgggccgggcgggccatcatggcgctgcgggacaaccgcatcgccacctccagcatcggcatcaacaccaccaagtacaagctcatggctttcgtcacctccgctgctctggccggtgccgccggtgcgctgtacggcttgaactattcctctctccaggccgctaaattcaacttcaacacctccattctggtgctggtgttcgtggtgctgggcggtctgggcaacatctggggcagcctggtagctgccgcggcgctgaccatcctgccggaggccctccgggaattcgccgactaccggatgctggtgtacgccatcgtgttgatcctcgtcatgctggcgacccacaaccccacgctgcaaagcttcttcgcccggctcaagcccggcaaaaaggaagaaaaggaggctgcctgatatgttcggaaaactggttcccgtcccctccggcgctgtgatcccggagcgtgacatcggcaagcgtcccatcctcaattgcatcaatctgggcgtcaccttcggcggcctgaaggccgtggacgatttcaacctcatgatcggccggacagagatcgccggtctcatcggtcccaacggcgcaggcaagaccacggtgttcaacctgctgaccaaggtgtatcagcctacccacggcaccatccttctggacgggcaggacacccacaacatgaccaccgctcaggtgaaccgggctggtatcgcccgtaccttccagaacatccgcctgttcaacgacctgacggtggaggaaaacgtcaccgtggcgatggacgcccagatgaagtacagcatggtcagcggcatcttccgccttcccagcttctggaaggaggaaaaggtggcacacgagcgggcgctggagctgctgagcctattccatatgcaggatctggcaaatgtcaaggccggttccctgccctacggcgcccagcgccgtctggagattgtccgggcgctggcaaccaacccctccttgctgttgctggatgagcccgccgctggtatgaacccctccgaaacggcggaactgatggagaacatccgcaagatccgggatacgttccagatcgccattatgctcattgagcatgacatgaatctggtcatgaacatctgcgagggcatctgcgtgctgaacttcggccgtgtcatcgccaagggcagccccgaagagattcagtctaacccggtggtcatcgaggcctacctgggcaaacagaaggaggcgtgagcatgagcaccattttaaaggttgacgatatcaacgtctattacggcagcatccacgccatcaagggcatctcctttgaggtcaatgagggcgaaatcgtaaccctgatcggtgccaacggcgccggcaagtccaccactctgaacaccatttccggcctgctccacagcaagaccggccatatcgagttcatgggcgagcctttgaaccatgtacccagccataaggttgtttccaagggactggccctggtccccgagggacggcggatcttcctccagatgtctgtgcaggaaaatctggacatgggtgctttctcccgccggggcggcaacatcgacgccgatatggagcgggtctttgaacagttcccccgcctgaaagaacgccgcaagcaggtggccggtaccctctccggcggcgagcagcagatgctggccatgggccgggcactgatgtccaaccccaagctgctgatgctggacgagccctccatgggcctggcccccattctggtggagcagatctttgacatcatcaaaaatctccacaaggccggcaccacaatcctgctggtggagcagaatgcacaggcggccctgtccgtggctgaccggggctatgtgctggaaaccggaaagatcgtcaccaccggcacaggcgcggaactgctggcctctcccgccatcaagaaggcgtatctgggaggctaaacgtcggagcaaagtccgtgcactccgtttccacctgacggcgaaaccctcgttttcttccttgctcctcctctttcgcgtcagatttgcttcgccggattctgacgcgagtgggacgggggatgcgagggacaaagtccacatggttcctttccatctggcatgaagcctttgctgttttccattttcacagcataaaccgcacgtccgtttggacgtgcggttttttctctccgcctcttttcaaagccgcttccccgtggtatactgctgtcaagacaagtttgaaaggggtatcgtatgcacgcggaggaacgcagagaaacgattttgaagctgctgcggcagtctgctcaaccggtcagtgcctcgacgctggcaggccaactgtccgtcagccgccagatcatcgtaggagacattgccttgctgcgggccggaggcgcagacattttagccaccccccgggggtactgcctgcaaaatgccgccgcagccggtctcacccgccgggtagctgtccgccatgacgaggcaggcatggcggcagagctgaacactatggtggacaatggctgcaccgtggtggacgttatcgtggaacaccctctttacggccagctcaccggccccttgcagctttccagccgatacgatgtggcccagttcatcgcccggagccacaccgcccagcctctctccgttctcaccggcggcatccaccttcacacgctgctctgccccagcgaggacgcttaccggcgggtactggacgccctgcggcaggcaggcttcctgctggagggataaaactttctgttgacaagcataccgattccgtgtatagtgtgttggacaggtgtcaagacaccagtctgacacactatttttgatcgatacggagtattctcatggaaaaggtaaacgcattcctgaagcgcaaaaacatcgttttttccgccaaacgctatggcattgatgccctgggcgctatggcacagggcctgttctgctccctgctgatcggcaccatcctcaacacgctgggcacgcagttccacatcggtttcctcaccgcccagatcggggaaaaggttccctacaccgtaggcggcctgacctcctttatgagcggtcccgccatggccattgccatcggctacgccttgcaggcgcccccgctggtgctgttctctctggcggctgtgggttacgcctgcaacctgctgggcggcgcgggcggccccttggccgtgctgttcgtggcgatcatcgcagcggagtgcggcaaggccgtcagcaaagagacgaagatcgacattctggtgactcccatcgtcaccaccctcatcggcgtaggcacggcctatgttatcgccccgcccatcggcaccgccgccagtgccttcggcatggtcattatgaaggccacggagcttcagcccttcctgatgggtattctggtgtccgtgctggtaggcgtggcattgactctgcccatctcctccgccgccatctgctccgtactgggcctcaccggtctggcaggcggtgcggctgtggccggctgctgcgcccagatggtaggcttcgccgttatgagctttcgggagaacggctggggcggtctggtgagtcagggcctcggcacctccatgctgcaaatgcccaacatcgtgaaaaacccccgcgtctggatcgcccctaccgtcacctccgccattaccggccccattgccacctgcctgttccgtctgcaaatgaacggcgcggccatcaactccggtatgggcacctgcggcctgtgcggccagctgggcgtgtggaccggttgggtggctcccagtgaaaaggctctggccaacggcgccatcgccatgaaccccaccgcttttgactgggcaggcctgatcctgatctccttcatcctccccgccattctgtgcccccttatcaaccagctctgccgcaaggccgactgggtgaaggacggcgatctgaagctgccctgatatccctaatttcacacatgtagaaaaaaccatcggctttttgtggaaaaagccgatggtttttgttcttctataagattgtgccctgtttagccgaattaatgccccgattcccgtccgaacatacatttttaataggtgtttttcattgttaaaaagcaaacatctgttgacgaaacgccatgttttgggttagaatacgagtcaggaaggtatgttcctttcaatggctgatcgcgctgtctcataagttctgtgtacggcgcgatctttgtcgggtgtcccggaaaacgattacttgtgattattttccggaatgtgttatcttattcaaaattggaagcgtacacataccgttatttccttgttttacttcattttttcatcaaagcaagcagaaaggatgcgtgttacatggatgtaaaaaagtgcaacgttctggcggctgagatccggctggagaccctgaaggtcatccactcccggggcttcggtcacgtgggcggttccatggatctagcagacctgatggccgttttgtacggcgaggtcatgaagttcgatcccaagaacccccgctgggaagatcgcgactggctggtgctcagtaagggccacgccggacccgtggcttatgccaccttcggtctcatgggcttctatcccatggaggaggcctacaccctgaaccagccccacaccaagttccccagccacactgaccgcaagctgactcccggcgtggatctgaccaccggctctctgggccagggcgcttccaccgctgccggcgccgctctgggcaacaagatcgacggccgcaccaaccacgtcttctgcgtcatcggcgacggtgaggcggacgagggccaggtctgggagtccttccagttcgcctatgcccacaagctggacaacctgatctatttcatcgataaaaacggctatcagctggacggccccaccgatgacattttggctcacggcgatctggccaagaaggcggagtccttcggcctgtacacgcaggagatcgacggccatgacgttcaggcgatctatgacgccattcagaacgcatacgccaagaaaggcgttcccagctgcatcgtgctggatacctgcaagggcaagggcgctacctttgccgagcccaagcatgaccactcctctcagcccaacgaggagcagtgggccgaggccatcgccgcttccgagaaggccttggaagctgtcaagaacgcttaaaggagggtgcgagtaatgagtgtgaaagtaattggtaagcatgaaaaggactcccgcgcctgccgcgacgcgctggccctgactctgaacgaaatgatggccgaggacaagtccatcgtctatgtggactgcgacctgatgggctgcatcaacaccaagatgctgaggaagaactatcctgaccgcgcttttgaggccggtattgccgaggccaacggcgccggcgtggctgcgggtctcgctgccgccggcaaaaaggtgttcttccattccttcggtaccttctcctcccgccgttgctatgaccagatctatatgtccgccgcttacgccggtctgcccgtccacgtgctgggctccgatgccggtgtgaccgctgccttcaacggcggcacccatatgcctctggaggatgccgctatgtacctgagcatccccgagaccgtggtgctggatcccgccgactatgcccagctggagtgcatcacccgtcagctgcccggcatcacttccggcgtgacctatacccgctttgtccgcaagggcatcgtcaaggtctatgaggacggttccgagttccccatcggcaagggcgttgtgctccacgagagcgacaaggacgtggccaccatcatcacctccggcatcatggtggacgagtccttgaaggcttatgaggctctccaggcggaaggcatttccgtccgcgtaatcgatatgttcacctggaagcctctggacgaggagctggtcatcaaggccgccaaggagaccggtgctattgtcaccgccgagaaccacaacgtcacctgcggtctgggcagcgtggtttccaactgcctggctaagaactgccccaccgttcaggagtttgtgggcgtgcaggatctgttcggtcaggtcggtcctcaggacttcctgatggatgagtacggcctccgtgccgccaatatcgtggctgccgtcaaaaaggcgatcagccgcaagtaattcggatatccggcggggtctccccggagctcccgcctgtatcacttaaatcaattaaaaggagatttcaatcatggatgcattttccgcttctctgatggctgacaagagagagattgtctttgctcccaccgtgtataagttccagaccttcgcccagatggctgaggagttcaatctgggtgaacgggacgtggttctgaccaacgagttcatctacacccccttcatgaaggagctgggcctgaagtgcaacttcgtgtttcaggagaagttcggcgccggtgagccctctgaggccatgatccagaccatgtacgacgccatcccctatgacagctatgaccgcgtcatcgccgtgggcggcggcgccatcatggacctgtgcaagctgctgggctgcaagcgtcccgacaccgtccacaacctgtacttcaagcgcttccccgtggtccacgagaaggacgtcatcgccatccccaccacctgcggcaccggctctgagtgcaccaacatctccgtggccattgtcaaggacgagaaggacggtgtgctcaccggcggcgaaaccaagctgggcctggtgtccgatgacatcatccccaacaaggtgtgcctgatccccgacctgctcaagaccctgccctacaagcccttcgcctgctccgccatcgacgcgctggtccacgccaccgagtccttcctgagcccccaccgcaagaccatgacctccgagctgttcagcgagaaggccatggacatgatcctcaagggcttcaagctcatcgacgagaagggtcaggacgcccgctttgagtatctggatgagttcgtcactgcctccttctacgccggcattgccttcctgaaggctggctgcggccctgtccacggcatgagcttccctctgggcggcacctatcatgtgcctcacggcgagtccaactacatgctcttcggcgccatcatggactactatgatgccaacaagcccgacggcgagatcatgaagttcaaggagctggtggcccgcatcctcggctgcgaggtcaaggacgccatccccgagatgaacgctctgctgcagcgcatcctgcctctgcgtcccctgcgtgactgcggcttcaccgaggctgacttcaagatcttcccccagtccgtggagaccaaccagcagcgcctgatgaccaacgcttactatcccttcgatctggagagcgaagaggccatctaccgcaagtgctattgatcccagcggatcatccactgaaaaaaatccgcggcggtcagccgctcctctcctttgagagaaacggctgaccccgcagaacccccgacaggcgatcgtatttacgatgcctgccggggggtttcgttttgaccgcagcctgtcggcagaatcaatatggcggctggccgggaggaataggctgccgcccgcccatacgggcagtctgcggtgcaccattttttgccaaaattttgttcttgacaattgaggtcctcctctgtacaatcgttctaaatagaacgttaatgaaaggagaacctatgcacttttgggatcagcataaagccattacgcggtattatgagattctgatgtcgtccgtatgcgagaaatatcagctcaagcatctggaatatgatattctgatgtttttgcacaacaatccccagtatcgcacggcggcagatatcgtcagggtccggaaatccaccaagtcccacgtgtccacctcactgaaaactcttgaggacagggggtttatcgcaaaaaagacagacccggtaaacaaaaagcacattgagcttgatctgctggaaccggcaaatgagatcgtccgggacggacttctggcccagcggcagttcgcggagcagatgctccggggcctgacgccggaggacatcgccgtttgtaagcgcgtattccaacaggtatgcagcaatgcagaagcatgcatcaaacagaaaggataaaaacatggatcacaaaacctatcagcccaaaatgcccgatattatggaggccgtatttgatacgatatatctgttgttcgacctcgtagcaggcatcgtatttttcgccatggcgcagggccgccccctgtttgttctctacggcatcctgaccctgaccctctgcggcggcgatgccttccacctcgttccccggatcttccgggcgttccgtggaagcacccccaagatcaagcatctgatgggcaccggcctgcagatctcctccatcacgatgacggcgttctatgtgatcttgctgttcatctggaagctcaccttcccggactttaccgctcctgcggctgtggaggtgatgatctgggcctccgccatcatccggatcgccgtgtgcctgctgccccagaacaactggtgcacagacgagggcaatctgaagctgtccatcctccggaacggtgtattcgccgtcaccggcatcggcgtcatgatcctgtacgccatttccgggaatgccggcgggtatcacatgacgaaaatggtagcggccatcctgatctctttcggctgctatctgcccgtcacgctgttcagcaaaacgaaacccaaggtgggcctgctgatgattcccaagacctgcgcgtatatgtggatcatcgctatgggcctgcagcttttgggttcctggaacggctgattgaatcaaaaacccggacgcgtaagcgtccgggtttcagcgtgtcgaaaaaggcttttctccccgctgagcaagttttcagaactttataaaagttctgaaaacttaggatttcaatggcgcaggacacccttcttgggtttcccgcgcacacccttccttaccgtcgcggagaatttaccactttatcgacagtctcaaacccggacgcttacgcgtccgggtttctttttatcccatattatcccaatttctttgtccggcgataggccgcttccacagcggcgatcgccgccccacggaatccccggtcctccagcgccgccacaccggcgatggtactgccgccgggactgcacacggcgtccttcaacgcgccggggtgctctcccgtttccagcagcagggacgcgctgcccagaagcatctgggcggcgtaccgcatagccttggcacggggcacaccgcacttcaccgccccgtctgccaatgcctccacaaacatgtaggcataggcggggccgcagccggacacggcgctggccgcatcgatcaggttctccggcaggtcatccagcaggccggattctgccatcatagttttgaaggccgccagttcctccgccgttacacggtcatttgccgacaccagcatcagcccctgtcccacggcgctgggggtatttggcatgatgcggatgatcttcttctctccgcccagcatctccgccaagcggtccagactgacgcccgccagcatggagacaaaaacagcgtcagacgccgcaatgtcctctgccagctttgccgtcacaccggaaaacatctggggcttcactccccaaaacacgaatcggctctcccgcaggatcgcttctgccgtctccgcagcgcagccgatggatgccgccgcctttgcggagtgctccgccgtggagcaagccacggccaccgccgccccgcccacggttttcactgctgcccgcgccagcgcgccgcccatatttccagcgccgataaaaccggcctcatactgatatgccatatgcctctccttaccgggtctgtccactgccccgaatgatgtattgataggtgctcagctcgtccagccccatcgggccgcgggcatggagcttctgggtggaaattcccatctcgcagccgaggccgaactcgccgccgtcagtgaaccgggtggagacgttgacgtacaccgccgcgctgtccactccgttgacaaatttctccgcgttggcgtcattctccgtcacgatggcctcgctgtggtgggtggagtgggcctgaatgtgctcgattgcctcgtccacgctgtccaccactctgacagccagaatatagtccaaaaattccgtgtcgaaatccgccgggccagccggcgttccgggaatcacggcggcagcccgtgggtccagccgcagctccacggggatctgccccgcggctgtccgatcctctaccagtgccttccgcagcatgggcaaaaaccgctccgccacggcgctgtggaccagacacacctcctcggcgttgcacacggaggggcggctggttttggcgttgacaatgatcttcaccgccttgtccaaatcggcgtattcgtccacatatacatggcagataccggtgccggtctggatgcagggcaccgtcgcctgctccacgcaggcccggatcagtcccgccccgccccgggggatcagcagatccaccagtccgtccgccgtcatcagaacgcgggcgctctcatgactggtatcctccagaatattcacgatgtccgggtcgccgcccacggcggaaatcccctgcttcagcgcctttacgatggcggtggaggtgcacacggcctccttcccgctgcggaggacgcagacgttgccgcttttcacagtcagcgccgccgcatcggaggtgacgttggggcggctctcgtaaatgatcgccaccagtcccaagggcacctgctttttatagatggtcataccgttggcgtggtgtgtctccgacaaaatccgcccggtgtgatccggcagcttcaccgtggcccggatgccctccgccatggcagcgatgcggccctcgtccagccgcagccggtccagcatcacatcggaaatgtggccccgtgccgcttccagatccgcttcgttgcaggtcaggatctccgccgtgtgttccacgaggctggccgccatggcggtcaggaggcggtttttcgtttccgcgtccgcgtcccggaggacgctccaagcggctttcgttttccgaatgatatccaatgtggtcatttgctcaccttctttgccaaaaatcgggtgccgatgggttctccctctacgatgccgtacagcagatccgggttccagccgttggcgatcaccatttcgcagcctgcctccgtggcgatctgcgcggcatggagttttgtcaccatgccgccggtgcccagttcggagccgctgccccccgccagagagaggattttctcgtcgatctctgacacttcatggatcagtttcgcatccgggttttgatggggatcgctgtcatacagaccgtcaatatccgacaggaggatcagcagctccgctctcgttgtggcggccaccacagcggaaagggtatcattatcgcccacggcgatctcctccgtggaaatcgtgtcattctcgttgatgatgggcaaggcccccagctccaacaggcggtccagggtgttgtggaagttctccttccggctgccgccgtcggcgatgtccggcgcggtgatcagaagctgggccaccgtatgattgtattcggtgaacagcttgtcatacacatacatcagctcgcactgtcccactgccgccgacgcctgcttggttggcatatcgtggggccgctcccggaggttcagcttgccgaagcccatggcgatagcgccggaggacaccagaatgatctcgtggcccgcgtttttcaggtcactgagcactctgcacatccgctccacccgctgaatattcagccgcccggtggcataggccagtgtggaagtccccaccttgactacgattctcatagatcgttcccctttccatccgccgcactcggtttcttcaggattcagcgccgctgtcaagaggcttcggcgccgccctcttttttgccgattttataccagaatgccgtatccgtcaaggcgtccggtcctccctttgacaatttttacaaaaagctttacaataagggaaaatttgtgtatacaggcgtctccgacgccgggaaaggctgatcctatggaacgttcctccggtattctgctgcccctgttttctctgccctccccctacggtatcggcactatgggcctcgcggcttatgactttgccgatctgctccacgccgccggtcagcggtactggcagatgctccccctcggtcccaccagctacggcgattccccctaccagagtttttcctcctatgcgggcaatccctatctcattgatttggatctgttgatcgaggatgggcttctgacggagcaggaggtctgtgaccgggactggggagaagatccccgtcatgtggactacggcaagctctatgaaaatcgtctggacctgctgaaaaaggcggcggaacgaggctggatgcgggatagcggcgcagtggcggcctttacggagaaaaacgcctcctggctgccggactacgccctgttcatggccctcaagcggcatttcggcatgaagtcctggcaggaatggcccgatgaggctgtccggctccacgatcctgcggctctggcccggtaccgggagctgctgcgggaggatgtggagctgttcacctatatccaatttctgttcttccgccagtggaccgccttgaagtcctatatcaacagccttggcatcggtatcatcggcgacctgcctatttatgtggccatggactccgctgacgtctgggcggaacgatccatgttccgtctggacagccggggcgttcccacagaggtggccggtgttccgccggactacttctccaaggacggccagctttggggcaatccgctctacgattatgacgccatgaagcgggacggcttcggctggtggatccgccgggtggacggcgcctccagactgtatgacgtgatccgcattgaccatttccggggcttcgccagctattgggcggtgccctacggttctccgaccgccaaaaccggccgctgggtcaaggggccggggctggatctgctgaacgtcctcaccggctggttccacggcatccgcttcatcgcagaagatctgggtgagccttctcccgacgtgacgaagctgctggcggattccggtctgccggggatgcgggttctggaatttgccttttcccccacagcggacagcgcctatctcccccataactgcgtagagaactgcgtgtgctatgccgggactcatgacaacgccccgctggccctgtggcgtcaagaggcagagccggaggagatcgattttgccgtgcagtatctggggctcaatgagcgggagggcttcaaccggggcgtgctccggggcggcatgacctcccccgcgtccctgttcgtggcccagatgcaggactggctggagcttggcgaaggcagccggatcaacacccccggcacaggccgggacaactggcagtggcggctccttcccggtgaactgacggtaaagctgatcggcgacatccgtgagatgacccggatctatggccgtctccccgccaagcagtccaaaacttaagcgatatacgaaccgtccccggaggcttgaaagcctccggggacggtttttgaactatttggcagaaaaatctgctttacagacggttttacagttttttcagatgctttccggcagccttcagcatcagcttcttcataccgccctcgaaggctacctccgccagggcgtcgccgcccataggctttaccgacaccacagtgcccttgccgaaagcggtgtgctccacctggtctccctgactgagctggatcagtcccaccgacggtgcggcaggggtactgccccggctgctggtgcggagggtctgggccgcgggtttggtgctcttgtaggtatggacgccgccgctgacataaccgccggaacggcccgagcttccgttgtaagaactgccgccaaaagaacctccgccgaaatcatcgccccagcggcttccgccgaagctgtcctcgtcataggtgccgaatttcggctccggcttgctctcccagcgcatatcctccgccgggatctcgtctaaaaagcggctggacttgttggcgctggtgcggccgtagagcatccgctggcgggcgttggtcatcaccagtttttcccgcgcgcgggtcatggccacatagcacagccgccgttcttcttccagctcttcctcgtcatacatggaagccgtgccggggaagatcccctcctccatgcccaccacatacaccaccgggaattccaagcccttggcagagtgaatggtcatcatggtcacacagttgtcatccgcctccacactgtccagatccgtgtacagggcgatctcgttcaggaacccggacagggtggcgtcctccgggtcctgctccaaaaagcccagaatgttggacttcaattcctgcacgttttcgatgcggccccggctctccatgtcctttttctcctccagcgcccggacgtagccggtctggttcaggacttcatcgtaaaattccggcagggccagcgtccctccggcccggcgcaggccgtcgatcgaatcggcgaactttgtcagcttgcctgcggcggttttcagggtggggaacagatccgcgttgcggatgatctcgtagagagacgccccctgctccgctgccagctccgccaccttgtccatagtggtcgcgccgatgccccttgcgggcgtattgatgatgcggcgcagccgcagatcgtccatagggttattcagtacgcacaaatacgccagcatatccttgacctcggcgcggtcaaagaacttcatgccgcccacaactttataggggatggcgttgcgcttcagggcgtattccagtgcgttggattgggcgttcatccggtagagaatggcggtatcccggaagttccgtccccggttgacccccatgaggatgtccccggccacaaagtttgcctcgtccccctcgttaaaattggtctttactgtcaccatgtcgccgctgccgttgtccgtccagagggtcttgcccttgcggccctcattgttcttgatgacggcgttggcggcatccagaatgtgctgggtggagcggtagttctgctccaggcggatgacccgggcgtccttgtactgcttttcaaagttcaggatgttttcgatgttggcgccccggaaacggtagatagactggtcatcgtcgcccaccacgcagaggtttcggtgtcccccggccagcaggccggtgagaagatattgcaggtggttggtgtcctgatactcgtccaccagcacataccggaactttttctggtagtagtccagcacctccggttccttttgcagcagcgtgacggtgtggtaaatgatgtcgtcaaagtccagggcgttggcggtgctgagcttttgctgataggcggcgtagatcttggcgatccgggtatttttccaatcgtttgcagcttccgccttcttgcggaatacctccggcccctcgtagcggtccttggaggcgctgatggcggagaggacgctgcggatggggaaggccttctcgtccaggttctgctctttcagaatgtccttgatgacccgcttggcgtcgtcggtatcgtaaatggtgaagtccttttcaaagccgatgcggtcaatgtcccgccgcaggatgcggacgcaggcggagtggaacgtggaggcccacacatcgttggcggcggggccaagacgggccgccagccgctccttcaattctcccgccgctttattggtgaaggtgatggcgatgatctcccatggccggggggcatccacggcgcagagccggtggacccggcgaacctcctcaccgtctggccgatccgggaagtgctccaaaaagtccagatcctcctccgtggcccagtcggggacctcgtcgctgtcgctgccccggccataggtcagcaggttgtagacccgctggatcagcaccgtggtcttgccgctgcccgcccccgccagcagcaggaggggtccctcggtggtcatggccccttgacgctgcatggggttcagccgggccagatcccgggcgatcaccgctttccgggcggtcacataccgttgttcaaagtcagtcatactgttctccgttctctctgttttctcaaactgacctctattttacggcaaaaagcggccgcggtcaacggcggaaccgccgatttttccgtatccgttttgtaatcaaattgaggttgacatttgtctacctttttgctacgctgatggtgtaagaggtagacaactgtataccaagcgaggtgcaccatgaaaattgatctctccaacagcgaatggaagctgatgaaccgcctgtggcagaccgctcccatgaccatcacggaactgaccgccgccttgcgggaggacaccggctggtcgaaaaacacggtcatcaccatgctctcccgtctggagggcaaggaggccgtccgccacgaggaaggccgccgggccaagctgtatttccccgccgtgggccgggaggacgccatcgaggcggaaaccgagacctttttggacaaaatcggcgggctgggcctgctgatgagcgccatggtggaaaaaaacgccctgacagagaacgacattgcggagctgtccgccattttggagaaagcgggtggaaaactatgaaagagatcctgttaacttcttccgttctgatccttgccctgctgcttttgcggctgctgttccgaaaaaccatctcccgccgggtgcagtacgccctgtgggggctggtggcgctgcggctgctggcgccggtcagcctgcccgccatggagcacaacgtcctgacggcggcggagccggtgacggcccggatcaccgccccggccctgtatgtgaccccctaccgggaaaccattgtctccgccccgccgggcgtcttccagacccccgccccctatcaggccttccgggtggacaccgccacagaggacagcaccgtgacgtttaccgacgggaaaaatgtcacccattccatcgagtataaaagtcagatccctctgacccccgttctgaaagccgtctggcacaccgggatgtatgtcatggcggcgtggttcctgcttgcgaacctccgcttcatgcttcgtctccgccggagccggaaaccttacccggtggaaaactgcccctatccggtgtatctgacggcggatctgccctccccctgtctgttcggcctgtttcaccccgccgtctacctgacccccgccgccgtggaatccccggagaccctgcggcatgttctgatccacgagaccacccacgcccgccatctggaccccctgtggagcctgctgcggtgcgtgtgtctagtggtgtactggttcgacccgctggtgtggatcgccgccatcgtctcccgccgggactgcgagctggcttgtgacgagggcgcgctgcagcagctgggagaatcggagcgcatcccttacggtcaaacgctgctgcggctgatccccgtggccggacggccggaaagccccatgctctccgccaccaccatgacggcgggaaagcgggaattgaaggatcgcgtcacccgcatcgcggagaaccgccgcaccgtgggcgtcgctctgctggcggtggtggccgccgccgcgctggtatgcgccctcaccttcaccggggcgaagccctccgtgcggcctctgaccggcgaggagctgtccgagtatgcgctggcgttcaacaccgctgaccgctggcaggactctgccgggaacgactgcaccctccgtcccgtccagtttttgacctccgtctatgacgatcccatgaagatcgatatgtatcacctgttttacaacggcgtttcaccggaacagccaatttccgccgcagaacggcaagagctggtggatacctgctatgacggctatgacccggaggtggatctcatcaaaatcaccgcggagcaggcggatcacgttctggtgcactgggtcgatctgcccctggcagaaaccgacgcgctgagtatgggcagctttgcctatcttgcaaattatgacgcctattaccacttccacggagacaccaacgcccccggctccgtctgcttctatgccggagagtgcagcggcaataccgtgaccctttactaccagccggagcaatgcggcgtgcatctggtggacaccgccggatccggggaggaggtctgggcaaaggttacggcggaaccgcagtccggcggcgggctccgcatcctctccaaccagatctgcggcaggccggatgacctgctgggggtgacccgtcccctcaccggggaggagctggccttcttcaacacggaatttttcaatcacgacacggatgctgacggcgtggtgcgggccaatccccacaaccagttcctcacctgcctgtacaacgtgccccaggagatcaacctgtacgacctgttctatgacggcggcggagtcagggaggcgcccagtcaggaggagctggaacagctgggggtgctggcggaggacggcagccagatctgccccaccgacaagttcacccgggcggatatggacgctttcctgctggagaacaccggtttgacgctggcccagaccaatcaggtggatctggacgcctttgactacctgccggagtatgacgcctactaccacacccacggggacaccaattaccgctccgtcaccttcaccagcggccagcggcggggcgattatatccagctctactggaaggatttctattacggcggcgagaccaacgagtgcgtcaccctgctggatcggggggacgggcagtactggttcgtgtcccacctgctgctggacggcgacgtgccctccgcctttgcctatccggatgaggagccctggatgacccttcccctcagcggcctgacgccctatcagccgcagaaaacgaccctgacccgccactccatggactgtgaccagcggggggccggattcatcattgacggcaccgatggcggggaatactccatccggatttaccgctccaccgacggcaatgtctacgcggcggtgatgcagtcggaagccgccggacgggacggcatgtcggaatgggaagcggatgtgttcttcaccttccccaacaacgtggacgtcagcaacgacgcggagagaaccgatctgttcttctttgaagacctgatggggtacagcggcttcacagtcacctacagggactacctctccggcgggccggggcagggtggccagatcggcgaagtgacggattactactatctggacggagacggcgtcccctgtctgctggcccatgccaagggggacgcccagctcatcgacctggacggggacggggaaaatgagctgtgcgccgcctccggcgtttccgggcagttcttcttcctgcgggacggccggtattacgaagccgacgtcaaggctcttttgcaggacatctggccggaaatgaactactgggatcacgccagctgggatctcaactaccgccgcctggcagtttccggctttgtaaccatgccggagtgggccacggcggagcatccccagcccaacgccgatttcacccgctatctctactaccgggatggggcgctgctggtctacaagcccgataaggacagccagacagcggatcatgtagtcggaacgcccgatgtgccggagccggtgctggccgccgccaaggccgccgtgcagaaagcctatcaggactacaaaaacggcggatacgattccggcgccgaccttgatgactggcgggtggaatatgtggcggaggactggtacagggcttatcccaatggaatgcttatcgcctataacctgaattatgagtatcatgcccaaaagcccgccaacgtcacgctggccggcggggcctatgtggacgaggacggctggctcatgccggattacccctactgccattatcttttcttcacagaaacggatggacagtacaccttcctggaggaatggatgctcaatgacggcggtcccggctcgaaggtatttgacgcggagatgcagcgctgggcggtggaactggggttgtcctccgtggcggataccacgccggaggaattgctgcaccagctttatgacggcatgggcggccaattcctgacccagctcagcaccatgagcgaaacggaccggcaaaccgtatgccagaagctggatgtcattttgcaggagggcacagcggagcagcagagcctttatttggatgcggtgcagaccatggcgtggtgttctcactcctttgacggcgctcagcgggaggcctacgactactttctggagcattccgcccgctcgtctcaggcggctcagcaggcccagcagatcatggacgcgctggtgtcggaggggacgatcacgctggaatactgggaaaacggctctgtgaacacccgcgcgctggacccgacccaaggtgtgacgcccctgcgggccgccgccttttccgacagctttttctgggcggaggccgcccccatcgaggacggtgctctgccggagccgaagctgaccctgtcctcccggaacggcgacatcaccgttaccgtctgggggccttgcccgcaggtatactgcgtatatcaggaccgaacctacgcctttctggcagcaggcaccgccaccggctttgacggcgatcgccccttcacctacctgcggaaatggtatgatgacgccaaagcacagtaattgccttacatctgcgggcccgaaatttttctcccggaaaatttaagaaatacgcaacatttccgttggtcaaaccgtctataatggtgaagtgatattccgcggtgaaaggccctgtgcgccgcctttcaaaaatacgctcccgccgccgcgggagaaaaggaagtatcttatgaaacgtctgtgttcccgcgccgtcgttcccttggcgatgctgcttctgtccgccgtcctctgcgtgtacgtctaccggatgccggaatctgtggcggacccgctgccggtcctcatgtatcaccacatggtcccggacgggcaggactgcaatgacatgaccgtgacccccagcaagttccgcgccgacttggagaccgttctggcgatgggctatacgccggtgctgccccgggaattggccgccggggacgccctgccggaaaagcccatcctcatcacctttgatgacggctaccgcagcaactacgatctggtgtaccccattttgcaggaatacggcgtgaaggcctgcatttccatcatcgtcctcatgccggatctgcctacggacaacttctgcacctggaaccagctgcgggaaatgacggcctccggtctggtggagatcggctcccacagctaccgcctccacaatttaggcggcgacggcggcaattttgagtccggcggggccaacggcgtggagcgccgccccaatgagtccgacgcgggtttccagacccgcgtgctggatgacatccaactgagccatgaccggatcgccggggagctgggcggcgtcacctgcttcgcctatcccttcggctgctccgacccggatgccaaagcccttgtggacgaattatttcctgtgaccctggtgaccacgcccaagtgtgccgatctggccaagggactccacgatctgccccggttcactgttaccatgaagaccgatctgggaaagcttctgcgctgaccatacattgactcccgcctgcgcttctacgcaggcgggggcctttgttttcagtaggagcggttctctcgcggtgcattttttactgcgggcaactgtcattctttcccttgactttttgtcagcaaagctttaaaatagtaaagtagcctccctgtgaggggtttgtttcccccggaagtccgggatcagatagaagccgatagcacgggccccgatcccgtgcggtttttttacggctggatgggagaaaaacatggaacacaagaaaaacaccaagagctttgcgagccgctggggctttatccttgcgtccgtcggttcggcggtgggcatggccaacgtctggggctttcccaataaaatgggcagcaacggcggcggcgcatttttactgatttatctgctgtttgtttttattttcagttatgtgggccttccggcggagtttgccatgggccgccgtgccgccaccggtacgctgggcgcttacgaaaacgcttgggacacccgcagcaagtctgccggcaaagtcggcggtctgctgggctggctgcctctggctggctccctgtgcatcgccatcggctatgccgtcatcgtcacctatgtgctcaaggctctggtggattccctgctgggcacactgctgaccacggacaccgccgcctggttcggtgccttctcctccaccccctactccgtgatcccctatcacatcgttgtggtggtgggcacgctgctgacgctgtttctgggcgcccgcagcattgaaaagaccaacaaggtcatgatgcctgtcttctttgtgatcttcctgatcctggccgtgcgggtggcccttctgcccggcgctgcagagggatatgtctttatgttcaccccccgctgggaggccctgacgaatcccatgatctggatctgggctatgggtcaggcattcttctccctgtccgtcaccggcagcggcatgatcgtttacggtgcgtacctctccaaggacgaggacgtggtgggcgtggcccagcacacggccctctttgacaccattgccgccgtggtagccgccctggttattatccccgcctgcttctcctacggtctggacgtgggcgccggtcccagcctgctgttcgtgaccctgcccaccatcttgcaggacatccccatgggtcagctcttcgccatcatcctgtatatggccatgattttcgccggcgtcagctctttgcagaatatgtttgaggtggtggcggagtccctgatgcacaagttcccgaagctcaaccgcgttaccgtcctggtactgctgggcgcgctgtgcctgggcttcggcatcggcatggagaccatcagcaagtggggtccctggatggatctggtgtccatttatatcatccccatcggcgctacactgggcgcggtctcctggttctacgtgatgaagaaggacgccctgctggacgccatcaacaccggcagtacgaaaaaacgcggcgatctctggtacaatgcgggccggtatgtgtacgtccctctggcgatcattctctgctgcgtggccctgttcatgcacgttgctttctgatacccacagaaaatttccacgcatatagctaataaaaaggacccggcggctgaaaatcagctgccgggtctgtttcgtataaaaggtttcatcaatcgtagcgcaagctcaaggtagcggagtcctcgccgttccgcaggaagggcattccctcgccgatgcgggagcgctggaagtacagatactcgccagagggggagatcagcactgggaaactgccgctgagggagctgcccaccccggcggacatatccagccgcaggcagtcatcctccatgcgccatacaccgaagaatcgcagatccatctggttgtcatagcactcgtacaaattagccagccccgcatagtccgggtcgcagtcgccataatgcagctccagcgtccactcatcgcaatcccacgaggtatcggccagccccagatccgtaggaggccaccaccaatcgtcaccggtcggctcccagccttcgggatggtcgatggcgatggtgttcgtatagatggagaagtcgaacagcagcaatcggccctcctcgctggcaggcaggatgagatcgccgtacaggtcctcctgcggataccagttcaccaccgtgccgtcatcggcaacaaggttgacctccatatccggctcctccgggttcacgaacagcaaaacaggctgggcatattcctcccggtagaggacttcgtccgccaccggatgcaggccgttgccctgagactgccatgtgatgtggttcacggcaaggctggtgttctctccccgcggaatgacgcagaacagcttgccgtaccccggaccgaggacccgctccgaggggatggtcagcatgaccggcatctccgccgtcaggtcaaggcagttttccagcatccagtccgacagcttggaggtgtcccccttctcccggtagccgagataggccgcggcgccgggatagccgccgtattccaaatcaaagcccagcttatcgagacattcctccaccagctcctggtccacctccgcttccggttcggaaggcttcacaggatcggcctgaccggtctgatcggtcctgctgtcggagatcgtctcctttacgccgccgtttcccgctgccggggccggtttctttttccctccgcaggcagccaggctaagagccagcgtcaggcagagaagtgccgacgccagccggtgcaaagtcaagcgcttcatgattctgcctccttctcagaatttgccgctgcggccgtgaccgccgccgccgctgcggcttacagttcctccgctgcttctgccaccgccgccggagttgctctcgatcttacggcgggtctcggtggtatgggtgtagtggtcatagctgtccgtcagcttcaatccaccgcccgccgtggtatacacgttggcgtcaacacccttgcgcacggacttcatctgttccttcaggatcatgcacaccagaaatgcgatcaggcaggagactgccaccgcaatgccgatggccggcagggggctggaccgcacaggttttccatcctcagccagagtcagaaactcgtcacaggcggcaagatagctggaaaccccggcataccagtcgccgccgctgaatttatccaaaaagcgatcctccagctgtttttcgccgtatcggtcaaaagcatactccgcccattcgccgtagacgaacatggcgtagtcccgctctttcatgctcagcatgatgatgacgccgtttcggtcctcgcccacaccaaggccctcggcgtggtagatctgatagagggcggtatagggatcgtcaccgtagccgtaagctgtaaagtcctccacaaaaagggtatagatgccgcagctgcggcggagggcgatatcctcggcccgatcctccagctgttcccgctccccgtcggagagcattccccgcagatcgaacacatagttcatgccggtatcgcccagctttgacgcttcgccggactggacggtctcgggctgctgcgcctccgttgggaagtccgcggagagatagtccgccgccgtcgccgccatggcatttattgcctgacagagcgcatcggcgctcacggtcatatccgtgccgtcccacgcccgcgccgtcatatacggctccaccgcgtcatacaccaggccggagagttcctgcccgtcgccccgcgtctcgctcagcatcgcgtagacgcaccagtcggtctccgccagggtgtaagaaccgtccgccagaggctccatcaccagcgtcagcgagatgccgtccttttcctcgccccagccgtagccggaatctttgtaaacatatgtggcgatatctccggcggtggtaccctcgctcacatcctcattggtaaatatgtccacccgcaggtcaaggtgaagcgcctccgtcaactggggcagggtgtactgacccagatcggacaattcgtccgagcccagcgcgtcggtctcatcgtagatcgcgccgtattccgtccacgccagagcggggacgcacagagtcagcgtcagcaggagcgccgtcagcaaagctgtgacttttcttttcatgtccgtccctccttatcgcatcggcaggacgatgaccgaactcaatacggacagcggcacggcaatggcggcaaacatcccccagaatcgccccttgtccacaggcaggtctcctaccagctttccggtctgtccattcatggcgaagatgaaatccttgccctgccatttggtattcagcagccacaccggcagcagcgcgtagtggaccttgccccgctggatgtctgcgtgttcgcccctcgggaaacaggtcgcgtatcccgttacggtgccttgcagcgcctttttcaagctgcccagacagcggacatcggcccgttcccggctcttgtccgccgacacgtcgaacttatccgccaggaagcccggcagatacgccgtggagaagggtttcaggtcatcgtaattgtaaggctcgatggaatccatgtgatcatccggcattttagtcgaggcgtccaccggtaccttttcaaagggcatcgttccggcacggtacacgtcaaagtgctccgtctttatcacctcatactcaccctcggtgcgcttgtgggaccgggtacactcatagtgggcattgccctccgcctcaccgctgaacagccagaagggtacatagaccccctggatctcctgtaagtgattttccttggaaaagctcttgggaaggagcaccttgcccctgtaatgcttcttgagctcgcggatggcgtcctcgcggctgagtttgaaggggatcacgaaatccggcttcagcgttcccgcaaactgccccggcaccaccgttgggttgccgcagtaagggcaggaggtagccgccgtgcttgcgtcacagatcagctccgcaccgcagcttgggcagctgtaagccttcatgccgtctccctcggcaccccagtcggcgctgaggtccggcaactcccagccgccttcctcggcagcctgccgttccgctgccgtcttttcctcagcagactgctgcgccgccgcggccttttcttccttttccgcgtaaagcgcctcgatctccgctacatcataggtagcaccgcagtaatcgcactccagcttgccggatgcgcccacaaaatgcagcgggccggtgcagcttgggcattgatagttggtcacctgtgctgccatgcttgctctcatccttctttcttcatgttctgttcagcgcccgcccgtgtttgcgggcggacgctgagtgtgtcgaaaaagttttttctccccgcattgtgggggatacaccgtcggtccatccggttttcggtcgtctcacgcccaaaaaccggggcctgtctttaggctctgggcgcgccgcaatactcgcagaactttccgtcgttctgtccgccgcaggcggggcaagtccacgggccggccgctgccggagcgggagcgaaggtctcctgctgctgcatgggggcctcctgctgcatgggggctgtctgaactgcgccgccgccacgggcggtctccatcacctgaagcagcgccgctcggatctcgtcgcccatttcgcggtacttgcgatattcccgattgctctccggatcgaagccggcagccatggtattcatccggcccacagaattcatctgtcccatcatgggacgctgtgtcatgccgctctggggccgacctgccataggacgctggtccatcataccctgctgccccatcatgggccgctgcatggtgttctgcggctcgatgtacacagaactgttgttcaggcggaacttcatttcgtcaaagtagaggttattgacggaaatgatcacttcaaagtcataggaatactcgtagcgaggcgggttgtagctgacctccttgccgtccggcccctcccgcttctgctccgtgcggctctcgtcaatgtccacgcggcagctggtcagcgcggtgtagtccagaatatccgggttggcgtccgccagatcccgggcacgggtaacggtgaaccaacgatgctcctcgtccagcaggaccttacaatcctcgccgtaggagcgggtgttgcggaactgggacgccctgccccggttttcctcccggtaggccagctgccgcttgatgtcctccaccgtagagcggcggcggtcactgaaccagggagagagctgcttcgcgcagtccttacagaggttgccgtcttccagtttctgattgcccaacagtccgatctactcgccgcagatgtcgcagtatttcttatcaaacaatcccataatagcttcctcctgttgttttcagccgccgtaacggctcacattgcattgtcacccggaaccgggatcttgtcccaggccgtggctcccgcggccggggacggtattcgccaaaaaatccgctattcgctcttattcttcaactttttgaagctccaccactttgtccgccgcttccgaccagtccaccgtcagctccagtctgccgctgtcctcgccggccccggcacagtggtaaacgtccaggatcttccccaattccgtgccgtccgccttctggagaacacagttgtctaacatcagccctgtgtcctgcatcttttttcgcgggatgtaggtgaagtccagcggggtttccagaacggtctcgccgtccaaccggagggtcaagccgtcctcctcgctgatgaccgcctgccagctgtcctccgggctttcccatgttccctccagcactggccagaggatggaattgtccacataagtgccgtccccgtccagcaggaacaggttttgatccggattctccatgccattgcccccatccatgatctggtccgtgacaaaatgcttatacaggcccgaaaggacgatccctaccagcgcgcccgccaggaaaatccaaatcatccgccgtttcattacacgatgtccccgtcatcaaaggggtcgccgcactcagggcagaacttggggggatgctgcgggtcggcgggctcccagccgcacttgtcacacttgtactgaggaactccggcaggcttgggcttgccgcactcggcacagaacttgcccttattcaccgcgccgcaggtgcaggtccagccgtccgctgcggcggcgggcttgggcttgccgcattccgggcagaattttccggtggcggtggcgccgcaggcgcactgccagctgtccccggcgggcttcggctccggcttcttgctgccgcagttggggcagaagttaccggtgatgccgccctgaccgcaggtgcaggtccagccctgcgccgcgggagcgggggcgggctgcgccgcctgctgctgggcctgttgctgctgccccatctggaacaggttctgggcgttcatgccgcccatctggccggccatgcccatgcccataaaggccatggcgggaccggcgccggtgttggcggccgccgccttcatcgcctcgccctgagagccgacgagatgcgccgccgcccgggtggggtccataaaggccgcgttgcgctgcagctccttgatcatctgctcgtcttcctcattggccttcacgctggaaacgccgaaggagacgatctccatgccgcgcagatcccgccacttgctggaaagctgctcgttgagggcgtcagccagctccagagtatggccgggaagggcggaatagcggatgcccatttcgctgatcttggcgaaagcgggctgcaaagccgtcagcagctccgttttcatctgaccggcgatattttccgtcttgtagtcctcactgacgttgccgcagacgttggtgtagaacagcagggggttcttcagccggatgctgtactcgccgaagcagcggatgccgatgtcaatgtcgatgccagcccgctggtccaccacccggaaggggacggggctgggggtgccgtacttgttgcccgtcagctccttggtgttgaagtagtagacccgctgatccttgggagcctcgccgccgaaggtgaaacgcttgccgatattctggaacacgttcttcacgctctcgcccagatcgccggagaagatgctgggctccgtggacatatcgtaggtgtactcgccgggctcggcgcagacgtccaccaccttgccctgctccacaatgagcatacactgtccgtccgcaatggcgatcaggctgccgttggtgatgatgttgtcatcgcccttggtgttgctggagcggcccgtgaccttctttttgcccttgaccgccagcacgtcagaggggatcgcctcgcaataaaagtattccttccactggtcggccaacacgccgccagccgcgcccattgccgctttgatcagtcccataattctactctccttttcctgttgttgtatttgatttcagcattcgcttttgattgcttcttataaaatcgcctgttttttaggtaaaacaaggcctcagctccctcccgtcaggaaggtgtctccactgacataaaacggagcctgatccgtaatgggccaggtgaaccagcttacatcccagggccgcttcataaacaggcacacccgcgccgtatcctccggaatggtgagggagaagaacagcggctcattgatcttgattttcccctcatacaccaccttctccgagatccaactttgttgggtgccgtcatcgttcagcaccggcgttccaacgctgaattggatgtccgtttcgtaccaccggcccaccagcagcagcttattctgtccgttgggttccaatgcgttcatggggatcaccgacagcggctccgtcacctcggcgggcgggtcccgccagaagaagatcagcgatttctccggctcccctgtcatggcgttctccaaggtcggcggcaggaagccgctggagcgcatataggtgacggtacggaccccctcgcccccgttcttttcataaggcatccgcacaagcaggctattccggttcgtcagggcggcgaaaaacgccgcgccagtctcctcatcggtcagccgcacgctccatatctcattggacagccccggcatcagcggttcctctatctgctccgccagcagatgcttttctgaccggtattgcggggtgtccgtatccagcccggcggcgtggtaccagtccgcccgcatcacatagccctccaacagatcggaccacaggcgatcaaagcacagcatagaggcgatatgttcctcgccgggcctgtattcccggccgtcctcctcatagtgggtcatgcgccacgttccgtagaggtccgcgatccccatctctccgccggggcccggccgctctgccggggcaaagtagaaggtatctccgtaaggggtctcgatcgccagagaatcggtgctttcgatccgaccgtccaaggtcagcggctcgccggtattcatcgttcccgtcaaccgcagggtgctgtccgcgcccagccaccagtttccgtcgagcaggctggtattgtagtacgagcctaacacatcccaaaactgggccgttccgtcttcgttgagatagaggtccgcccaccacgcctccgtgggcatagcactggttttcatgcagtcgttcatggcatcatagctctcgtgccgcacagcggtccagtagtccgcgctgaacggtgtggaggtctgctgccgggtatcctccgcgctgtcggcagcagagggtggcacatccgtatttgtgtccggccccggtgttttgccgcaggcagtcaggccgagccccagaagaaacgccaagaaaaacgcggtccatctttttttcacagctgtgcctcctttacgctcaacagtcctgcgtcaccggaatacggatgccgccaagaggatcggattattcccggaggggccgttcgccggcaaaggacttgaagctctgccaacgggacggtctttaagcgggtcctgtcggctccctatcgtttttaattcgcagatcatatggcttaacttctgtataccatggaatccccgttttgttaaccctaatttctccaaattagggtcccaaacatgaaatttcccggaaaaagccgaaaaagcactgctcgttcacgaacacccgttccattttatggttcttcttacaaaaagcgtatgtcagcccagcggcggtcatctgccctcactttcgctccctcggctgttatttcgcacccccatagaaaaaaaggagccggaacgattgctcgttccggctggaaactatgtggcaggcgcagcacggtttgccccgctcagagcgtctccttctgtaaagcctgcgccagtgagagtaccactgcgcccagatcctccatagcgtggacgaaatcgaaaaactcctccgtctggccctcccggaacagatgatccgacacagatttgaccgccacgaagggcacattgttccgcaggcacacctgggcgattgcgccgccctccatctctgtcagcagagggtggaacgtgtcccggatgaagattgcccggtcgctgcggacagcaaaccaatctccggtggccacccgccccagcgccgccttgcggcccagtgctgccagcagttccacgcaccgctccggcttccaggtggggaatgacacccggttcaccgtggataccaatcctacgggatcaccgatggcagaggtgtccacatcgtgctgcacaaagtcctctgcgaccaccaggctgccggtgggaatctccgtcaggcatccggccactccggcattgacgatcatatccacaccgtacttcagacacaggatctctgccgccatggcggcattcaccttgctgacaccgccggcgcaggcaatgatccccggtgcagcctcgtagaacggcacaccggacacggtctcaaatgcctccagctccttggcccccggcagggcatgaaactccgcaggcatggcaaattgcaatccaattttcattatattacgctcctttttaccgtctcatcaggctttctccaaatacaggcccttgttcccgaagggtatttttgagaaaaccgcaaattcaaaaacaagaaaccaaaacttttaaaaacaaaaagaaaaggaattcaagcaaaagcctgaattcctaaactttctggaggtgacacccggatttgaaccggggaatcagggttttgcagacccttgccttaccacttggctatgtcaccgaagccgtatgattgagtgcctatataggataccctaaaacgccccgtttgtcaagacaatttttattttttcctgacatccgaaaaaatattttacaaaggtgttcaaccgcctttcccgacctccgcccccctgtgtcaaacggcacaaaaaagtcccggcttttcactttcgattgagcggtgatgccgctttacagcggccagaccgggcagtaaaataaaaatacggcagactgccgttcatgttgtaaaatcaaccgatgggaaggacaggaggagtgtttatggtttctcaacggatgctgcagctgggcacggcccgttccgtgatccgggagctgtttgaatatggccgtcagcgggccgcagaggtaggtgcggaaaacgtatttgacttttcactgggaaaccccagcgtccccgctcccgtagaggtgaatgagaccgccatccggctgctgcgggaacaggcagacacgattcactgctacaccagcgcccccggcgatcccgccgccagacagcggattgctgactccttgaaccgtcggtttggggagcagtatacggcggacgagctgtacctcaccgtaggcgcggcggcgtctctctgctgtgtattgggcggactgacctgtcccggcaatgaatacattctttttgccccctattttccggagtaccgggtgtttatcgagggtgtcaaggggaagatcaaggtgatccccccggagccggagcactttcaaatcgacttttccgcctttgaacaggcagtcacctgccgcaccaagggcgtgatcatcaactcccccaacaacccctccggcgtggtctactcccgccagacgctggaaactctggcagcgatcctccgggctaaggaagcgctctacggccaccccatctatctgatctccgacgagccttaccgggagattgcctttcacggcgtggaggtcccctgggtaccgcagatctacaaggacaccatcgtctgctactccttttccaagtccctttccctccctggcgagcggttgggctatgtgttggtccccaagcaggtgacggacgctgatgccgtttacgcggcgacggcaggtgcaggccgctctcagggatatgtcaatgcccccagcctgtttcagagggtggcggcggaatgctgtgacctgacggcggacatcggcgtctatgaacgcaactgcgccctgctgaccgacgcacttcgagagatgggctaccatgtggtccagcccggcggggccttctacctgttcccccggtcgctggaaccggatgacatggcgttcagcgagcgagccaagcaattcgacctgctgttggtccccggcagcggcttcggcgctcccggccacttccggatcgcctactgcgtccagacggaaatgatcgaacgggcgctgcctcggttcaaggcactagcggacttctatcaatgacatagcaacggcaaaataccccggctcttttgaaaagagccggggtgttgttattagacagcgatccccgtcccttccgaagaaaggacggggatcgtttattttgcagaaagtcggcttagtaagccacaccccagtagatatcagtggtacacttctcgccgcagacggggcaaacgccctcggtgccggactgcttgagcggcatgcagcggctggaaacacctgccagctccttcatcttcagctcgcactccagcttgccacaccacttagtccgggcgaagccgcccttggtctccaccatctccttgacctcctgccaggagttcaggtcgaaggtgttgtcctccaggttcttttccgcctgagcatacaggttgtcgtgaacggcggtcagcaggctctgcacctggctttccagcccgtccagagcgacaaagctcttttcaccggtatcacggcgggccaagcagcactgtcccttttccagatcgcggggaccgatctccacacggacaggcacgcccttcatttcatactcggcgaacttccaaccgggagagttgtcggaatcgtccagcttcacccgcaggccggcagcctccagacgggtcttgatctcagtggctgcttccagcacgccgggcttgtgggccgccacggggatcactaccacctgaatgggagcgatggcgggaggcagcaccagaccgttgttatcgccgtgggtcatgatgaccgcgccgatgagccgggtggtggtgccccaagaggtctggaagggatactggagcttgttgtcccggccggtgaaggtcacatcgtaggcccgggagaacttgtctccgaaataatggctggtgccggactggagggccttacggtccttcatcatgctctcgatggtataggtggcctcagcgccggcaaacttctccttgtcggtcttgcggcccttgactaccggcatggccagcgcatcccggcagaagtcagcatagcagttgagctgctgctccgtttctgccatagcctcctcagcggtctcgtggatggtgtggccctcctgccaccagaattcccggctgcgcaggaaggggcgggtggtcttttcccagcggatcacggagcaccactggttatagagcatggggagctggcggtaggtctgaaggacgctgtgccagtggtcgcagaacatggtctcagaggtgggccggaaagccagccgctcctccagcttgtcgctgccgcccatggtgacccaagccacctcaggggcaaagccgttgaccagttcgccttcctttttcagcaggctctccgggatcagcgcgggcattgccacgttctcgtgtccggtctttttaaactccccgtccatgatccgctgaatgttttcccagatagcgtagccgtatggacgcaggatcataaatcccttcacgctggaatagtcgatcaactccgccttcttgcagatgtccgtataccactgggcgaaatcgtcctccatactggtgatctgttccacttttttgtcctgtgccatgattcttccctcaactttattccagaattggaggcaaacagtctcctttgaactcataacgtcttattttatcgtctttttcccctgttgtcaaccatttcaccccagggccagagcaactataaagcccagcaccgcaccgcagcacacctgcataggcgtgtggcccaggaactccttcagcttcacctccggcgtctcctcgctatcaagcatttccagcagctcattgatggccttggcatggcgtcccgcctcccgacggacgcccatggcgtcatgcatgacgatgacggccaggatcacgcacacggcaaaaacgggggagtcatagccgtattccagaccggaggtcaccgccagtgcggtcacggtggcagagtgaccgctgggcattccgccgtcccctgtaagccgcttccagtcgatggtgcggttcaccgccagatagataaagaacttcaggagctgcgccgtggcccaggccagcagcgcgttcatcaacaggtggttgctgaaaatatcagaaagcatagataaactccgatcatgtagtaggcgcggagacccgcgctgtctctactatacaccagacgttaagaagctgtcaatttttgccggttaaaacctttgaaatttgcaaaaatccccgcagcggcgcagaaaaaaagcaggacggccgtgatccggccgccctgcgcatattgggggttctttcggcgttagccctcccacttccagttccggacctccggcaggtcgatgccgttgtcccggatatactggcggtgctccaccagcttgtcgttcatcttctgcaccagataggcgccccggttgcccagcttgggcagacggcgcacggtgtcgatgaccagatcgaagcggtcaatgtcattgaggacccgcatatcgaagggcgtggtgatggtgccctcctccttgtagccccggacatggaggttcttgttgtgacggcggtaggtcagctcatggatcagggtgggatagccgtgataggcgaagataataggcttatccttggtaaagagcgtgtcatactcagaatcggtcagaccgtgaggatgctcggtgtggggctggagcttcatcaggtccaccacattcaccacgcggatcttcagctccggcagctccttccgcagaatactgacagcggccagcgtttccaaagtgggggtatcgccgcagcaggccatcaccacgtccggctcctcgccggcatcattggaggcccactcccagatgccgatgccctgggtgcagtgcttgaccgcctgctccatggtgagccactgggggcggggatgcttgctggccacgatgacgttcacatagttccggctcttgatgcagtggtcgaagcaggaaagcaggcagttggcatcggggggcagatacatccgcaccacgtccgccttcttgttggccacatggtccaggaagccggggtcctgatgggtaaagccgttgtgatcctgctgccagacgttggaggccagaatatagttcaaagaggcaatatcgtgccgccagggcagctcgttgcacattttcagccacttggcgtgctgggagaacatggagtccacgatgcggatgaacgcctcatagctgtcaaagaagccgtggcggcccgtcagcaggtagccctccaggaagccctcgcagaagtgctcggagagcatggagtccatgaccctgccatcggggtccaggtcctcgtccacattggggatctgttcatccaggaagcggcggccggtgacctcaaacaccgcctgcaagcggttggaggccgtctcgtccggtgcgaagatccggaagttccgggcgtccatgttcagcttcatcacatcccggacgtaggtgccgagaacatacatatcctgcgcctccaccgcgccgggagccttcacgtccacagcatagtcccggaaatctggggtgcggagatcccgcagcagcaggccgccgttggcatgtgggttcgcacccatgcggcgggtcccggcaggcgggaaggaggcgatcagttcaaccggcgtgccgtcctcgttgaacaactcctccggcttgtaggaatgaagccactcctccaattcgggcagatgcttttccgtatcaggtcccatggaaatgggcacctgatgagcccgccagctcccctccagaacgtgaccgtccacttccttggggccggtccagcccttgggtgtccgcaggacgatcatgggccagcgggggcggctggcgtcgccgctggtacgggcatattcctggatccgcttgatctcacggatggcccagtccaccgtggcggccatcttctgatgcatctcggcaggctcgctgccctccacgaagcgaggctcccagccgcagccccggaagaagctctccacttcctcatggctcatgcgggagaagatggtggggttggcgatcttgaagccgttcaggtgcaggataggcagcacggcgccgtcggtaatggggttcatgaacttgttgccgtgccaggaggtagccagcgggccagtctcggcctcgccgtcacccaccacgcaggcggcgatcaggctggggttatccgccacggcaccgaaggcgtgggccagagaatagcccagttcgccgccctcgtggatagagccgggggtctccggcgccacatggctggggataccgccggggaaggagaaccgcttgaagagcttcttcatgccgtccttatcccgggtgatattgggatagacctcggtatagctgccgtccagccagtcctgcgccaccatggcgttgccgccgtgaccggggccggaaaggtagatcatatccagatcatcccgcttgatgacccggtccaaatgcgtatagatgaagttctggcccgggcaggtaccccagtggcccacgatggtctgtttcaggtccgcggcggtcagaggccgctccagcagggggttatccagcagataaagctggcaggcagtgaggtaattggatgcgcgccaatacgcgtcgatctgcttcagctgtgcaggcgtcagaggcggttttttagaaactcgggcgctgccgcgcggatttgtggtgagcttaacaggcgctgttttcttttttgcaggcatagaagaacctccttcaattatattctgattttagtataccctttattcgatacatgtcaatgctaatatcataaaaacgattacgcgtcccgcaaaatttacaattagtacaaaaattattcattttttgcaaagtcttgacgaaggtgctatactgctcttatggacacgtatgaattgatccgctcccgccggaaaactctggcactggagctgacgcgggacggacggctgctggtgcgggcccccgtgcgtctggcaaaacgggagattgaccgctttgtagctgcccacgaagactggattgcccggcatcttgcaaagcaggcggcctgcccgcccctgccgccgccggattccccggagacggaggtattgaaggcccgggccaaagcggttctcccggggaaggtggcctactggagccgggtgatgggggtgcagcccaccggcatcaaaatcaccacggcgaaaaagcggtacggcagctgcaacagtcggcacagcctgtgcttttcctgttacctcatgcgctgcccggaggaggccgtggatctggtggtggtgcatgagctgtgccacatccgggagatgaaccacggccccggcttttacgcgctgctggagcgatacctgccggactggaaagagcgaaaaaagttgttgcattagaaaagcggaggccgacggcctccgctttttgcatacctatataccttataatacgatcactcgtaatcactgaccaggaacatgggcttgatggccacgacctcgtcatattcctcctgagagacctgcacatcggcgttcagggccttcagatccgccttgaccaccgccagcgcctcctcggcgttctgagcgcggccctcccgcaggacgcggatcatccggtccagcacaacgggatgggcataccgggcaggcagggggaaatgctccggcagtaccccggccatgtccttctgggcctgctcccaagcggcggtgaccgcccgcttgttgttcttcatggtgggaatgacctgcgtaccggagaacaggaacaccaccgccaggcccagcagggtgaagtacataccaaagccctcctgccgccgccaagcaatgatgccatagatcgcggcgatcaggcccgccagtacaatggccagcgccacccacttatgggcgggattggtgtgctcattgacccgcttggccttggccgcagtggaaagccggtccgtcag

SEQ ID NO: 12236 - DNA, 584 bp, Unknown
  gut microbiota DNA sequence
tgcctcctcggcactctgggcgcggccctcccgcaggacgcggatcatccgatccagcacaacgggatgggcataccgggcaggcagggggaactgctccggcagcacaccggctacgtccttctgggcctgttcccacgcggcggtgaccgcccgcttgttgtttttcatggtgggaatgacctgcgtaccggagaacaggaacaccaccgcaaggcccagcagcgtgaagtacataccgaagtcctcctgtcgccgccaagcaatgatgccatagatcgcggcgatcaggcccgccagcacgatggccagcgccacccatttatgggcgggattggtgtgctcattgacccgcttggccttggccgcagtggaaagccggtccgtcagcttcggatagccggcgaggaaggttctggccttttccagcttctcccgggccgcctgtgcctccggtgtcagtacgtccagataccggacggcttcctcctgtgccttccgggcaaggcgctgctccgcctgaacgctgtgcagcggcagaccgggacaaaccttcgccagataggccagcagatcatccacat

SEQ ID NO: 12237 - DNA, 1170 bp, Unknown
  gut microbiota DNA sequence
atcttgcgctctgtgcggcgcaggcggacgatgtgcgcttgcgctcccgcagcaccatgatccgctggcgattataccgctgcatcatcacaaacagcaggtcatatccggcggacaaaacggaggtcacgatgaataccgggtatgcgccaaaccggagccccgccgcaatgggcagaaagctgagcagcgcgatcgtttcatggaccagctccgcctgacacatggcctgggcgacctcgtcccatgtgtgcagacgcggatcaaacagcgcgttgtcataggtgggcattctgcgcttccaccgctttaccttcagcgcttcatagaccgccatttcccacctgccgacccggtaccaccgcttgtagagatccgcacgattctgcatcactgcctgaaatgcgcctcccaccagcagccgcatgacgaggtggtaggaaaccgttccgaaggtaatggcgagcgaaagcaccggcccgtaagcggtcttttcgtagaaagcggtcaaaatgaccgtcccgatcatgaaaaacagcgcggcccgcgtcattttctttgccatatccggtcacctcattcagagaacgtgcattgtgttttcgccgctgccgagacacacggcgatctttcaaaaaacgcagacagcttgcctttgctggagctgctcggatgcgcatgtgaaatagacgctgattttcttgtctgcgcctctcggctctctatgagaaatgataccacagggctgtgcaaaaagccagtgcttccaatgcttctctgcatgtcctacagccgaagccgcagtgcgaagagcatatatttgatcttccgtcccgaaagtctggccgtcccggttttgtcccggtttgcaaaatgaccttgcaatccacttgccgccgtgctatacttttaccgtaattgaatagaaaatcttcagggcagggtgcgattccctaccggtggtacagcccacgagccgcaaggcatgattcggtgaaactccgaagccgacagtacagtctggatgaaagaagatgacaacgcaacgcagggggactgctttgcgtctatggaagttgctctgggatgtgtttgcattccggagctttgcttttacacaaggatacttgtgtctttctgccttgccctgaacgatttgttcagggcttt

SEQ ID NO: 12238 - DNA, 1776 bp, Unknown
  gut microbiota DNA sequence
agttgaagtcattggacttaatgttcttcagggtgtagacgccgttcttgtccacggtgtaggtgaaccacttgttgataacgggagagatcgtggtgttgtcgaagccgtcacccttggtcttgctgacctcgatgaccttagaggtgccgtccaggaagagggcgttggcatcggtggtcttggtagccaggttggaattgttggtatcagcgccggtgatgaacacatagttatcaacagcgtcgacctcttccagaccgatcaggttgccgtaggtatccagataaacgttgtaggtggtgtccttcaggttgatggtgtcgttgttgttctcaccggtgtaaaccttcagagcctcgttgtcatagtaagcagccttgctgaagtcatacttggtgccgccaacggtgacgttggagcccttcttgaaggaagtgatctcggtgcccttgatggtctcagcgggaacaaaggtctgaacctcgccggcggccacggtgaacaggtaagcgtcatcttcctcaaccttggaaacgtcgaagtcctcgccgctgaccttgaaggaaacatagctcttgccgtcgtcggccttgtccatgacatggaccttgccgctcttcttcaggccgtaaacggtgaagtcggcctcgtccttcttggcgctgtaatcgctgtcagcgatgcccagataggtgttgatctcggtaacaacagcttccttctcgtcatcgttcacgaagacctgagtcagaacgccggtgtcggtgccggtcagatcgtccttgttgtccttagcaacgttgggcaggatggtcttggaagcatcgttgccgtcgacataagcagccacgtcatacttgtccatggcggtcttgccgaccttgttgtagacttccttgccggaaacaccgttggtgtactcagcaaccatcaggctgtagtccacataggtgccgatgtcggtgttcttgtaggtccacttgttagcgggacggccgaaatcgtcagcagtgggctccttctccaggttggtgaagtacttctcggcgaactgcatcttgttgtcgtccttgatggtctcggtacgggcattgttctccatgtccttcgcgaccttgtcggtcttaacagtgccgttggcgatcacgatggtctggttggtgtactcaaccatggtggcgttcagggtgttgaaagcgtacaggcaggcttcctcacggttgacagccttgacaccgttgaactcgccattcaggccgtcattcaggccgatggagatggcctgcttggcaacgttgatggaccagttggcgccggtgtagccctcgttggcagcgtcatagcccagagcgcccagcagcatcttcatgaaagcatagccggtcagggagttggcgggcttgaaggtgccgtcagcataaccggagatgatgccggtcttctggcagtaagcgatgtagccagcgaagggatggttggcagcaacgtccttgtagggagcggcgtcagccaccagagcggatgcggcggtggggccaaggatcaggttgcagatgatcttggcagcagcgccacgggtcagggtgttgctgggattgaaggcaccgtcggcatagccgtcgatgacctttgcctcggacagcacgtcaacagcttcagcgtagttgatcttgctgctgtccgtgaagtccttggcaccagcgctgacggtgaccagagacatggtcatcaccagagccagtaccagagaaaggaacttcttcatgggatttc

SEQ ID NO: 12239 - DNA, 239 bp, Unknown
  gut microbiota DNA sequence
cgtgccggaggaggtcctggcccagtatcgggacggcgcgccccggcccggcgggcacttcggcctgcacaatgtggacgccatcctgcgcatccggtacggaccggaccggggcgtccgcttcgtccccgtgcagggcgagggcgcgtgcatccgcatcacacttccggttttcaggaaaggagaggaaccgccatgctgaaggtcgtcgtcgtggaggacgaggagctggtccgcaa

SEQ ID NO: 12240 - DNA, 5770 bp, Unknown
  gut microbiota DNA sequence
acgagccgtccggcaatgtgccggacggctcgtttttcgctcttctattttacggcaggtcaataggaccgtaggtgtctgccagttcgccgtccaccaggaaccgcacttcctccacgctgtccagcgacagcaaggactgctccagcgccagaaccgcctgagacagggtctccggctccggctggccctccagcaacgccgaggacaggctcacatagcagatctcctcttccagccacaccttccggaccttgaacccctctggcagcacagcggaaaggcccttggtctccggcccgttttccagtgcccgcaccacggcggacacctgcgtatcgccctcgtagagattcagtgttctggcttccgccgtcagcgcgccatcgccgttcacaaagtacagggaagcgtccacagtgcccaccacgtcctccttcgggacggtcagaatgtcacgggccaaaaacacctgccggctgcggtagtccagctcccggcccgccacggtgatccgcacacgggccacgtccggcagctgcgtcagcgtcagggtaatggcatagtccgccagagacagccccacgccggaaagggtgctgtaagccgcagagagatccacccgcagctccgttcccttctgctctgcagaaagcagggctgtgcctctgggaaaagggcttttcaacgtggggtctgccgggcctttcaacagctccgccaccagcaccgccgccagctcctccgtggaaagaccgctgtcctctaatgtccgttcctcggaccggagggcgtctccgccatcggcggaacgcagatcccgctccacaaaatacaacgcataggcgctgccgtcgctctcctgtcggacgccgactttcccgatagcgccaccgatccccatcagcagcacggtcagcagcgcaatggcgatccagcgttttttcatgagtgatcgcctccttccgcctcaggccagcgaacggtgaataccgcaccgccattgggccggttggcagcagacaccgtgccgccccgttttttcaccgtatcctgaacgatggaaagtcccaggccggtgccgcctgcggcacgggaacgggccttatccacccggtaaaacctctcaaacacccggggcagatcctcctccgggatgccggggccgttatccgccactgtcagcaccacgtcgtggtcctcatgtcgcagttccacccggaccttaccgtttttgccgctgtatttcacggcgttatccgtcaggttgtagatcacctgatagacctcccccttggtggccgacacccggcagttttcctccatgcggtaggtcagctccgtgcccttctcctgagccagcaggctcatcatccgcatgacctgttccagcaccggagccacctccaccgtctccggtgcgtccagaaggtcgctgtccagccgggtcaggcgcagcaggtcctcggtgatgcagctgagccgctccgcctcgctgccgatgtccgtcacaaaatcccggactgtctccatatccatctggtctgtctgcaaaatggaatccgtcagcaaccggatggctgccagcggcgttttcagctcatggctggcgtcggacacaaaccggcggcgcaaggtctccgtggtctgaagccgatccgtcaggctgttgaattcctctccgatctgggcgatctcgtcccggccggagatgtaggtccgatgctcgtaagcgccggcccggaccttgcggatggccgtcagcagggtgctgatcttccgggtcagcatccgggagagcaggatgctcagcagcaccaccgccgccgcgataccggcggacagcttcaggaggttgctttgcagtccctctaacagcgccgcctgctctgtgtcatattcgtaggcgtacaccgcgccgatgatccggttctgatacagcaccggagaggccgtgcggctgcggaaggccccgtcccggtaggagcaggaaaaggcgtcatatccctccaatgcctgcacgatctcggaatagaaggtgtactttccaacggcgctgccggtctcccgggtatcgtagagcaccaaaccggtgctgtccgtcaccagaactcggctgagtcccgtctcctccaccactgccatggcagccgccacgttttcctgattcagccggttcaggcccgccagagaatacaccaccaccgacacgctgccggtcatattggtctccttggagcggaacaccagatcctcgctgaccagcagcggataggtgttcagcaaaagcagcaccgccgcgatgacggcgatgtagctcagtccgaatttgacttgcaggctgccccagagggccatgcgcctgctcttggaagccttatcctttgaaatagtagcccactccccacttggtcaggatgtgatccggctccgccgggtattcttccagtttttcacgcaggcggcggatatgcacatccaccgtacggtaatctccggcataggtgtaaccccacaccacattcatcaggttctcccggctgtacacccgccggggattgcgcatcagcagctcgatcaggtcatattccttggcagtgagctccaccggttccccgtcccgaatagccacccgttcctcggtgttcagagtgagcttgcccacggtcagcaggctcccctgactccgctggaccccggcggcccgccgcagcagcgcccggacacgggccttcagctccagaatgttgaagggcttggtgaggtagtcatccgcgccgcactcaaagcccatcagcttgtcggcgtcctcgctcttggccgtcagcatgatgatggggacgttggaaaactcccggatcttcatgcaggcttccagcccgtccatctccggcatcatcacatccagaatgatgaggtcgaaccgtccctcccgggccagctccagcgccgccgcgccatcgtaggcacactccacctcgtagccctcattttccaggttgaatttcataccctttaccagggtcttttcgtcatccaccactaaaattttcaagtttccgctccttttatgcgccattgctcacggtgatgtaatcccgcagctcctctaacttcttctctccaatgccggagacctccatcagcccctccgggccttcaaagggtccatgctccgtccggtagtcaacgatccgcttcgccagcccctcgccgatccccggcaaagtggcaagctcctccgcttcggcggtattcaggtccaccagcgtgacctcgacctcctccggcggcagggcgtgttccgccgtcaccgtcaccgtcgcggtggtccggtcccggtaggagaccgtcagcagtccgcccagaaacaccgccgtcaggcccaggaggatcagttccgttctgacagcttttaacttcgctcccatggttgaactcctttgacgaatctgatatactaaaaatgtcgaatcacaacgaatacggtcattgacgatttctgtctctaccagtataccatattcttcaggagaaagatatgaaattcaaacgctttatctcggtttttttactttgcgcctgccttaccgggctgtttctcacccccgctgccgaagcgctggaggtcccggacattcaggccaaggctgcgctgttggcggacgtgaacaccgacgccgtggcctatgccaaaaacatccatgagaaaaactatcccgccagcctgaccaaggtcatgacggctctgctgatcctggaaaaggtcagcggcaatgaaacactgctgaatcaggaggtcaccgcctctgaaagcgccttcagcgacacctattaccacgcggacggcagcagcgccgggatcaaggccggggagatcatgacggtaaagcagcttctgcaatgtatgctcatcgtctccgccaacgaggcctgcaacattctggcggagtgggacgccggctccatcgccgcctttgtggacgccatgaacgccaaggccaaagccctcggctgcgagaacacccacttcgtcaaccccagtggactgcatgacccggatcactacacctccgcctgggatctctacctcatcaccaaggccgccatgcagtatccggaattcatggagatctgcgacagcgccaaggccgtcatccccgccaccaatctcagcaaggagcggacgctgtacaccaccaaccatctgctgtccacctggcgtgtcatcggctaccgggataagcgggctcacggcatcaagaccggctccaccagcgatgctgggcactgcctcatctcctccgcccaggaaggggaactgcactttgtcagcgtggtcatgggtgcggagcggatcgaggaaaacggcgtaggcaacctgctgaacttttccgaaacctcccacctctttgactacggcttcaagaatttcgcctaccgcaccattttagaggacaaggagatcattcaggaggttccggtgagcctgtccaaaaccgactatgtaacggtgcatcccgccaacaatgtggagtccctgtttccccgtgatctggacccggcggagctggatcgggtcatctccctgccggagaccgtagaggcccctgtcaccgccggagataagctgggcaccatggagctgcgggacggcgacaccgtctatgcctccgtggacctgcttgccagcagcgacgtgactgcggacaagtttatggtattccgccataatgtgtcgctgttttttaaaaagcccgccgtaaaaaccgtggccatcgtgctggcggtactgctggtgctgctggtgatcttccggctgaccggtctcagccgccgtcgccgttacggccgcagtgtccgcggttacagcagaggctaccggggccgcagacaccgctgatcaaatttctttccatctcaaaaaagaacaccgaagctttcttgaaagcctcggtgtttcagcgtgtcgaaaaaattttttctccccgctgaacaagttttcagaactttataaaagttctgaaaacttaggatttcaatggtgcaggacacccttcttgggtttcccgcgcacacccttccttaccgttgcggagaatctgctactttattgacagactcaacaccgaggctttcttgaaagcctcggtgttttcttaggggttacaggtactttaccagctcctccatgggcttgcgcagtccgtggagcttggcgggatgggcgccctccgcgggataccccagaggcagcatggcgatcatctccagaccctccatctccgggaaggtcttgatcaggtccaccggccggaacatacccacataggtagtgccaaggcccagatccgccgcctgcggcatcatctgtgtcacagcaatggaggcgtcgatctcgccgtggtccttgccgtcatgttcccggtgccaggactccttggggtcataccctacgccgatgaccacaggggcgtggaagtggcagtccatgcaggcgtctgccttttccagagcctcggggctgcggaacacgaagatccgctggggctgcttgttatgggcggtgggagcgttgcggcctgcctccagaatcagatccagcttctcctgctccacagggcgggtatcaaatttccggagagagtatctctctgcggacagcttttcaaaatccattgggattcctcctcatttgtttgatcgtgctgattgtcagcgtgtcgaaaaagtcttttcgccccgctgagcaagttttcagaactttata

SEQ ID NO: 12241 - DNA, 15786 bp, Unknown
  gut microbiota DNA sequence
tcttcctttccgtcgcggagaatttaccactttatcgacagtatttaattgtatcacagtgcttttttctccgcaatcccttatttgtaatcttttacccccggttccaaaggccgttctgcttcagcatggcctcgcacatctcccggcggcgggtatcgtaaaattcgatatacttcaaggcgtaaatatccgtcacgatataccgctcccgccccggctggtaaatggtgatgaagtcattgcccacgtcatagaggatcccctcccaggaaaccgttccctgcgtccccaccagaaacgtagccactacatagtttccctcatttctggccagcatggccttgatggagccgttgtgggcctcctccacgctgagggggttctggatcacgtcctctggcagatttgttcggatccccggcatattgcccatgggcatcatctgtccaccgggcagggtgacgtactccgatccctccggtgactgccaggagcgcgcatcaccgacgctccttgcctccgtttgtccgccgccattgatctccgcctgccagtcgctcccgccggacgggaccggcgctgtctggtaagtattgaaacgctgcataaaaacacctctcaagtcttgtaataggcatctgtagggttatagaagcagtgatccccgatacgggtctgccagtagcccacctcagagggaaacctgctccggcactgagggccgaagggattgtaaaaccacagagactctgccacatcgggaatgcggttccccgcgatggcccagtcggcaatgtcgaagtggatctgctccggccgcatattgaaaatattctgggggttgtaggtgccccgttccgtttcggaggcgcacacgaactggtagggctggaaaatgatgttgcggatgctgccccggcccacccgggcgtattccccgccccgggcgtggacccggttcatcaccacgccggccaccgccttcattcccgtatccccttccccgcccgcctcgcattggatcagccgcgccagcagctcccggtcggaataagccatcgttcatcatcccctgttgcgttcggtccgcgattctgtttcgctgacccattctatgcggactgtggacggcaggtgctttttcccagtcagcagcaaagaaaaaaccggaacggcaaaagccgttccggttcctatgcggtcacaaatgggtgcttacttctgcgccatggctgcttccagtccgcgggcaaactggtcggggcaggaggtgcctctgccgccgcagttgatgcccttcaggcgggcaatggcctcctcggccgtcatacccttcaccagagcagaaataccctggaggttgccgttgcagccgcctaccacctgaagatcacggattacgccctgatcgtccacctctaccgacatggcccgggagcagacgccccggggctggaatgtatatgtcatattgtgtttccttctttccttattcgtttggaaaacaggataacacaattttttctctctgccaagcccggtttctgatttttctgcaaatatcggaaccggagacgtcaatcctgccaggcttttccgtttttctgctccagtgtcagccggtccgcgatcatggcgatgaactccgaattggtaggtttacctttggaaacactaactgtatatccgaaatatttttgcaaggtctccagatcgccccggtcccaggctacctcgatggcgtggcggatggcccgctccacccgggaaggcgttgtggcaaaccgcttggccacttcgggatagaggaccttcgtcaccgcgttgatgacatccatatcccgcaccgtgatcatgatggcctcccgcagatactgatagcccttgatatgagcggggacgccgatctcatggatcacggaagtcaccatggttttcagactgggtaagctctcctggggtgctttgagaaacaaaccccgcatcttatccagcagtgcggccgtttcaaaaggcttcggcagaaaatacgccgcccccagttctgatgcttccgccagcatccgatcggagacaaagccggagaccagaatggtcataggtgcgtctccctgtttctgcagttgccgcagtacgctgatgccgtccatgcccggcagcatcacatccatgaccagaaggtccggcattcgttcctttacccgtttcaggatctcatttccatctcgcgcgatctccacagaaaactcgcctgtcttttccatttcttcccgcagcagcgtgcgaaattcctcgccggcgtctgccagcaataccgtcttacgttgatccataatgcactccctttttcccaaatttgcgacggttttaacggtttcaagtcgcgttttatttaaaatagcacgttctcctaactttttcaatgaatcacagctaaattttccaacaatcgttcgacatttttcacgagacagcctattttccagcactttccgcgttcttttgttcttatttttcataaaatatagcgatatctgtccggcttgttttctttttttgtggtggttcttttcttcttccacaaaatatggtatgataagcccaagaaatattttgtcgctttttccggatataaaaatattttcgtcgactgcaactaccgtatccgacagcggatactctcccgctgtacgcttttttcggagggatcattatggagcttctgcgtcaacagctcatcgcctaccgcccgtggaacgagcaggaggaacgggaccgggaagaactgctccgccgtcttgacagccacgaggatctgtacaccagagccaataccgccgcccattttaccgcttccgcctgggtggtcagcccggaccggaagcaggtcctgatggcctatcacaggctctatgactcctgggcttggctgggcggccacgccgacggagaccgggatctgctggccgtggcgttgcgggaggtccgggaggaaagcggtctcacggaggtccgccccgtgtccgaggacttgtattctctggaaatcctgacggtggacggccacgaaaagcatggccggtatgtctcctcccacctccatctcaacgtcacctacctcttagaggcagacccctccgccgccatccgtcccaagcccgacgagaacagccgggtgggctggttctccccggcggacgctatggccgcctccagcgagccgtggttccgggagcggatctacacgaagctgaacgataagctgtcccgtttttaagccgctctatcgacggacaagtcagcacatttccgctcgaaacaactctctgacacagtgaatcgtgcggaaacagaaaccttttagagaaaacccgcctgtgcggatatgcgtaccaaaggaggagtgaacagtgaaagcatacgagtacgtcaacattcacattgggaagtttgtgggcgcaggatcggaggcgcaccgggccattatcgacgaatacgccgcaaggggctatcgttatgtcggatacatccccacaaatatcaacaattacggaaagatagcggacttggatcttgtctttgagcgggacgcttgaccgccggtttgtgggagcctccatgccaaaaaggagcagggcggggagaaatgatttctcctcgcctcgtcattttactttttctacacgttttctcccgcgttcagcatagtttccatggaaattccatatccttttgttgcgtcggaaagcagcacatgggtcacagcccccaccagctttccgttttgaagaatgggactgccgctcatgccttgcacaatgccgccggtggcggcgatcaggtccgggtctgtgacggagatcaccatttcccgaccgtcagaggcatttgggagccgtttcaaaatttcaacggcatactcccgcacctcgtccccggacacattggcccggatcgttgccggtccctccacggcatcgcccaccggcagagcctcgcccgccacaagggtgcagtccgccggaagtgtgccgaaaatgccgcagtcggtgttggcgcacagggggccaaggtcgccggacaggtcaaaattgccccgcagctccccggcgctgccgctgctccccttcttcaccgccttcacggtggagggcaggatggagccgctaccgaagggcatcagagccatggtatcgccgtcggtgatcccgtgtcccagcgcgccgaaagcgccggtcgcgggatcgtaataggtcacggtgccgatgcccgccatgctgtcccggatccacgcgccgatgcagcagatgccctgttcattccgttccggctccacagagagggtcagagggctgccctgccgcttgatctccagtgccgtggcgtccgttccatttttttgcagcagggattggaactgctccgtggaggtcacggcctcgccgccgcactccacgatcacgtcgccggttttcaggccgcaggtccgggccggagtaccgccctccggcagctttaccaccaccacgccccgggcaaacagcttcacccctacggtgtgtcccaccggcaccagccgtttcccctccgttccggcggccagggcggcggtggcgcacagcgccatggccagtaccagcgccgcgccgtaacgcagtcctttttgtatggttccatgcaagtccatcactcctttcgcggccggtacggcattttttcaaaacaaatcgttaatttttcgtcctatattcctatttgtattgaaattctgtcgtgccgccgcagatttgtgccgcattttctgcggacacggttatcttgtccgctgcaggcgcggcaactcccgacaaaaagcggcagcagcgccagccggatcacgatgacgctttaagcataagcgcaaaaaagcagacgcaggaaattcctgcgtctgctggtagaagcttcaatttaaaaattccactcaatcccggcgattgaaaattttgaaaatgtcatcgaagggatcttcctccggttcagcgggcttttcctctgccggagcaatgggctcaatgggtgcaaagggcgccttgggctgctcatccttctcctgaccctccaactgaacgggaggctttgcaaatgtgccgatcttaggcagctcgtcagccgggttcttatcaaagccggtggcgataacggtgacacggatctcgtcgtccatagtttcgtcgaaggtggcgccgaagattgtgagggcgtcgggatggacggcctgctgcaccagagaggcggcctgctccacttcctccagaccgatgtccatagagccggtgacgttgatgaggacgcccttggccccctcgatagaagtctccagcagggggctggaaatggccatacgggcggcttcctcggccttgcccttgccggcagcccggcccacgcccatgtgagccatacctgcgttcttcataatggccgtcacgtcggcaaagtccagattgatgaagccggtgtcgcggatcaggtcggaaatggactgcactgcctgacgcagcacatcgtcggcgatctcaaaggcgttggcaaaggtgatcttctgatccgtggcgtgcttcagacgctcgttggggatgatgaccagagagtccaccttatccttcagctcggcaatgccgctctccgcctgctgcatccggcggcggccctcaaagccaaagggcttggtgaccacggccacggtgagaatatccatctccttggcgatctccgccacaatgggtgcgccgccagtgccggtgccgccgcccatgccggcggtgatgaacaccatatcggtgtcctccagcgccttggcgatctggtttcggctctcctcagcggacttgcggcccacctcggggtcggagccggcgccctgaccgtgggtcagcttttcgccgatctggatcttgtatgtagcactggaaacattcagtgcctgcttatctgtattcacggccacgaactccacacccttggtgccggagcggaccatgcggttgaccacgttgttgccgccgccgccaacgccgatgaccttgatgttgaccacggactcggggccggtttccaatccaaatgccatagcggtgcctcctgctgtcttttgtacgaaagggcggcaagccgccctgtaaatcacaagttatagtgtcccaagcatagtgggatatgattatctattgtatgctattttcccggtgaggtcaagggttgccggagatttgtttccgatttttttcggcgtctccctcccggcttcctcttattttctggtatcctgatcaaatatgacctggccgtcctcctgccgcatatcaaaggtgcctgtcatattatcctggatcttgtcactgttgatggccagttccagcacccgcagcttataggaaaagtccgcctgatagggcattttcaccgtaaagcggtccatatagtccatagaaatataggacgcctctcccagatggatggcatccacctttgccagatcccccgtttcatccagcacagccagcaattccagcaggctttcccgccgggtctcataggccgtatccacagcgatctgggttcctacggagggggacagcagctcacagccgtcaacggtggggtatcccgcggcggtatccgtctgctccacgatctttccggcaggactcatcagccacactgtcccgtcctgcgtccaggccagaggatcgccgcactcctgcacctggatcagcagggtgtccggcagcttccgctgaatacgggtgttttcgatctcgatatagggcagggcctcggcgatgttccggatcacctgatacttgttcagcaaaaagaggttgtcaccgtcctccacgccgctggcctgacggatctccgcctccgtatagcgcttctccccggtgatgaccaccgtatccacccggaaaaacagggtgatggccgccaccagacagccgcagatcaggaatacggacagcagcttatagaggaagccgctgcctccccttctgcgccgccgcgccgatcctctccgtcttgccatggtggttctcctttacagtctgtctctcagggggaggccgtctcctccacccgccgtatatccgcgcccagcgccgccagatcatcctcgatgctctgatagccccggtcgatatgggtaatgtccgaaatggaggtctctccctccgctgccagagccgctgcgcacagtgccgcgccgccacgcagatccgtacaccgcacgacggctccgtggagccgctccacgcccagcaccaccgccgtccgtccggaaacccggatgtctgcccccatgcgggccagctcatccacatgtcggtagcggctgctgaacaggttttcctcgaataccgccgccccccggcaccgcagcagcgccgccatcaaaatggcctgcgcgtcggtgggaaagccgggatagggggccgtgcggatgggccggggcgccgtcaatcgtccggtacggcggcacacgatcccggcgctgccgccggtcacgtcgcaccccgcctcccggagcaccgccgtcacagcggagaggtgctcctcccgtgcgtcccggagaaagacctcgcccccggcggaggccgccccgcacaggtaagtggccgccgcgatgcggtccggcagaatggtgtaagtaccgccgtggaggggccgtccgccccggatcaccaccgtggatgtgcccgcgccggtgatctccgcaccgcaggtattcaaaaagccttgcagatcttcaatttccggttctctggcggcgttggaaagcaccgtgacgccctccgcgccgcaggccgccagcatcaaattttccgtggcccccacagaggggaaccccagcacgatctcccgccccgtcagctttgccgccttgcagtgcagggtgccgccggtatcgtcgatctccgccccaagtgcccggaggccggagaggtgcaggtcgatgggccggggacctaattcgcagccgccggggctggtgaggcttgcctccccgcaccgggccaggatcgcccccagaaagatcacggaggaccgcatctcccgcatcagcgcgtcgggaacatcgcagccggtcatcccggcggtgtccacctccaacacatccccccgccacccggccttgcagcccaaggcttgcaggatacggatggacgcctccacatcccgcagacggggacagcggcgcagctccacgcttccgccggtgagaatggtagctgccagaatgggcagcacgctgtttttcgctccctgtatggtgacttccccttggaggcggttcccgccccggatcagcagtcggctcatattattggtccctcccgatgaaaatggtatcacgggccattctatggggagagagcaacttcggttcctgccgccgctttatcaaaagggctaaacgcctgccgttttctcggatacagggcgctttcgccgtctgtttttcggtttctttgatactttatcacggcgatgggccggtgtaaagtccgaaacagtaaatttacagcaactcctgaacggtttcgtaaattcgctgggccgcatcccggatacccaattccgccatggccgacgccatggcttcccgccgggcgtcatcatgcaaaatgcctgctgccgtctgaaacagcgcctgcccggaggaatcctgctccagcaaaacctccacgccgccgtgggtctccagcgcgcgggcgtttttctcctgatggttgttggtcacatagggggatggcaccatgatggccggcacacccagcgccgtcagctcactgacggtggaggctcccgcccggcagatcaccagatccgccgcccgcatcaccggtgccatgtcgtagatgtattcccggacctgcagggaggggtggtccttcaggtccacgcccttctccgccaatgccttcagcacggcagcatatccgctcttgcccgcgccgtggatatgatggaacggctccttccccgcctccaaagccagcatatccgccatctgggcgttcatgccggaagcgcccagagacccccagaaggagacgatcagcggccgtccgtcattgacgcccagcttttccttggccgcctccttggtcagggtgaagaagtcctcccggaccggggtgccggtgacggccaccttctccgggtgcttgtagtgctggcggcaggattcaaagcctaccatgatccgcccggcgtaaggctccagcagctccgtggtcagtcccggcacggcgttggactcatggaccgccgtggggatgcccattttggcggcggccttcacggtgggatagctggcatagccgccggttccgatcaccgcgtcaggtcgaaactccttcaaaatagcccgggcctctgccggggagcggaccatattgtagagggacaccagattgtgcttgatctccgccagcttgagggagcggtgaaagctggagatgtgaacggtgcggaattcatatcccgccttgggaatcaggtccttttccaacccccgctccgccccaacgaacagtattttgatctgcgggttcttctccgccatcagctgcgccacggcaatagccgggttcacatggcccgccgtgccgccgcaggtgaagatcacccggtcaatgcgcttttccaccagcagcgcccctttccaaaaagatgtcaaaacaagccaaaaaggcaggtgtttatcctgcctaaggctatcaagaaaacggtaaggaagggtgtgcgcgggaaacccaagaagggtgtcctgcgccattaaaatccaatattttcagaactaacagttctgaaaatgtgtcagcggggcgaaaaaacttttcgacacgctgaggcaggtgtttaccctgcctttgttggcttcatttgcctggatacgctcaggatcacgcccatctccgccagctggataagcagggcggtgccaccgtagctgaaaaacggcagagaaatgccggtggtggggagcagtcccgtcaccacgctgatgttcaaaaacacctgtaccgccagctgcgtggtaaagcccaccgccaacagcgtgccgaaccggtcacgggtgtggagggcgatccagtagcctcgaaggatcagcgccgcgaacagcagcatgatgatccccgcgcccaccagacccaattcctcgcaggcgatggagaaaatgaaatcgttgtgctcctccggcagaaacaggaacttctgccggctcttgccaagacccagtccccacaacccgccggagccaatggtaatgaggctctgggaaagctgatagcccttatccgcggcatctgcccaagggtccagccagtatataacgcgggatttgttatagccgatgacaaataaagccacatacaccatgccaaccgccgcgccagcggcagtacctacccagatccagttgatgccgcccaccagcatcatagccgcccccgcgcccaaaatcaggatcgcgccggagaggtggggctcaacggccaccaggcctgccactaccaccagaataaaggcgtagggtagcacgccgtagcggaagctgcgcattttgtccttttttcgggaaatgctgtcggcaaagtaggtaatgattgccaccttggcgatctccgagggctggaactgcacgccgatctttagccagcgggtagcgcccttggccgtcaccgcaatggggttgtgggggatgatgaccagaatcagaaaaatcacggacacatagatcaaggctctgcccgcgccgcgaagccgctggtagttgaacttactgaccagcagcatcaccgccgtgcccagcacggcgaaaacgccctgcttttcaaagtaatacagcgggttgtggcgggagggtgctttctcataataggcggagggaaagctggcagacaggaggatcaccagaccgatggccgtcagcagcatgaccagcagacagaaggtcaggtcgatgggacctttggccagttcccggctctcttccattttttcccggcggcgctgcttgcgctcctgaagggccagcttctcctgatgggtcaggggacggcggcggggccgtgtctgggtcatggatgtttcctcctttctctccgaatcaagtcaaggtcttaccggtttacagatagcggccccggatgccgcaatacgccagcaggcagaacactgccgtaatggacacaaagaccgttacgatcttcacctcgctccagccgcaccgctccaaatggtgatgcagaggggccattttgaaaaaccgcttgccgtgggtgaccttgaagtatccaacctgtataatatcggacaaagtttccagaatgtagatgatccccaccggaatcagcaccagcggcatatcaaaggcaaaggccagcgccgccaccgcgccgcctaaaaacaggctgccggtgtctcccataaagcacttggcgggatggcggttatacagggcgtaaaagcccaccagactgccgcacagggcggaggaaaagatccccagcgtagtgaatttccagatcatagcggcgcccatgaagaacgccatgaccacagcggtgacgctggaggccagaccgtcgataccatcggtgaggttcacggagttgacgcagcccacgatgacgaaggcggcaaagatcagatacacgatccagttcactgtcagcgtcacgttgatgaaggggatatagagatcgttggtcaaaaggccctcataccgcatcaggcacaggaacaccaccgccgccagaagctgtaagacaaacttctgcttggcggtcaggccctcgttctggtgctggcggaccttgcggtagtcatccacaaaaccgatgagcccgaagatcagggcgaacaggtacacatacagatgggcgaagtcccccgccagcatctgctgccagccgcaggcaaaggtcacgatgccgctgcccagaataaaggcaataccgcccatggtgggggtgcccgccttggaattgtgccaggtggggccgtcctgccggatctcctgtccggccttcagcttccgcagctccgccagtacgaatttgcccagaatcatggtcagcacacagccggccagtaacgtcacatagatactcatgctttctccttatcccggtcctgacagctttccccgtcagggcctttctcttgctgaccgtccggtacacatccggccggtgtttttgccgccacacgcggctgtatttgtgaaatggggatgcctaaagtctgccggacctcagcgtccgctgttcaggtgctccgccacgatctcccgctcatccatgtggaacttctggtggttcacttcctgataggtctcgtgacccttgccgcacagaacgatcacatcgtccttctgggcatggtccatggcccaatggatcgcctccacccggtcctccaccacttcgtaaggggtgttgctgtcgtcaaagcccggcagaatgtcccggatgatggccgcaggttcttcggtccggggattgtcggtggtgacaacggcaaaatcggaccagtccgccgccgccttgcccatgcgggggcgcttggtcttgtcacggtcgccgccgcagccgaacaccgccacggtgcggcccttggcaaattccttcaccgtttgcagcacgttcaccatgctgtccggcgtgtgggcgtagtcaatgaggatggtatagtccttgccgggggtggggactacctccacccgcccctgcacatgggggaccttggccagaacagcagcgctgtcctttaaagaaacgcccagcgccagtgcggcccccagcacatccaacgtattatacaccataaagccgccggggatattcacccggatgggtaccctctcggtttttgtcaccgcgtcaaaggcaatgccattggcagacagcaccacgttttccgcccggaggtccgcctcggacttgacgccgtaggtgcgcacctgacaggtggcatccttcagcagccggggcgtccacggatcgtcaccgttcactacgccgacgccgcagtttcggaacaaaatggccttggcatcgcagtagttttccatcgttacatggaaatccagatggtcctgtgtcagattggtgaagatgcccaccgcatagtaaacgccgtagacccggtccagacacagggcgtgggaggaggtctccatcaccgcataggcgcacccggcgtccgccatctcccggaagagccgctggacctcaaaggattccggcgtggtgcgatccgtagggatgacctcctgcccgatcatgttctgattggtaccgataaggcccaccttggccccccgtgcctgctccagaatggccttgagcagataggtggtggtggtcttgccgcaggtgccggtgacggcgatcatggtcatctcctcggcgggatggccgaaccagttagccccgatcaccgccagcgcacggcgggaatccgccgttcggatataagggccatccccctccggcaaattctggcacaacaccgccgccgcgcccttttccagcgccgtggcgatatacttgtggccgtctgtggcgtagccggtcatggctacgaacaggtctccgggctgggtggcccgggaatcatagctgacgccggtgatttccatttccagatccaccgcgcaggacgcgacagggacgccgttgagcagttcccgcagtttcatatcgttttcctccatttgatcggtcttgtttcacgaaagtccaccgcccccctcgcagggcagtcggcggctgtatacaaagcactccttggctattgtagcaggtttttccggaaagcataccgaaaatggtgtcataaacctggcaaaaagtgcggtaaggggcggtcagtccgtggttttcgcgccgaaacgcaccgtgaccacgctgccggcagccaattccgtccccgcctccgcgctctgggaaatggcggtgacgctgccggtgctgccgccggtgctggtggcgccggtgaccttcataatgaggcccgcattggtcagggccttgttggcctccgccggggtcttacctaccacgttggggacggtgctgggggcatttggcttctccacgcccagatagagcacgatggaggcattattgggcacgatggcgccgcccgccggggtctggtccgtcacggtatcgccacttcccacggtggtacaggcaaagcccgccgccttcaaagctgccttcgcgtccgctgcactcttgcccaccacatagggcacggcggcatcggcgcccgccagctctgaggcgctgtaattcggttcaatacccagtgcgggcaggatctcgcccatgatctgaccggccacgggagccaccatggtaccgccgtacacggcggtgccggtatcacggcgaggggtgtccatagtcaggagcatgatgtacttgggatcgtctgccggggcaaagcacatgaaggacaccaccacgtcgccctttgggttgtcgttggtcttggtgccggtcttatcggcggtgccggtcttgccgccgatgcggtagcccgccacccggccatttttgccgctgccggaggagaccacatattccagcgcctcccggacaatggcggaggtctcctcgctgatgacctgccgcactggagtagagtcatgctgggacagaacgttgccgtcctcgtccagcacctgctccacaatgtagggctgatagagatagccgccgttgacgcaggccgcctgagcccggatcaactcgatgggcgtcacgttgaaggtctggccgaaagagtaggatgccagagacaccacctgagagttgaagctcttttcatcctgaaaaatgcccttcacctcaccgatcatgtcgatgccggtcttatccatcaggccgaaagatttcagatacttgtagtaggtctccgttcccacggacaggcccatgctgataaaggcagggttgcaggaatggcccaccgcctcgatgagggtctgctgaccgtggccgctgtggttggaacagtagatggccttgttccagccctgcacacgggtggagccggaacagtagaaggtggagtttttcgtcaccttgccctcctccagcgccgccgccagcgtaatgggcttataggtggaacccggctcgtaggtggagtcgatgcacttgttgcgccactgggactgaacggcgctgttgatggccgcagaccgggcctcggcatacgcctcctccgattcataggtggagcgctttgcgtcgatcttggcaagctccgtatccagcttggtcttcagggcatcgtcaaaaatcgtgccgtagtcattcagatcgtagttgggataggacgccatggccacgatggccccggagttcacatccataacgatgccggtgccgccgtttttggcgccgtattttttcagcatactctccaagccgttttccagactcatctggacgttggcatccagcgtcagcaccagactgtgtccgttttccgcatcgaagatctgctcgtagttatacatcaactccgcaccggcggcgtttcgggcactgatggtatacccggcagtgccggtaagggtatcgtcgtacttggcctccagacctacgctgcccacgccgtcggagttgacaaagcccagaatgccggaagccagagacccgtacaggtagtaccgcttggaatccggctggagccagacgcccttca

SEQ ID NO: 12242 - DNA, 649 bp, Unknown
  gut microbiota DNA sequence
ccggacttcttgttgaggatatccagcatggtgtcgatgttcatgtcatacttattcatcaggtactgcaggataccggcgtccagatcgccggcgcgggtgcccatgggcagaccggccaggggggtgaagcccatggaggtatccacgctcttgccgccgtccacagcggtgacggaagaaccgttgcccaagtggcaggagatcagcttcagctcctcaggcttcttgcccagcatagcagcagcgcgctgagagacatacttatgagaggtgccgtggaagccgtagcgacggaccttgtcattctcatagtactcataaggcagagcatacatataggccttggcgggcatggtctgatggaaagcggtatcgaacacggccacctgaggcacgtccttgcccataacggcggtgcaggcgttgatgccggtgatgttggcagggttgtggagaggagccagggggatgcagtcctccagagccttcatgacctcatcggtgatgagaacagacttgttgaaggcctcgccgccgtgcaccacgcggtgacccacagcgtcgatctccttcatggagccgatcacgccgttgtccttgtccaccagagcgttcagcacagcctgaatggcctcggaatgggtgg

SEQ ID NO: 12243 - DNA, 2715 bp, Unknown
  gut microbiota DNA sequence
cggagaattttttgaaaggtggaaacacacaatgctgcgtaaagatcagaagacggccgtgatcgaggccaaccgtacccacgagaccgacactggctcccccgaggtccaggtcgcgatcctcaccgagcgtatcaacatcctcaccgagcacatgcgcgccaacccccaggacaagcactccaaccgtggtctgctgaagatggtcggtaagcgccgcagcctgctggactatctgcagaagaaggatatcgagcgctatcgtgccctgatcgccaagctgggcatccggaagtaagaagcaatgagggtgacggagcggatctccgtcacccttttctgcgaattttaagtcattttttcgccgggggctgttgctttttgtgtttgaaactgtgcccgaatctcggacatgctttcaaatacgaaaagagccgctcccgagcatctgagtaaaggagcaatcttatgtcaaccattatcacccatcggcagttccccggctatcataagtacgagatggagttggccggccgtcccctgactctggaggtgggcaagctggccgaactggccaatgccgccgtcatggtgggctacggcgacacccgcgtgctggtctgcgccaccgcctccgcccgtccccgggacggcatcgatttcttccccctgagcgtggactttgaggagaagatgtacgccgtgggccgcatccccggcagcttcaaccgccgggaaggccgtcccggtgagaagggcatcctcaccagccgcgtcatcgaccgccccatccgccccctgttcccctatgacttccgcaatgatgtgtccatcatggccaccgtcatggctgtggatcatgactgctctcccgagattgccgctctgatcggcacctccgccgctctggccatctccgatatcccctggaacggtcctgtgggtgccgtgaagatgggcctggtggacggtgagttggtcatcaaccccaccagcgaacagcgcaaagtcagcgatctggacgtcaccgtggtctccaccggcaagaaggtagtcatgatcgaggccggcgccaacgaggtccccaacgacaagatgttcgaggccattcagaaggcccacgaggagaaccagaagcagatcgagctcatcaacaagatggtcgctgagatcggcaagcccaagttcgactatccccacgccgccttcgaccaggagctgttcgacgacatcgtggccaacttcatggacgaggccaaggccgctatggacaccgatgacaagaacgtccgtgagcagcgctggaacgccatgatcgaaaagtggcacgagaagtatctggaagctcaccccgacatggaccagtatctggaggagatcacctacaagttccagaagaagatcgtcaaggcctggctgctggaaggccaccgcgtggacggccgccagaagaacgagatccgtcccctcagcgccgaagtgggcgtgctgccccgggtccacggctccggcctgttcacccgcggccagacccaggtcctgtccgtctgcaccctggacaccctgtccgcctgccagaagctggacaccatctgggaagagaccgagaagcgctacatgcaccactacaacttccccggctactctgtcggcgaagccaagcccgcccgcagccccggccgccgggagatcggtcacggcgctctggccgaacgggccctgctgcctgtgatcccctccgtggaggagttcccctatgccatccgcgtggtctctgaggtggtttcctccaacggttccacctctcagggctccatctgcggctccaccctggctctgatggacgccggcgtgcccatcaaggcgcctgtggccggcatttcctgcggcctgatccaggacgacaacggcggcttcaccacctttatcgacattcagggcgtggaggacttccacggcgagatggacttcaaggtggccggcaccaagaagggcatcaccgccatccagatggacctgaagaacgacggcctgactatggagatcatcaagaacgctctggacatcacctatgacgcccgctgcgagatcctggaccagattatgctgccctgcatcgccgagcctcgtaaggaagtctcccagtacgctcccaagatggtcattatgcacatcaatcccgacaacatccgggacgtcatcggcaagggcggttctgtcatccagaagatcgtggccgataccggcgccaagatcgacattgacgatgacggcaccatccacatcgccgcagccgacgcttccgcctgcgacgccgccaagaagtgcatcgacgatatcgtgttcgtccccgagatcggcaaactgtactacggccgcgtggtgcgcctgatgaccttcggcgccttcgtggagctggctcccggcaaggacggcctggtgcacatctccaagctggctgaccaccgcatcgagaaggtggaggatgcctgcaagatcggcgacatgatgtgggtcaaggtcaccgatatcgacgagaagggccgcgtgaacctctcccacaaggacgccatgcgtgagatcgccgccaaggaagccaacggcgagcgggtcaagtaaatcgtctttctattctaaaacgccagacggggcgggcacttcgcccgccccgcctttttcgttcttttgtttccataaagaaattgtttctcaatg

SEQ ID NO: 12244 - DNA, 30754 bp, Unknown
  gut microbiota DNA sequence
tttgacacccccgtgtcaaatcacccaaaacgggggctggccgtcacgcactgccgaccaagcttgaaactcccctaccggctgcgctatacccaaatctcaaatcagtgcgtccccgcacctgtagcacggcacacaacggggtgcaaataggacgccctctacttctctttccgctgccgctcccccatccctcgtctaactccgggagaggttttccaaagggagaaggccgcagccctcgccctttgtgtcgttttaagggggtgcggggggaaatcgaaatccccccgcgtttctctttagggaggccggggggggacattctcttttcaaaagagaatatccccattggcttctgccgggaaccccggccccttgttggcgcaaagaaaatgtaggggacattccaatgggcaaagcccattttaggattcgatcccgcatggtatcaccatgctttcccgtgccgcatagcggcactctctgaaaggagcttctatgtctgatctcatcgccgccattgccaccggcagcaccgccaccgccatcggcatcgtccgggtctccgggaccggctgctttgccgcctgtgaccgggtctttcgtccccggaacggagtccccttcgcccagcagccctctcacaagatggtgttcggagaaatgctggacgattccggcgccgccatcgatcagggattagccgtccgcttcggcggcggacacagctacaccggggaggactccgccgaattccactgccacggctctcccgtagtcctccacaccctgctctccgctctctttgccgccggagcccggcaggcccaggccggtgaattcaccaagcgggccttcctcaacggcaaaatggacctgacggaggcggaagccgtcatcgatctcatcgatgcccagtccgccgctgccgcgaaaaacgccgcagcccaactggacggcggtctccgccgccgcctggagccggtgcaggaggccctcatcgacatcacctcccggttttacgccgtggtggattaccccgacgaggacattgaggacattcagccgcagcagatccgatcttctctgcaaatcgccgccgacaccctctccgccctgctggacaccgcccagcggggccgggtgctgaaaaacggcgtccgcaccgccatcgtgggcctgcccaatgccggtaagtcctccctgctcaacgccttggcgggctatgaccgggccatcgtcaccgacatccccggcaccacacgggacacagtggaggagaccgtcacctgcggcggcaccctcctgcggcttattgacaccgccggtatccacgataccgccgacgccgtggagcagttgggcgtagagcgcagccgcaaggcggcagagactgccgatctggtgatcgccgtggcagacggcagccagacgccccccgccgtggacccggacatcctggccctggcggccaaggcccctcattggattttggccgtcagcaaggatgatctgaaccccgccgtgaaaaccgccgtctggcagctccccaagggcctgcgggagccggacgctctggtttcgttcaactccgtggcccccggtgggctggatctgctggtggacgctgtgcaaagctgcttccccgcggggacccctgccgacgccggttcccttttgaccaacgcccggcaggaatccgccgtccgccggagtctggaggccgtccgccgggcattggccgctctggacagcggcctgacccccgacgctgtcctcaccgatgcggaggaagcactggagtccatcggcgaactaacgggccgcaccgccaaggaggagatcgtaggcgcggtgttcagccgtttctgcgtgggaaaataacaattttcgttttcccctgtctttcttcctgttttccttaacgcataatccggtttacaaaactacaaaaatgtgatatacttgctctgatttcaaaggaaggagcaccggtatggaagaaatttccgcctttcgccgccagttggagacccaccgccccgcggattgggaaacgctaccggatttccccctgtatatggatcaggtcctctcctacatggaacggcagaccatccgtctggacgagagcgacgctctgacagcctctatggtcaataactacacgaaaaacgccctggtcccccgggctgagggcaagaaatacaaccgggaccatctggcctacctcaccttcgtctgcattctcaagcaggtgatgtccgtccgggatatggacctgctgatccgcactgagctttctgatgaccgctccgtggaaaacggctaccgggcctttctggaaagtctggacggtgccctgtccagtaccgtgcaagagatgggcgcttatgaaggaactgacaatctggcggacgccgccgtccactttggtctgctgagctacgccgccggccttgtgagccgtcagtatgtggcccagctccgcgcccggacggaacccgccggcaaaccggataaagccgaggccaaaaaggccgcgaaaagcagaaaggagcgcaaggactgatgcgtgattatgtaattttaacggatagctgctgcgatctctccgcggaaatggccgcagaactgggcgtagaggtcctaccgttgagcctgcaaatgggtgatcgcacctaccgcaactatctggatggccgggagatcggcttccatgagttctacgagcgggtccgctccggtgaactggccaccacctccgccgtcaacgtgggggaatttgaggaaaagatgcgggagatcctgaaaaccggaaaggacatcctgagcatcagcttttcctccgccctctccaccacctaccagtcctccgtcattgccgcggaggagttgaaggacgaatttcccgacgcgaagatcctgacggtggactccctctgcgcctctctggggcagggattgttcgtgtatctctgcgcgcaggagcagaaaaaggggaaaaccatcgatgaggtgaagacctttgccgaggagaccaagggccgcgtctgccactggttcacagtggacgatctgaaccacctgaagcggggcggccggatcaacgccgccaccgccctgttcggcaccatgctggccatcaagcctgtcatgcatgtggacgacgagggccgcctgatcccggtcagcaaggcccggggccgtaaggcgtctctgaccgctctggtagaccggatggaggccaccgccatcgaccccgccggtcagacggtgttcatcagccacggtgactgtctggaagacgctgaatttgtggccggtgaggtccgccgccgtctgggcgtggagaccgtccacatcaactatgtgggtcctgtcatcggcaaccactccggccccggcaccatggcgctgtttttccttggcagcgaacgataattatgctaaaatagtttggggagatccccaaactatttttgctatgcaaacacatagcaaaataagaaatgtgccattttctcgctcctgcggggcaaccagaaatgatgcacgaaaacttcatgcactggcatttgtgcatgttcgcggtacgctgctcatgcatgaagttctatgcgtatgaaattaaattttccgctctggcggaagcacatgtgaggatcatatatggaatggctggaagtacacattgacacaaatcacgccgggctggagcctctggaaatcttcctctccgccaatggggtagacggcgtggtcattgacgacgagcaggatttccagagctttctggaaaacaaccaccagtattgggactatgtagacgaagatctggaggcgtccatgaagggcaaatcccggatcaccttctacctcccggcggacggagacggctttgaccagctggcccacctccgcactgctcttcagggcttcaaggacgcccatgccggaaaatacggcaccctcctgatgacgttggaaaatctgaaggacgccgactgggaaaacaactggaagcagtattataagcccatggagatcggcgaacgcctgctggtgatcccggaatgggaacaggaaaacgtgaaggggcaggctaaatacgccggcaaggtgcccctgatcttagagccgggcctcaccttcggcaccggcagccacgccaccacccgcctgtgcctgacggcgctggaagaagccgtccacggcggcgagaccgtgctggatctgggctgcggcagcggtatcctctccattgccgcgctgcggctgggtgccgcctccgccaaggctgtggacattgatgacaagtgcctgacggtcgcctatgagaacgccgcgctcaacggcatcggcaaggaccgttacactgttctggtgggggatgttctctccaacggcgccctccgggaagctctgggcggcggctacgatgtggtggttgccaatattgtggcggatgtcatcatcgggcttgcccccatggtgcgacagttcctgaagcccggcgggctgttcctctgctccggcatcatcgacacccgggccgaggaggtggcggacgccctccgtcaaaacggctgggagatcgagaccacccgctccggcgagggctggtactcctacgcctgccgctaaactcagaaaggaccctgaatacgcccatgaataaactccaagcactcaacacctggatgaccccgaaaatgcccctgctgatcctcggcgctctggcactgggactgctgttccccgatcagatcggcctgctgtgtcccgccgtttccgccctgatgatgttccagacctttgccaacagtctgggcagcagcgtgcaggatctgggccgggtcctctcccaccccaagccggtgctcatcaccatgctttctctccaccttctcatgccgttggccgctttgggtattggcagcatgtgcttccctgaccagcccctctacaccctgagtctggtgctgatggagggttcccccgccgccgtatcctctctgatgtggatcgtcatcggcggcggcagcgtggagctatgcctgtccattatcctgttggataccatgctctccccggtgatcctgccgctgacgctgcggctgctgtgcggctccgtggtggagctggataccttgggcatgatccgggatctcttcctcatgatcgtagtcccggcagctctggccatggtgctctgccgcctgctgggccaaagcatctgcaccaaagccaagcagcggctgagtcccttttccaagctggctctgctggtcatcatctgcgccaacgtcacccgctgcgctcccttcctccacgaattgaaccgcgagctggtactgctgctctgcataacgctggccatgcggctcatcggtctgggcttgggctttctgctctccaccctcttccgcttccccctatccggtagaactgacggtgaccgtcaattccagtatgcggaacaatgccgcagccgctacgctggccgcccagtatttcccctcggaggtggtgttctccccctccgtctctcccctgttctcccagctcaccagttctctggcggtgcgggctctgcaaaaacggcagcagaagatcgatcatcccgcctcataacaacctatttgcaaaaaagcgcggaattttccgtgctttttttattttcccgacagatttcccgacatttcccccactccccggcgctacaatacaggcagaaccgggaacgcccgccgtttccgaacctgtcaggaggtgccgcgcatgttggacacgcaggtccgttggcttccggtggagcagatcgctcccaacccacaccagccccgaagggaattcgctcccggacctctggcggagctggcggaatccatccgccgccatgggatcatccagcccctgtccgtccgccgcagggatgacggctgggagctgatagcgggagagcgccgcctccgggcagccaagctggcgggactgcaaacagttccttgtctggaaatgcaggtcgataagcaggacaccgccattctggccctcatcgaaaatatccagcgccgggacctgcattacttggaggaagccgccgccatcgccgcctatctccgtcaatccggctccacgcaagaggaagccgctgccctgctgggccgctccccctccgctctggccaataagctgcgcctgctgcggctctcccctgactgctgccgcctgctcacagaacatgatctgaccgagcgtcacgcacgcgctcttcttcgtctggaggatgaagaagaacgtctcaacgccctccaccacatcatccgccatcatctgaacgtagcccagacggagcagtacatcgacaagcgtctggcccagctgcagaccacgcccccctccggccgccgggtctttcttctcaaggacgtccgcctgtttctcaacagtctggaccggggcctgcggctggtacgggaggccggcatcggcgcagaatcccgccgggaggacacggaggacgccatcctcctcactatccgcatccccaagaaccgccgggtcggctgacgtttacagtccttttcaaaaaacggagacttcggtctccgctttttggttttttcggaaaccgcagcctgccacttacgccaaaagtcaaaattattccactctgttaccggattgtaacaccttttttcagaaaagagtgatatgatagcgttaaatgggagattgtttctcatttaacataacgatcaaaacaggagggcttcttatggaaccgatccgtgaagccgagatgcagacccagccggggaagcggctgaacgaggaatccaaaaagaacggcaaagtctggaagattgtcgtaggtgtagttgcagccgccgttgtggtgttcttcggagcctgctgtattctggctcatgccagcactgcctttttcccccatacggccatcaatggcgtagatgtgagtggcttgacgctccaggaggcgcagtcccgcctggaaactgtacttccccaacgtgtatgcaaaatctatctgagtgaacagaataccgcctctccagaagaacgggaacccgccgcctccatcacctttgcagagttaggtgtctccccggaagccggttatgacggcatggcgaaatccgcctatattcttcagcacggaaaaggctactgctctactggcttcacctatctgaaatctctcctcggaaaaaataccggctacaacagcagtctgtattgggacagccggcaattggatcaagccatcgccaggctgtccgccgtgctgaatagtaagccccttgatatggcctttcaggtgggcgatcattccctccaacttaccatggccaaggatggccagtccgttgcggataatgaactgcgccgctctattcaaaatgttgtacaggtcagttctgaaccggaagcgattgtagatcttcctgcggagattctccccgccaagaccctcaccgcccagcagctctatgaccagctccacggcgaggtgcgaaacgcctcctatgactccgctacggactctatcgtaccggaacagctgggggccgattttgacatagccgccgttcagaaggccatggacgaggccgctcccggcgaaacgctgactgtgcaggctgacattcagcagccggaggtcaccgccgccgatttgaaggccgtcctgttccgggacgtgctgggcgaggccaagacccatgtctccggctccgccgggcggatcggcaacgttaagctctccgctcagattatcaacggccttgttctcaacagcggagaaaccttctcctacaacggatccgtcggcaaacggacggcggaccggggcttcaagcccgcccctgcctatgtcaagggcgaaaccgtggacgagatcggcggcggcatctgccagacctcctccaccctgtatctggcctgtctcctgagcaatctggagatcacggagcggtacgcccaccgctatgtccccgcttacatcgcctggggcatggatgccacggtgtcctggggcggccccgactataagttcaccaacaacaccctgtaccccgtgaagatcgtcaccaaatatgaaaagggctatctcaccgttcagatcctgggcaccaatgtggacggcacctatgtaaaaatgagcaacgaggtcctctcgaagaccccctgggaaaccatctatcaggaggaccccaccatggctcccggctccccggatgtggtgaaggtaacaccctataccggatacaaggtcaactcttatcagaccatttatgacaaggacggcaaggtgatcgacagccattttgaagcgtccagcaactacaaggtccgcaacaaggtgatcttacaggcccccgccgcccagcccggcagcggaacagcggagatccccgccgtcacaccgaacactccgtcggatacccctgttcctatggagccaacagtccctgcggaacctgccgcgtcccctgaccttcctgtcgaaccggagatcccggcggaaccgtaacagaagcgccccacagcttgtttgttgcaaagcagccatccccatccgtttttaagatcaaaaccgcaaccccccgcccatactgatgtatgggtggggggatcttatgcttatacgtgcttatatggaagcagccttacaggccccgcttctttttcaatacccggatgtcctctcccacaaagggcagaagctgatactctccctcgatccgggaggcgatctgtccggaataccgctgggcgatggcctccggcatcaggttggtgctgacgatggtggacttcttttccagcaggcggccattgatgatctgatacagcgcgctctggacgaaggtggtcaccatctccgtccccaggtcgtccaggatcagcaggtcgcagttcagcacccgctccacgtcccgctctgcctcgtcccggccgaatttctgcgcctcgaaccgctcaaaaatgtgccccgccgtgtcatataccacggagaagcccttgccgctgacctctctggcgatggcggcagacaggtgggtctttcccaaccccggacggccgaacaacagcaggttggccggtttttttccaaaattgtgggcatattccacgcaggtgtcatacacccactccatgtgctcccgggcagacttggtttttcccggtgcccgctggtcggaataccagtcggtgtcaaaggtgtcaaagctctggctacccagatccagcagcttggaaagctccttgcgctgctcctccacatagtaggttttcaggcagcgacacatctcgccgccccggtagcccgtgtcattgcagaaggggcagaggggcgtatcctccagcgcgttgtccggcaggcccagctccgccaacagcatctgccgttctgcctgcaagctgaggttttcttcccgcaggcgctggatctccggcagcgggtcctctccccgccgcagagcggcggccatcacccggctggccgtgcggcgcagctgatcctgaatttcccgcagccggggtctgcgggcatagagctgttcccgctgctccgccagatccgcttcccgtacgctccgatccgcttcataccgctcctgcgccagacgcagcagccgtccgtcatatgccatgtccccgctccctccttacacatatttccaagcgtcgcccgccgactgtgtcggctgcttcgccgggggcttgtccgcccgttcgatctcctccggggtatgtaagcccgcctcgtgccaacgctttaaaataccgttgcagtagggccacttcagctcgtggcacttgagcaccgtcttgtcgtaggccagagccaccgcctccggcggaaagcccatctcctgccacgcgttcagatacttctcctccgatgccaccggcagccggtctcccagccccagcgcccgcatatacggcgggatggccccctgacgctccgcgtactttttcaggtactccactgcggccctctgggtgtcgatgccccttctggcccaggcgtagccctccttctcgatctgccgcagggtcggccgccgcccctctccgtacttccgggtgacccgctccacgcagtgattcaccagcaagaagatcacgtccgccggcaggcccagataatcgttcagtcccagcagaacacccacatccggcgtggtgagccgcttccccagctttttttccacctccgccgtcagcagacggaattcctcgctgctctccagccgccgggcaatgtcatcccgctggtagctgggcttttcatcagcaggctccgggatctcctccgctgcgggcgccaacagccgcaggtcccgcagggcttgctccgccgcctcgatgcggctcttttcccatcgcagctctcccgccaaagaccggggctgcaccgttccgtgatgccgcagaagcgccagatataggagcgccgcgtcgccgtcgccccggtccagcagacgctttaccgtctgggccgtcagcgtgacggactcatccgccgtgtggatcaaaatactcgccatccgcgctcctccttcagcgtatcgaaaaagtcttttcttcccgttgcccttattatcagaacttgtaaaagttctgataatatttgatttcaatggcgcaggaaacccttcttgggtttcccgcgcacaccctttacccgcaaggggtatgcagcatccgtaaagcggcaaagccgctaacggctgccctaccttaccgtcgcggagaatttactactttatcgacagcctctttccttttcattcagcccttattctacacgaaatcttcccctacggcaagagggccgtcagcgagttgtaaactttttcgatttcccacgatttttgtggaacacctgcggcctttgtgctatactggatgctgtaatattgtgtattgcgtcccaacgcaggacgtatataaaaaaggaggatgcgcaaatggcaaaccgtgttgtcatcaccatctgcggagaggaatacaccctggtagcggacgaaacctccgcctacatgcagaaggtaggaagctgtgtcagcgacaaaatgaccgaggtcatgaacgatgccaaggtgggccgcactgacgccgccgtgctcactgccgtcaacctgacggacgagctgttcaaatctcaggccgccgccgagcagcttcgaagccagatcaaaggctatctggacgaggcttccaaggcccaggctgaggtcagtgatctgaaacgggagattttccgtcttcagcagcgtctggacaaccgcaagtaatggctctggaactactctcccccgccgggtctccggaagccctccgggccgctgtccagagcggctgcggcgccgtctatctgggttgggggaatttcaacgcccgccggagcgccaaaaacttttctgacgaagaatttgccgatgccatccggtactgccatctccggggcgtccgggtctttctgaccctgaacaccctgctgacggaccgggagctgcctctggccttagatgccgcccggacggcctgccgtctcggggtggactccgtgctggtgcaggactggggcctgtttgccctgctgcgggaggccttgccggacctcccccttcacgccagcactcagatgagcgtctttaccgccgacggtgccaacgaggtctatggggacggctgcgagcgggtggtcctcgcccgggagtgctcccgggaggacaccgccgccatctgcaaggcctgtcccgccgagatcgagatcttcggccatggtgctctctgcatgtgctactccggccagtgcgaaatgagcgccctcattggcggacgcagcggcaaccggggcacctgcgcccagccctgccgcctgccctacggcttcaacggccccgccaaaaacacctacccactcagtctgaaggacagctgccttgctgaccgcatttccgacatggagcgaatggatgtcagctgcctgaagctggaaggccgcatgaagcgccctgaatatgtggcggtcatcacggacatttacgcccgtctgatccgggagggccgcaagcccaccgccgccgaaaaaaaggatctggagctggccttctcccgctccggctttacagcggactactggcagggtcgccacggccccgccatgttcggcacccgccctgaaaacaccccggagccgaaggaattgtttgccgccgcccgagccaaatacgaaaaggatgacgcccgcaccgttcccatccatttctcctgctcctgtcaggccggacagccggtttccctgacagtttgggacgatgacggccatgtggccgccgccgaaggccccatcccggagccggctcagaacaaggcactgacggctaccgatctggaattccgtctgcaaaagacaggcggcaccgccttccgctgtacggacggctccgccgatgtagcagacggcctgtttctctccgccggggcggtaaacgccctgcgccgggatgctctggccgccttggagaacgcccgttgtgccgttccggtccgccgggaacaggacttctcccccctgccgaatctggactgcaccaccgataccccggccctgaccgtttccgtcacaacctgggcgcaggcggaagcgctgctgcccctgtcccccgcccacatcgacctccccctggaactgctggcggagcgggacgcgctgccggactttgccggggagtggtgcgccattcttccccgtgtctggcgggaccgaaatgaaccccagctccggacgtggctggctcacgccaaaaagctgggcgtcacctccgctctggctgggaatatcggccatctgccccttttgcgggacgccggactgactatccgcggcgacttcggcctcaacgtgttcaacagccgctctctggactatctccggcgcaaggagctctcctccgcctgcctgtccttcgagctgcggttcccacagatgcgggacatccaaaagctgatcccggcagaggccatcgtctacggccgactgcccctgatgatcacggaaaactgtctggtgcagaacgaaaccggctgccacctgtccgaaacgggtgacgccgtcccccagcaggccccctgccgcaagccaaacgatcttcaggaccgcaccggggcaaagttcccgctgctcccggcctacggccaccggacggagattcagaacagtgcgccggtgtggctggcggacaagcccgagtggaagcactgtggcctgacctatgcccgcctgcggttcaccacggaagcacctgcggaatgtacggacattttccaggcctaccagaccggtgcccccgcctccggccccttcacacgagggctttattatcgcggcgtggattgacccagcggcagagtctcaccggaaatttcccgctttttcagcaagttttcagttctatttgtataatatatactttataatactatttgttttcgattttggagttttacatggaagaaatcaaggtaaaatattttgtggacggcatcgacgagctgtgctatgtggcaggcaaatccgactggatcgacctccacgccgccgaggatgtggatatgaaggccggagaattccgcctgatccccttgggtgtcgccatcgaactgccggagggttacgaggcccatgtggtgccccgcagctccacctttaagaactacggtctgctgcaagccaactccatgggtgtggtggactacacctaccggggcgacaatgaccagtggcgcgttcccatgtacgccacacgggatgtccacatcgacaagaacacccgcatttcccagttccgcattatgaagaaccagccccctctcgcctttacccgtgtggagcacctcaccggtcccgaccggggcggcttcggctccaccggcaagtaaggagggccgccatgtctcgaatcgttttggcctccgggtctccccggcggcaggaattattgaaccgcatcggcatcacggattttgacatccgtgtgccccagacggacgagcactacccgacgggtctcacccccgcgcagatcgtggaatacatctcccgggaaaaggcggatgccgccgccaagctctgcaccccggaggagatcgtcatcaccgccgacaccatggtgtttctggatgaccagcgtctgggcaagcctcaggatgaggccgacgcgctgcggatgctcaccgcgctgcagggccgccgccacacggtctgcaccggcgtcaccgtccgtcagggagaccgcgtactgacggaaagcgaagccaccggcgtggtgttccgccccgctgaggaatccgagctgcgggcctatattgccaccggtgagcctatggacaaagccgggtcctacggtgttcagggcaagggcgcgttgctggtggagcgtctggagggcgacttcttcaacgtcatgggcctgcctgtcctgcgtctgagccgaatgctggctcagtttggcattaagttattgtaatcgattgcgttttaactttttagaaggagaacttccttgaaggattttctgagaaatcacggattatggatcctcttcgccggggcggtgattgccgtggcgctggctctgctgtcctatttcagcaccaacgcctccccgctggtggatctggccaacaccattaccagtccttttcgggcagtctgcacctccgtatccggctggtttaccgacaagcagaattactatgaggacgtcaccgccctgaaagcggaaaatgaggccctgaaaaagcagatcgcggaaatggaggccaccgtccgtcagggcgaggccgccagtcaggaaaatgtatttctccgggacctgctggacctgcgtcagcagcgccgggacctcagcgacttcgagaccgccaccgtcacagagcggggtgtcaccaactggactgcctccctgacgctgaacaagggcacggcccacggcgtagagttaggtgactgcgttatcgacggaaacggcaacctggtgggccgcatcagcaaagcgggccacgactggtccacggttttgactgtgatcgacaccgacacctccttaggcgcccgtgtctaccgcaccaaggacatcggcattgccggcggcgatttcgccctgatggacgacggtaagctgaagctggactccctccccgcctcctgccagctgttggagggcgacctggtagttacctccggtctgggcggctatctgcccccggatctggtcatcggctctgtctccgagcttcgggccgacgattccgacacctctaattatgccatcctcacccccgctgcggacctgaacggtctcacggaggtgtgcatcatcaaatcctttgagatcgtaagctgaccgcttaccgttcattcaccattacagaagggagggattccccttgctggcccgcagcgccacgatttttaaatggactctgtacactttggccgggctggtctgggccgttgttcaggccgcctttctccagcgtgtaaccatctggggcgtcattccctttctctatcccctgattgccgccctccccgccatctttgagggccccgccgccggcacggtctacgcccttgcctgtggcgttttctgcgacctgctgctcccctcccccattccctgcttttatactctgatcctcccccttgtgggcctcgccgccggactgctgtcccagagtctgatcccagccgggtatctctgctctgccgccgcggctctgcccgcctatctgctgacaggcatcttccactgcatcgtcctttgggctcagggccatcccgcatggggtgcggccatgtccgtgaccctgcgggagctgtgcgcctccctgctgtggagcctgcctatgacctggctgttccgccgggtctatctccgcgttcatgttgacgattaaggactttccacggaggtaatcatgaaccaacgcccctcccaactcaccagattccgcgtcatggctgccatggcgctggcagtgctggccatttatctggtggtccttttcaatacccaggttgttcaccacgaggaatatctggccaaatccatccagaccatcacccgcatggaaaatgtggaggcctcccggggcatcatcactgaccgctccggccggacccttgtgaccaaccaatccacttacagcctgacctttgacgcctctcttttgaagcccggtgaaaaccagaatgacgccatcctccgtctggtcactctctgccgggatcagggggtcgcttgggaggataacctccccctctccctggacggcgcggcccatttcaccgtagatacccttaccgacacgcagaagagccgctttttctcctaccttcgggacctgaaacccacccgggagctgctggccgcctatgtccgccagcacccggagctgctgaagccccccaaggagggtgaaactgctctggacccggccaccgccaaggacacagagcttttgaagcagaccaacagcgccgcgctgaccaattccctcctgctgaacgccggcgtcacacccgccaagctcttcgactggatgcgggaggatatgaagctctccgacgattattccgacagcgacgcccgcttgatcttgggtgtccggtacgaattgaagctgcggaagctgggtgccaacaacaacgcctacgttctggcgcagaacgtggatgtagccttctgctccctcatcagcgacggccagtttcagggggccaagatcatccgctcctccgcccggcagtacgccaccacctacgccacccatattttaggcaccgtgggccgtatccccgactataccgatgaatgggaagatcggggctatctaatggatgacaccatcggcctctctggtgcagaagccgcctttgaggactacctccggggtacggacggcaagcggatgatctccgtcaacagcgacggaaagatcaccggtgaatattatagtgtagagccccgctccggctataccgtggagctgacagtggatctcaagctccagcaggcggtggaggacactttggccgctaaagtagcccagttgaaccaaaaagaccatctggacagccggggtgccgccgccgctgtggtcaaagtcggtacaggcgaaattctggcactggcctcctgcccttcctatgacctctccacctggcggaaggactttgcggagctgcgggacgatcccgccaagcccctgaccaaccgcgccaccaacagcccctacgcccccggctccaccttaaagcccgctaccgctgtggcggcactggaatccggtgtcaccaccaccaccgagaccatttttgaccccggctactggaaataccccagtgccacttgggaaaacaacacgaattgctggaagcgcagcggacacggcaaaatgaacgtcaccagcgccatcaccaattcctgcaacacctatttcatggaaatgggttaccgcatgggactggacacactgaacgaatactattccgctctgggcctcggtgagcccaccggcatcgagatcggtgaaagcacaggccgacaggccgtcaatgaaagcggccaggatcaggccccgtgggcagctttcggccaggccaatcaggaatataccccgttgcagcttgccaactacattgctactcttgtctctggtggcaagcattaccccgcccatttgttgaaaaccgtcaagtcctatgataactctgagatcatcgccaccggcgacacagaacccctcaacaccctgaacatcagcgattccaccctgcaagctgtgaaaaaaggtatgctgggctacaccaccaacggcggctccgtggccggtcccttccagaactgcgtggtctccgccggtgcgaaaaccggtaccgcccagatcggcggctccatgaaaaacggcgtgttcgtagccttcgcaccctatgacgagccggagatcgccgtagctttggtattggaaaaggctgacgccggcgcggttctggccaccaccgctgtggacattatcaacgcttactttgaccgggaggacactgcgtccattctcccggaaaatcaactgattccttgattcggaggtctctcccatgcgtgatccctttgtgttcgactcccgcagtgagttctgcaaaaagccctacggtgccgtcccctgcggcagcgatgttgtgtttcatgtccgtcccctcacccgggatggctattcccgctgtgtcctggtggcgcggcgggaattttccggtgaagagatccagatggagcttctgccggaggctgtggacggtgagcgtacccgcttcaccggcgtcctcaccgccccctcagaaccggagttgctctggtatcatttccgcctgatccgctccgatggctccacggccctgttggatcaatccggctggcaggagactggggagattcaaagctggcagttgaccgtctatgaaaagagcgccacacctgcctggttcggcagcggtgtgatctatcagatcttcccggatcgcttctgccgtctctccctcccggaccccaccggtctggtgggaaaccgctgggtccacgagaattggaacgaccagcccgtttgggcgccggacccggacggtgaggtacgaaaccgggacttttttggcggctctctcaatggcatcaccgccaagctggatgatctggccgctctgggcgtcaccgtgctgtacctgaatcctatttttgaatctgcctccaaccaccgctacaacacagccgactaccttcgcatcgaccctatgttaggcaccgaggaggatttccgccgcctttgccgggaagcgaaacagcggggcatccgggtgattttagacggtgtattcaaccacaccggctctcaaagccgctacttcaacgccgacggcttctatcccggcgtaggcgcggcccaaagcaccgattccccttatttcaactggttttctttccatccctggcctacggattatgacgcctggtgggggatcatgacgctgcctgccgttcaggagaacgagccggactaccgggacttcatcatccggggacaggactccgtggtgcgccactggctccgggccggggcctccggttggcggctggacgtagccgatgagctgccggatggctttattgccgaaattcgtactgctatggaggaaaccgccccggacagcttccttttgggtgaagtctgggaggacgccaccaccaaggtcgcctactcccagcggcggcgctatctgcttggccacgagctgcacggcgtaatgaactaccccttccgcacggcgctcatcgcctacctgcgaggcggggatgccgacgatttccgggaaacactggaagccctccgggaaaactacccgccggaggcattcctctccctgatgaacttccttggcacccacgatacccctcgcatccttactgttttaggcgcagacaacgtaccggacagcaaggcagatcgggcaacgtaccgcctctcccccgcccagcgccagattggcctggagcggctgcggctggcggcactgatcctctttactttccccggcgcgcccaccgtctattacggagatgaagctgctatggagggttgggaagatccctttaaccgggccggctatccttgggcgcaggaagatactgatctcaaagcgcactttgcggaactggcccggttccggcgctccttcccggcactgcaagccggcgttcttcattggatctggacctccggccccctgctgatctttgcacgagagctggatggtcagcttctgaccaccgtggtcaatgccgctgatgtgtctcaggccttatcgctgccctggtctgctccgcctgcccgggatctgcttaccggtcagcgcttcatcccaactgacaatgcaattcccttgacattgccgccccgcagcggattgctgctgcaaaccgatctgccgtgaagcgctctcgcttccgcttcatgtttcacgtgaaacaactccgctgacaaaagtcagcggagtttcctttacagccgccgccaacaaaatgtttcacgtgaaaccagtagaatctgagtttcccaaaaattgtttttataaaaaatactgcaaaaccgcatttttttacaggaacgccttgaaacaccgcaggctccttgttataatactatttgctgagtcattgcaccgcaatactccacggcacttatgccgtgcatcaaacagggctgtggcccggaaagcaggtggcctgtggcaaaaatcatttccatcgtaaaccaaaaaggcggcgtgggcaaaaccaccacctgtgtcaatctggcagcagcactggcggagcagggcaagcgcgtcttgctttgcgactttgacccacaggccaattccacttccggcatgggcgtggacaaaaccgtttccaaaggcatttacgaggtgttagtctccgacgtgcccgccgcagacgcggtggtgcacacccgatacggagacgtacttccctccaacaaggcactggccggtgccggcattgagctcatcggcatggaccgccgcgaatttcttctgaaggacgcgctggaccagctggcggcggaatatgacttcattttcattgactgcccgccgtctttggagcttttgacgctgaacgccctctgtgctgctgacagcattttggttccggttcagggcgagtatttcgctctggaaggtctcagcgacctgatgaacacggttcgcatcgtgcggcgctctttgaacccgaagctggcgctggaaggcgttctgctgaccatgttcgacgggcgcaccaatctggccatgcaggtggcggaagaggtcaagcactacttccccggcaaggtctacgccacagtgatcccccggaacgtccggctctctgaggcgcccagccacggaaagcccatcacggcctatgaccgcacctcccgcggtgcggaggcctatcaggcactcgcagtcgagttcctgaaaaaacagtagaaaggagcgtttctatggcatcaaaaaagccctctggtctcggcagaggactcggcgccctcttaggcgacgatgtgatgaaaaccgagtccagcggcagtctgtcacttcccatttcacaggtggagacctgctcatcacagccccggaagcgctttgatgatgaatctctccaggaactggcggattccatttcacagcacggcatcattcagccgttaaccgtgcgaaagctgtcatccggctactatcagatcattgccggagaacgccgctggcgggcagcccggctggcgggcttacaggaggttccggtcatcgtgatcgaggccgatgaccgcaaggcagccgagctggccatgatcgaaaacctccagcgagaggacctgaatcccatggaggaagccgccggttttcagtcattgatcgaatcctaccacatgacgcaggaggaagccgcccagcgggtaggcaaatcccgcagcgccgtgaccaatgccctgcggctgctgggactgacgccctccgtccgaaagctggtggaggagggcaaactctccgccggtcacgcccgggctttggtccccctctccccttccctgcaggaaagcgcggccaacgccattgtcagcggcggactctccgtccggcagacagaggctctggtcaaacggctttccgccgagaagaaagaggcgcaggccaaagatcctgacgaggtggattatctggcagaggcccaaaatgagttgaaggcccggctgtgccgcggtgtgaagatcgttcccggccgcaaaaaaggtcggatcgagctggaatattacggtgtggacgatctgaatgacctgctggacgctttggccgtcatcaaggtctcacaattaaagaaaggacctcatgcatgaaatttgaaaaacgagctgacggaggcgaggtgacgcccacatcctcagaaacgccggaaaccggcaagaaacccgttatcatctatattctgatcctgttcctggcggcatttctgctgatgtttctctccatgctgtcccatcagcggagcaacacggaggcactgggacaattacagaattccgtctccgccattcaggagatccagacaacacaggagcagatcatcgagctgcagaagcggctggatgaaacagaagcagaacgggatgaggccaaggaggagctgaaggtcatttccgacagcatctccgatctggagaaaacgtctcaggcgctgctggccctctacaatcttcagcaggagtatctcaccggaaatctggacggctgcctcctgacccttcaggagatcagcgaccagcatctggacgagcttctgcccagcaccaatacggaaggcgttacgcctccggcccagcggtatcaggaattaaaagaagcgattttgaacaagtaaacattatcattacaattatttcgatcaaatcgatcaaggagaatgaactatgctcgacattaagtttatccgggaaaatcccgacattgtgaaggaaaacatcaagaagaagtttcaggacgagaagctgcctctggtggatgaggtcatcgagctggacagccagcgccgggccaacattcaggaggcggaccagctccgttccgaccgcaaccgcctgagcaagcaggtcggtatgctgatgggtcaggccaagaaggaccccagcaagctggctgaggccgaggctgtgaagaagcaggtcaccgatgaggctgagcggctggccgctctggaaaagctggaagctgagctggacgagaaggtccaccacatcatgctccagatcccccagatcattgacccctccgtgcccatcggcccggacgattccgccaacgtagaggtccagcgcttcggcgaggccaaggtgcctgacttccccatcccctatcacacggacattatggagagctttgacggcattgatatggacgccgccggccgtgtctccggctccggcttctactacctgctgggtgacattgcccgtctccacgaggctgtgctggcttatggccgggacttcatgatctccaagggcttcacctactgcatcccccccttcatgatccacggcaacgtggtggagggcgttatgagccagacggatatggacgccatgatgtataagatcgagggcgaggacctgtatctgatcggcaccagcgagcactccatgatcggccggttcatcgaccagatcattccctccgacaaactgccccagacgctgacctcctactccccctgcttccgcaaggagaagggctctcacggcattgaagagcgcggtgtgtaccgcatccaccagtttgagaagcaggagatgatcgtggtctgcaagcccgaggactccaaggcgtggtacgataagctgtggaacttctctgtggagctgttccgctccatggacatccccgtgcggcagttggagtgctgctccggcgatctggccgacctgaaggtgaagtcctgcgacattgaggcctggtccccccgtcagcagaagtactttgaggtgtgctcctgctccaacctgggtgacgcccaggcccgccgtctgcgcatccgctacaaggatgaaaacggcaagatgcagctgtgccacactctgaacaacacctgcgtggcacctccccgtatgctgatcgctttcctggaaaacaaccttcaggcggacggcaccgtaaagatccccgaggtcctgtggccctacatgggcggcaccaaggttctggtcccgaccaagaagtaaattcttctcacagccctgtaaaaacaagaaatcggccaaaagctacgaattgtattattcaaatagaataatacaattcgtagtaggccgatacagcccatagcagaccgcggaggccaaggtgggatcattttaggtcctgaaaacgtctccattccggtctgcgttctgaaacccttgcggcgcaacggtttcagctttcaagattttttgaccaaaaggaggttcttcccatgtccgcacccgaaaagaaaaaaagcttcatgggagagttcaaaacctttatcgcccgaggcaatgtgatggatatggccgtcggcgtcatcatcggcggtgcgttcggtaagatctccacttcccttgtgaatgatgtcatcatgcctctgatctccgtgctcaccggcggcgttgatttttccaactggaagatcgtactgaaggccgctgtcgccggagccgacggggtgatcgatcccgctacggaggttgccatcaaatatggcagcttcctggccacgattctggattttctcatcatcgcctttgcggtgttcctgatgatcaagaccatcaacggctttcacgataaaatgaaaaagcaggaggaagcagtccctgcggaagaatccgcgccgccggagccctctaacgaggagaagctgctgacggagatccgggacctgctgaaagcccagaaataatggaaacacttttgaaaaagggcctggcggaattgggcttggattgcagcggcacccctcccctgctgcggtatggggaactactgctggaaacgaataaagtgatgaatctcaccgccatcacggacccggaggatgtggtatccctccactttttggacagcgccgcgttgttgacgttggcggatctcaaggacaaaaccgtggtggatgtaggcaccggtgcgggttttcccggtatgcccctgaaaattttggagccgtccatccgcatgacgctgctggactccttgggcaagcggatcaccttcttacaggaggtctgcgacgagctgggattacagaacgtgcagtgtgttcacgcccgggcggaggaattcgcggcagagcaccggcagagctttgacttcgccgtatcccgggccgtggcgaatctcagcgtattgtgtgagttgtgcctgccactggtgaaggcgggcggatacttcctgtccatgaagtccgtggagtccgatgaggagctggaatccgctaaaaaggctatcaagattttaggcggacaggtggagcggacggccgactaccagatccccggcacagaggtggtccatcgggtgatttttataaaaaaaattgccgaaacaccaaaaaaatatcccagaccatttgcaaaaatcaaaaagaatccgttataataaggataccggcatttgaaagtgaggtggtgtcgtgagcggacaatgtatcgcggtagtgtccggcaagggcggcaccggtaagacctccctgactgccggagttggcaccgcgctggcccagagcggcaagcgggtgctgtgcatggactgcgacatcggactgcggaatctggatctggccttgggtctgacggaccgggcgctgatggatttctccgatgtggcgctggaccgctgtccgctggaagcggctgtggtggcgcatcccagtattcccaatctctatctgctgacggcgcctgtgcgaatgcgggggcctgctgtgacagaggaggactttcggcggatgctgcaaaaaatccggcagcagtttgacttctgtctgctggacgcaccggcagggctggggctgggattccgactggcagtctgcggtgcagaccgctgcgtggtagtgaccacacaggatgcctcttccctgcgggacgcccagcataccgtgatggaactgcggcagttcggctccggccggctgcatctggtggtgaaccgggtgcggaagaagctgctgcacagtatgcacgccaccattgatgacgccatggacaaggcaggtctgcccctcatcggcgtggtaccggaggatgacgcactgcctgtgtccctgaatcaaggaactccccttttgctgcgctcttacaatggagcggccagcgcataccgaaatatcgcaattcgattgcagggtggaaaagcgccgctgctgcgaatcagataagaaccccagaaaggagatcgacagatgaatattgctattatgtcgcatgacaaccggaaggacctgatggtgcagttctgtaccgcctacgccggcattctctctcagcataacctgtacgctaccaacaccaccggacacatggtagcggaagccacgggtctgaaggtacactgcttcctgtcctatgcccacggcggcagccagcagatcggcgcccgcatcgcctacaatgaattcgatctggtactgtttttcaacgaccccagtaacgaaaagatggccggtgagatcagttacatctcccgcctgtgcgaccagaacaatgtgccctttgccagcaacattgccacagcggaaatgctggtactgggtctggcccggggtgatctggactggcgtatgatcgtcaatcccgccagcaaccggcccatcgcttgacaaatcgccggaaaacggctactatcaaatgaatacaccgctatgacgccgcagcagtaggccggaacgcagtctcacagagaggggtgcaatgctgaaagcatcccgtctgccccggaggaaggacagcagcggagcggggacggaaacgtccacggtccccttcccgtaccagaaggccaaagggggcagtctgccccgaatttgggtggcaccacgaagcgtaagctctcgtcccaaagcaatgggacgggagcgtttttttgcagtttttacaatcctataacgccccgtttcagcggaaaaactcagtaatatcacccgaaaaggagtatttttatggcaaaaatgaccccccggacgctgtccggctttatggagcttcttccggcgccccagcagcagatggagcgcattatggaggtcctccgcaagacctattctctatacggcttcacgcccctggatacccccgtcattgaatccagtgaggtgctgctggccaaggctggcggcgagacggaaaagcagatctaccgcttccagaagggcgacagcgacctctccctccgctttgacctgacggtgcccctggccaagtatgtggcccttcactacaacgagctgtccttccccttccgccggtatcagatcggcaaggtgtaccggggcgagcgtgcccagcggggccggttccgggagttttatcaggcagatatcgacatcatcggtgacggcaagctggacatcaccaacgaggcggagatcccctccatcatctatcagaccttctccaccctgggcttgaagcggttccagattcgagtaaacaaccggaaaattttgaacggcttctatgccctgctgggcctcacggagaaatccggtgacatcatgcgcaccgtggacaagctggacaagatcggccccgaaaaggtaaaaaccattctggtggaggatttcgccgtcagcgagagtgacgccgacgagatcttgaaattcatcgccatcaagggcagcaatgcagaggtcctgaaggcgctggagggctacaccgggaaaaacgagatgttcgatcaggggctcagcgaactgaacaccgtggtgaagtatctggcggactttggcgtacctgcggagaatttcgccgtggatctcaccattgcccgtggtctggattactacaccggcacggtctatgagaccacgctgctggatcacccggagatcggctccgtgtgctccggcggacggtatgacaatctggcggagttctacacggacaagcagctccccggcgtgggcatttccatcggcctgacccggctgttctatgtgctgggcgagcaggggatgctgaatccggagctgcccaccgccccggcggatgtgctgatcctgcctatgacggaggacctctcccccgccatcgcgctggccacccagctgcggcaggcgggcattcgcacccagcttcactgcgagcagaggaagttcaaggccaagatgagctatgccgacaagctggccatcccctatgtgatcttcctgggtgaggacgagatcaacgctggcgtggtggcctgcaaggacatgaagtccggcgagcagaccaaactgaatacgcaggagaccatcgaccggatcaaggccggtcttgctgaactggaaaaaggaagcgtgatcgtggaataaccacagaaaggagccgttatgaagctgactctgaagcgtgacctgccgctgctgctggcggcgctgctggtgatctgggggctttggtacgccagaccggtgggggtggagaccctgtatccggagctggagccggacatcattgaggtgtatttgtcggatttcaacacataccgccatgaggatcggcgcttgaatcttaccgccgggacagaggaatttgacgatctctggtcggaaattcgggaattgcggttccggcgctcccccttcaacgtggtagtgcaggccctccccttcctggaagggatcgtagatacctacgtcaaatacccggaaaccgatgatttagataccatgtctatcagcttcgcgcaggacaacggaactgatatctggcggtctgagcatctgaaattcgatgtggacgcatggagttaccgggactttgaccatggggtcacgctgccgctgatgatgaagaacggccacgaaatcgggcagaaaatggcccacgagctgtgggaacaggcgaccgaataaatacaattcgttatttcttattttcattatacaattctaaatcacttttcatggaaaggaagcaacaatatgatgcagaatcgaactcatacctgtggagagctgcgcctcagtgacgcaggcaagcaggtgaaaatttccggctggatggaaaacgtccgcgtggtcagcgccaatctggccttcgtggtggtccgggacttctacggcaccacccaggtggtggcggagaccgaggacatggtgaacaccttcaaggccatcaccaaagagtccaccatctccgtggagggcaccgtccgggagcgtgacagcaagaccgacaagatggccaccggcgacattgagatcgtccccgccaaggtggaggtgctgggccgctgccagcacagcgagctgcccttccagatcaaccgcagccgggaggccgacgaggcccagcggctgaagtaccgctatctggatctgcggaaccccgccgtgaagaagaacatcattctgcggtgcaacgtggtggccgccctgcggaagtccatgaccgagcacggctttttggagatcaccacgcccattctgacggcctcctcccccgagggcgcccgtgactatctggtgcctgcccggaaccatcccggcaagttctacgcgctgcctcaggctccccagcagtttaagcagctgctgatgacctccggcttcgaccgctacttccagatcgccccctgcttccgtgatgaggacgcccgtgcggaccgctcccccggcgagttctatcagctggatatggagatggccttcgccacgcaggaggacgtgttcgccgttctggaggacgtgctgcctcccatctttgcacagtacggcgcttacaaccgggccagcggcgcacccttcacccgtatcccctacaccgaggctatggagaattacggctccgacaagcctgacctgcggatcgacctgcgggtgcaggacgtcaccgccgttctgggcggctgcggctttgagccctttgccgagggcaatctggtgaaggccgtgaaggtcagtgatttccacgagacccggaagtttatcgacaagacgctggcagatgtggaaactgtgtccggcggcaagacctattggttccgcatggacgaaaacggcgagctggtgggcggcatttccaagtttgtcaatcccatcaaggagaaggtcgtcgaggccctggggctgaaggccaatgacttcgtggctctgtccgccggtaagcgggaggccgccctcaagaccgccggtgtgctggtcaagaccctgggcgccgccgttcccggccatatggacaaggagcagtacgccttctgctggatcgtggacttccccatgtacgagatcggtgacgagtctggcgagctggaattctgccacaacccgttctccatgccctccggcggtctggacgtgctgctgaaggctgaaaagggcgagatcgaccccctgaacatcaccgccgaccagtacgacctggtgtgcaacggcgtggagctcagctccggcgctgtgcggaaccacgatcctgagatcatgatcaaggcctttgaactggtccggctgggcgaggatgatgtgaaggccaagttccccgccatgtacaacgccttcacctacggtgcacccccccatgccggtatcgcaccgggcgtggaccgcatggtaatgctgctggccggcgaggacagcatccgggagatcattcccttccccatgaacaagaacgcgcaggacgtgatgatgagcgcaccttctgaggtcacccagaagcagttggatgagctgcatattcagatcaccaagcacgaggaataaaccgcaatgtgcggctttgccgcacaggaaagcatggtaataccatgcgggatggaatccccattttcttttcctcttgcggaaaagaaaacggccattcatggtcaaaagaaaagacgctg

SEQ ID NO: 12245 - DNA, 2766 bp, Unknown
  gut microbiota DNA sequence
gccgctgtgggttaccgcaccgagtccatgcacggcgccggttctccccaggcccagcgcatcatgatcgcccgtcagggcaacatccagggcaagaagcagcttgctaaggacatcgccggcattgtggactgattctgagacgggttgatccccctcggacacgctgcccctgacgcgcccagcggtgggcatgccgtcccgcgggcagcagcgttctgaccgggcagcgcccggtcagaacaaatgataaactgtgatatctgtccctgcgacatatcaatatagcctttccaaaatttacataaaaggagaaagcattatggatttcaatctgagccctgagcatctgttgatccggaagatgatggctgagttcactgagaacgaagtgaagcccatcgctgccgagaccgacgccaagaccctctatccccgtgagaacatcgaaaagctgttcgacctgggtgtcatgggtatgtgcatccccaaggagtacggcggacagggtgctgaccctctggccagcgctatctgcatcgaggagctgtccaagcagtgcgcctccaccggcgatatcgtggctacccacaacggcctgtgctgcgatcccatcctgactcacggcaccgaggagcagaaggccaagtatctgcccatgctgtccaccggtcacaaggtcggcgccttcgctctgactgagcccaacgccggttccgacgcttccaagggccagaccgaggccaagctggagggcgaccactatgtgatgaacggctccaagatcttcatcaccaacggctatgtggccgatgtgttcgtggtctttgccatgaccgataagtccaagggcaccaagggcatctccgccttcatcgtggagtcctccttccccggcttctccgtcggcaagcacgaggagaagatgggcctgcacggctctcccacggctgagatcgtgttcaccgacatgatcgtccccaaggagaacatgctgggccgcgagggcaagggcttcaacatcgccatgcagaccctggacggcggtcgtatcggcattgccgctcagtccctgggtattgccgagggcgctctggaagaggccaaggcctacaccaagggccgtgtccagttcggcaagcccatcagcaagttccagaacacccagttcaccttcgctgacatggagctgggctgcgaggccggtcgtctgctgacctaccaggccgccatgaagaagggttccggtgagcgctacaccaaggaggctgccatggccaagctgttctgctctgagcacgctatgaagaccaccaccaaggcgctgcagatgttcggcggctacggctacaccaaggattatcccatggagcgcatgatgcgcgacgccaagatcacggagatctacgagggcaccagcgaggtccagcgtatcgtcatctccgccaacatgggcctgtaaggaggagaagtcgaaatgaagatttatgtttgtgtcaagcaggtacccgatacctccggcaaggtggctgtcaatcccgatggtactctgaaccgtgcttccatgcagaccatcaccaaccccgatgatatgaacgctgttgaggccgccctgaagctgaaggacgccaccggctgcaaggtcaccgttgtcaccatgggcccccctcccgctgccggtatgctgcgtgagctgatggccatgggcgctgacgagggcgtgctggtttccgcccgtgagttcggcggttccgatacctacgctacctcccagatcctggccgccgctctgagcaccctgggtgttgagaaggacgatatcgtgatgtgcggccgtcaggctatcgatggcgataccgctcaggtcggtccccagatcgctgagaagctgcacctgccccaggtcacctatgccgccgacatcaagaaggacggcgacaccatcactgtccagcgcatgctggaggatggctacatgaccatcaaggtccagactccctgcctgctgacctgcatcaaggagctgaacaacccccgctatatgtccatcggcggcatcctgtctacctacagcaagcccctgaccactctgggctatgaggacctgaaggatcatcccctgatcgacgctaccaccatcggcctgaagggctctcccaccaacatcttcaagagcttcacgcctcctcagaagggcgtcggcatgatgctggagggcgacggtaaggaaacctgcgagaagctggccggtattctggccgctaagcacatcatctaagaaaggggatagaaaatcatgtctaatttcaatagtgctgatatcgctgctttcaaggatgtatgggtgttctgcgagcagcgcgagggcaagctgatgcccaccgatttcgagctgatctccaagggccgcgacctggccaacgagctgggcgtgaacctgtgcggtctgctgctgggcggcgagggcattgagtccgccgctaaggagctgggcggctacggcgccgacaaggtcattgtctgcgagagccccctgctggctacctacaccaccgacggctatgccaaggtcatctgcgacgtgatcgaggacctgaagcccgaggcgttcctgattggcgccaccaacatcggccgcgatctgggcccccgctgcgcagctcgtctgcacaccggcctgtgcgctgactgcacccacctggacgtggatgtgcccaactacatccagttcctgcgtgagtcctccactctggacgttgactccat

SEQ ID NO: 12246 - DNA, 182 bp, Unknown
  gut microbiota DNA sequence
gcggacaccagcagatatgtatatgcgtaatagtggagcgtcagcacaatgatgatcgccagacggccataagcgatgggagacagaatggcttcgatccgctccgtggatatacccgcattcatcatgagggccgcgataaagccgggagcgccgccgacgcggggggtcttgaacatact

SEQ ID NO: 12247 - DNA, 1278 bp, Unknown
  gut microbiota DNA sequence
tccccggcgtatgccctccggacggcctcgatgtactccggcgtcagcatggggtcgctctccacccgttcccggtaggatgccccggtcatggtcatatccgtccaaggggacatcagcagcagggcccggggcatccggcgcccagcggccttcaggcggcggcacagcaccagggccaggttgcccccggcggaatctcccgccaccattacgttttccgccccgtatccctgatacatcagatagtcccaggcccgcatggcatcctccactgccgccgggtagggatgctccggcgccagccggtactcaaagctcagcacatcgtagccggtgacgtgggccagcttggaggacagcacccgggaataacccaggttgccgctggtatagccgccgccgtggcagtagaggatcacccggcggtccccatggggcgctttcagccgggtccaggcagcaggcatggtcccgatggaaagctcttcatactccatccccgccataggggcggtaaggcggcccagaatttcctggttccggcgctgatgctccagctcctccggggtcatggcctccggggaaccggcgctgtgcagggctttcagcgcccgcatcagcgggtccatccggggtttttcggcatccgttttccggtttctgcctaattgcagcttttccataggccctccgctctttcgtgttaattgcagaataccataaatcacggaaaatgggaagtggaaaatgggccatctcttgtcacgcttttccccatgtgctacaatgatctgtaactattttcagggaggtgacgcggatggcaaaaccagacagtcagtggtaccggctggacaatgccggcattctctattccgctctgcaaagggaggaatattccgccatctaccgcttctccgccctgatgacagagccggtgcggcccgccgccctgcaaaacgccattgaccgggtgctgccccggttccccagctttgccgtccgcatccgccggggtctattctggtactatctggagccaaacaccgccccgggcccctttctgaaggccgacgtggccaatccctgccagcctgtgcgcttccgggaggacaacggctggctggtgcggttttactactaccggaaccgcatatccctggaggtgttccacgccctgtccgacggggcgggggccctgatctttttccggacgctgctggcggagtatctgcggcagaccggcataagcgttccggccggaaacggcgtgct

SEQ ID NO: 12248 - DNA, 1980 bp, Unknown
  gut microbiota DNA sequence
aaaacgcaaaatattttattttttgaaagcggatactatgtaaagacaatccgaagattgcctcaggcatgactgcggcagcagtctgtatgcagcgcaactaagcgattctcaatatcttcggtgcaagcgacgccgagaatgtttctgagttctgctctggtgaattttgtcattgcgggtttaaaaaaagaaaagaaccaagcaatacgcaaaatctgcgtactgttcagctcctattgagctgtatttgcataacagcgcctgccgaactctttcagaatccaagtcttacccacctgacgtacgcccttcaagatcaagggcttgcggtagggaaaattcttccaagtcagcatttttttgagataaatcgctccgcagaatcgcttctcacatttttattggcgttttatgcttaataatcacgcttttatacgatattttgaaaatatattctgtcatgaagacagccacagcctcaacgtgaactccaccacccaagcgcaaacgctaaggatggtgcttccgggactttaggtcccagacgcatttccaccgtgcggcaaaacgcagaagctgaatatccgaatgttattgccagcgataacattcggatatttccgtttccatgggtgtttgtgctatgctcaatgcaaccaagtaagttagtaggcattcatttgcgcagtcacacaaccgacgggaggtattttaaatgagccagttagttttgaagcaccctgatttgaagcatgaagatctgaaattcaacacggtagaggtccacgccggcgagccgcgggatatgtacggtgccctgatcccgcccatttatcagacgtccacattctattttgattccacggacgatgcggtgaaggcctgcgatgactatgccgagagctttgcatacagccggatcaccaatccctctgtggattatctggagcagaagctggcggcgctggaacacggcaaggaggccgtggcctatgcgtccggcatgggcgctgtctccggcgcgattttcgcactgctgaaaagcggtgatcatgccatttttaccaaggccaagtattccggcacggaggacgtgaccagcgactggctaccccgcttcgggatcgcccacgatacctttgacgccgccgatctcagccagctggaaggcctgatcaagcccaacaccaaactgatctatgtggagtctcccgccaaccccaccatggtgctggtggatattgccgccgtggtggagatcgcccataagcacggcatcaaggtctttatcgacaacacctttgccacgccctacaataccaccccgctggatctgggcgtggatgcagtcatccacagcctcaccaagtacatcggcggccacggtgacctgctgggcggcgcggtgatctccaacgatgagcagttcctgcgggagtgccgtctgggtaccctcatgcactttggctccgtcatggcgcccttcaccgcgtttctggtgtgccgcggtctcaagacgttgggtgtccgcatgaagcagtacaatgaaagcgctctgaagatcgccaagtggctggaggccaatccgaagatcgaaacggtccgctatcccttcctggaatccaatccccagtacgccattgccaagaagcagatgaagggcggaggcggcatgatctcctttgacgtggccggcggtctggaggccggtaagaagttcatcaacagcctgaagctctgcacgctggccgtctctctgggcgatacggaaacgctggtggagcaggctgccgccatgacccacaccatgatccccaaggagatccgggaggccgccggcattaccgacggcatgatccggatgtccgttggtctggaggatccggatgacatcatcgccgatctgaagcaggcgctgggcgactgacggcccggaagccccaaaccggcagacgcgaggccatccaaaggaccatc

SEQ ID NO: 12249 - DNA, 8110 bp, Unknown
  gut microbiota DNA sequence
actcttcctccggggccagcagcattttcttaaaggctttcatggcaacgctttgggggcgggatgtatcctcgatcaggttgacgaaccgttccgggatcggctccgcaaggcggatctggaacaccgtcccggcggcaagggcggaagcggccatggactccgggtagaaaccgacgcccagattgctctgcaccatcgcgaggacctgatccatggtgccggcttccatttccacatgaaaagccagattgtgctttaaaaacatctgctgataaaaggtatatgtactggttcctctgctcatgcacacaaaggggatgttttccagatcccgcagactctgcgtttctgcggccagatcatgaaaatccgaaccgcagatcaggatctcccggaaggagaccagcgcggtttcctgcagggactttctcaccggacagggcgtggtgaccgccgcgcagtccacctgtccccgcagcagcccttccatggcgcggggggtggaatcgttggtgatccgcaggtggatccccggataccgccggtgaaacgcgtcaaggcggttcagaagggtcagatggagcgcggcttcgctggcggcaatggaaatgctgccggtccgcagactgcaatctgaccggagttcgctttcgccaaggcgcagctgttcaaaggccacagcagcgcggctgtaaagccgttgaccttccggggtcagggagacgccatggttggtgcggacaaacagcttgcagcccagatcctgctccaggttgttcatgcagcgggtaatgttgggctggttattgcccaaagcttcggcggccttggtaaagctcttgtgttgggcaacatagtaaaaaatgcggtaataatcgtagggaatagccacttttttcgcctccgtgccatatcattcagatatgtccaacatatcaaatatactttttacatctttctgttagaacagtataatacgggcgttcttagaagacaagtcctttaacggtcacgccggaaaatgggacacggtcagggcagaccgcagcgcctgtattccggtgtggaaaggagaccggctatcagcatgaaaaacaaaaagaaatttatgatcctatgggtcctgctcatcgcggtcctgttcgcgggcagtctgttgacggcgccgcctggaaaaacggagaccattcagaccgccatgcgggacgcggtcctgcatgaggaaaatcagatcagcctgttcggctggaaaaacgtcaatccgggactgatctccgccatgacggtatccgctatcctgctgatagcggcggcgtgtatccgcgtgtttgtcatcccgaaattcaaggtggtgccggggcggttccagctgctgctggagcaggccgtaagcctgtttgacggcatggccaaaaccagcagtcctcagcgaaacggatttctgggggcctacatcttcggcgcgggcgcgtatatcttcgtggggacgctgtttgagcttcttggcttgcagactgtcaccaccacgggccgctccgtgacccttcccgcgccgctgtcggacgtaaacggtgccatcgcccttggctgcttatcctatcttgtgatcctctccggcgggatcgcgggcaacggtctgaagggcgtgggcaagaccctgaaggagttctctctgcccatttccatgagcttccgtctgttcggcgcgctgctcagcggcctgctggtaacggagctggtttattactatgtgcagctgagctatgtgctgccagtgctggtgggcgttctgttcaccctgcttcacgcgttgatccaggcctatgttctgaccatgctcacagcgttgttctacggcgaggtgtcggagcgtcccgaaccggcgtccgggcgggcatgaccgtcccaatcatttacggatcgaatcattttggaggtaatcaatatgaaactgcttaagaaaaaggtccccgcgctgttcctgatcctgctggtggtgctgtccctgacagtccccgcactggccgcttcttccacggataccgctgccgcacccgctgcggcggaaaccgcccagacccagagcgacgccacggggtccaagtccatcgctgcgggtattgcaatcggccttgccgccgcaggcggcgccgtggccatgggcgttgccgtcagcaagtctgcggaggggatcgcccgtcagccggaggcggagggcaagatccgtaccacgctgatgctgggactggtctttatcgaaaccactatcatttatgcgctgctggttgtcattctgatcatcttcgtcctataagtaaggcaggtgggaatccgtgaatatcccgttgaatattgattggcagcaaattttgctgcacctgctgaattttgtgattctggcaggcgggctgtacctgctgctctataagcccgtcaagacgtttatggagaagcggcagcaatactatcaggagcaggacgcgaaagcggcaaagacgctggcagacgcggagaaaacagcggcagaggtccgtcagcagttgaaaaatgccgacgccgaagctgcggcaaagctcgccgccgcccagaagtcggcggacgccgccatgcagcggcagctgtccgacgcacgggcacaggcggagcaaattctggcggacgcccatgccgctgcccagcgggagcatgacaagctgctgtccgacgcgcagaaggagctgaaggatctggcagtgacagccacggaaaagctggtgctgcaatccgacggcgatgcgttcgatcagtttttggacgcggcggagaggggggagtcccatgcgtgaaacggtactggaagcggtcctgcgcagcgcggacgcccccagtgaggtgcagcggaaccgttttgcggcctttttgaaaaagcagtacgggcaggaggttcccctgcgttgggaacaggaccccgcgctggaaaagggctttcggatggaagtgggcgccgacctgtatgactggagtctggaaggccgtctgcggcagttccgggaacggctggagcagctgaaccccgccgatgagtccgtcatcccgctgatgcgggaggccgtccgcaactggcagccggataccgcgccggaggaggtcggcagcgttctgacggtgggtgacgagatcgccaccgtcagcggactggagcacgcggcctacggagaaattctgcaattttcctccggtgtgaagggcatggtacaggatctgcggccggatcgtgtaggctgcatcctgttcggcggcagtgaggccattgaatccggcagcatcgtccgccgcacaggtaagaccgccggtatcccggtaggggacggctttctgggccgggtggtggacgcgctgggtatgcccattgacgggcagggcgacattccgtcggagggctatctgcccattgagtccccggcccccggcatcattgaccgccagccggtaaacgcgcctatggagacgggcctgctcgccatcgattccatgttccccatcggacggggacagcgggagctgatcatcggcgaccggcagaccggcaagaccgccatcgccctggacaccgttctgaatcagaagggaaagggcgtggtgtgcatctatgtcgccatcgggcagaaatccagctccgttgctcaactggtagagaatctgaagcacaagggcgctatggactataccatcgtggtgaacgcgcccgccagcgcgtcggcgtccttgcagtacattgctccctatgccggaacagcactgggcgagtacttcatgcggaagggccgggacgttctgatcgtctatgacgatctctccaagcacgccgtggcctaccggactctgagcctgctgctggagcggtctcccggacgggaggcctaccccggcgatgtgttctatctgcactcccgtctgctggagcggtccgcccacctctcggaggaattgggcggcggcagcatgacggcgctgcccatcgtggagacccaggccggcgacgtgtccgcctacatccccaccaacatcatttccatcactgacggccagatctttctggagagcagtctgttcttctccggccagcggcccgcggtcaacgtgggcttgtcggtgtcccgtgtgggcggcgacgctcagacgaaggccatgaaaaaggcggctggcgccctgcgtctggatctggcccagtaccgggaaatggaggtctttacccagttttccagcgatctggacgagaccaccaagcggcagctgatttacgggcaaggcctgatgcgcctgctgcgccagccccagaaccacccctaccagcagcaccagcaggtgattttgctggtggcggcgctggatcatgtgatgcagacggtgccccttgtgcggatggatgattttcgcaccgggctcctgacctatatcgagacccaggaccaggccctgtgccgccgggtcgatgagagcggtcagttaagtgatgaggaccgggagacgatcctgaagctgtccagagaatttctgacgcggttccagacagaagctgcggaaaagagcggtgagtgagatggccaatacccgtgagatcaaaaaccggattgaaagcgtacagcagacccggaagatcaccaacgccatgtacctcatcgcctccaccaagctgcggaaggcacggaacgatctggccaacacccggccgtattttgacgcgctgcggggcgagatcaagcgggtctttcgcacggcaggggatgtggacagtccctatttctatccaccggacaataacacaccgctggagggcacctatgggtgtctggtcatcacggcggacaagggccttgcaggagcctacaaccagaacgtcatcaaggaggctgaaaagctccttgcccagcacccggacaccaagctgtatgtagtgggggagtatggccgccggtactttgaccagcacaagatccccattgagcacagctttctctacaccgcccagaatcccacgctggaccgggcgcgggagatcagcgctctgctgttagacggtttcttggcgggaacgctgaaggagatcttcgtggtctacaccgatatggagagcagtctgctctccgaggccaagtccacccggctgctgcctttccaccggacgcagtttgcgccgcctgccaaggaaaaggccgtgcaggagccctttgaattctatccgtccgtgggggcggtgctgaacagcatgatccccagctatgtctccggcttcctgtacagcgccctgctggatagcttctgcagtgaacagaacgcccgcatgaccgctatggacgccgccaaccagaacgcggaggagctgttgagcgctctgcggctgcaatacaaccgcgtgcggcaggcggccatcactcaggagatcacagaaatttccgccggcgcggcagcacagcggagaacctttggaagcgagggataacaatgaaaatcggaacgatcacgcaggtatccggccctgtggtagatgtggagtttgaagccggacatctgcctaagatcaaggaagcgctgtccgtggagctgaacggccagacccgcgtgatggaggtagcccagcacatgagcgagcggatcgtccgctgcatcatgctggcgggcagcgagggtctggcccggagcatgaaggtaaccgctcccggcaagaccattgaggtcccggtaggagagcagacgctgggccggatgttcaacgtgctgggccagcccatcgacggcggagagccgctcccggcggaaacgccccgcaagagcatttaccgggatccgccctcttttgaggatcaaagccccgccgtggagattctagagaccggtatcaaggtcatcgacctgctggagccgtatcccaagggcggcaagatcggcctgttcggcggcgccggtgtgggtaagaccgtgctgatccaggagctgattcacaacgtagccatggagcacaacggctattccatcttcaccggcgtaggtgagcggagccgggagggcaatgacctctggcgggaaatgcgggagagcggcgtggcagataagacggcgctggtcttcggccagatgaacgaatctcccggcgtccgtatgcgggtggcgctgtccggcctgaccatggccgagcacttccgagacgtggagcacaaggacgtgctgctgttcatcgacaacattttccggtttgtgcaggcaggcagcgaggtttccaccctgcggggccggatgccctccgccgtgggctatcagcctacgctggccaacgagatgggccagttgcaggagcgcatcacctccaccaaggacggctccgtcacctcggtacaggcggtctatgtgcccgccgacgatttgactgaccccgccaccgccaccacctttgcccatctggacgccaccacggtgctgagccggaagatctctgagcagggcatttaccccgccgtggacccgctggaatcctcctcccggattttggaggcggacattgtgggcgcggagcattaccgcatcgcccggagggtgcaggagacgctgcaaaaatatcaggaattgcaggacatcatcgccattctcggcatggacgagctgagcgacgaggaccggcagaccgtgaaccgcgcccgccgcatccagcgctttctggcgcagcccacccatgtagctgaaaaattcaccggtatccccggcgtgtatgtccctctaaaggagaccctgcggggctttgccgccatcgtggacggtgaaatggaccagtatccggaagcggccttctacaatgtgggtacgctggatgatgtggtcgccaaggcgaaaaagatcgaggaaggtgaggtctgatgagcgcgtttcacgcacagatcctggcctcggacactctgttctttgacggtgactgcgaattcatggtggtgccctgtacggacggcgcaatggggatcctctcccaccacagcaatatgatcgcggctgtggtgccgggggagctgcggtttcagccggtgggcggcccgctgcggacagcggccgtttccgccggactggtgaaggtcgaagcaggggaggtcatgcttctggtgtccacggcggagcggccggaggacattgacgtcaaccgggcaagacgggcggaggacgctgcgaaggaggcccttctgcaaaagaaaagtatgcaggagcaccggaacgcggaggcccagctggcccgggccatcagccgtctgcggaccaaagaacactggaacagcagacgctgagccatgagaacacttgaagaggagtcttgattgtgaacctccggaatcatcacggccagatgtcggaatccctgctgaccgcctcatttatcattctctccggcggcttgcaggacgcctatacctatctctgccggggcaaggtgtttgccaatgcccagacgggcaacatcgtactgtgcagcgcctatctgtttgacggccagtggcggcacagcgcccggtatctcgtcccggtgctgtcgtttctgctggggatcttcgcggcggagtgcatccaccgccatttcaagtacacggagaaggtgcactggcggcagatgatcattttagcggagatcgctttgctgtttgcggtgggctttctgccgcaggaggccaacaccttcgccaacgccgttgtgtcctttgtctgtgccatgcaggtgcagaccttccgcaaggtccggggccacgcttacgccagtaccatgtgcatcggcaatatgcgcagcggcacggaggccctgtgcgtctattttcacacccatgaccgggaggtgctctgcaaggcgctgacctatttcggcgtcatcggcctgtttgccatgggcgcgggactgggggcgctgttgtcggcgcacatggccgaacggggcatctgggtctcctgtgcactgctggccgtcagctttttcatcatgttcatccgggaagaagaaaaggcgtgagcgatagatagggcctggatctcagtataccgtctcattctccataaagcttcctgcatgaacagcgcaccgcgaacctgcacaaatgccagtgca

SEQ ID NO: 12250 - DNA, 1038 bp, Unknown
  gut microbiota DNA sequence
gcgcaaccatgacagcgcggcaagcagcaaggccgcaatatcggacgcaccgggatggtggacgttggcattggcagtggcgatagtgatttggctgctcttggcttggaggttgaggcgatgaccaatctgacgctctcccctgctttgggatggcctttaggcacggcgatctgcgtgatcatgctggtttgcgcagtcgcgcagattgtgcttcatatccgtagacgcagccaaagcgatgaaaccgtctgggcttgcgcaagacgatcgatgatttgtgcgctggtggccatcatggcattgacgccaagcatcgtctcgtccacgaacagccgtgcgattaacaccaccgatgtggtggtggcggtagatgtgaccggttccatggcggtcgcggacgcgcagtatggttccgacgaacagctcagccgcttggatgttgccaagcaggcggtgaaggatattgccgccatgtatccgaattccagtttcgcggcattgcgattcggcgcttcgggaacgttggatgttccgttgacgcctgattcgaaggcgatcgataattgggcggacacgcttgcaccggaatcgacttccatttcggccggttcgaccttggatgtgccgattgaccagttgttgctcacatgcaagtcgattcacgatcagcatcccgatgatgcgatcgtgctgtacctgatttcggatggcgagcagacctcgtcgaaaacacgccgaacgttctcatcgttgcgacgctacctttccgatgcgttcaccgtcgccgtgggcagcgagcagggaggcaatatccccgtgaccggcgatggcgtggaggaaggcgacacgcaatgggtcaccgatccggaaaccggcgagcctggcgtgtcccgtatgaatgccgacgaaatgaacgccatcgccgacgagctcagtggaaccgccatccagctcaatgccacgacgaccatgagtggaggggattccaaagaggcatccagcaaatggcgtgtcacgcagacatccaagcaacgc

SEQ ID NO: 12251 - DNA, 299 bp, Unknown
  gut microbiota DNA sequence
cgccatggtctggccgttcgccattgccgtagcgctgctgctgacgttcgaggccggggcatggatcacgcaatcaaggaggctgctgtgagcacaaccgttacagcgcgtgcatcgctgcccgttcgcatcgccatcgccgtcatcgcagccatatcggttattgtgggcgtgcttggcatagtgaatctcgcatccgtcagcaactacaaccaggccacggacagtctgaatgcgaatatcaaagccagccaacagcaagacgccgatttcgacaaattgcagacccaacagcagca

SEQ ID NO: 12252 - DNA, 1161 bp, Unknown
  gut microbiota DNA sequence
tcctgtctccaatgggatgctcaacaacaaccccatcaccgtaaagctgcctctgcctaccgttgacggtaagctctttacccccaagcagatcctccataagtttaccggcggcggctatgagtatttcatcaacgaatccgtgggcggtatgcgcggcgctggcagctttaagatcgaggataactgcgctgtgttcaccatctatggcttcagcacctttgagttgtccggtacggtcacctatgtggtgcccagctccggcggcggttccagctcttcctccagacgctatgacgtctccgcgccctctgtcaagcacggcgatgtgaccgtcagccccaagaacgcctccaagggcgataccgtgaccatcaccgtcaagcccgacagcggctatgagctggacaccctgaccgtgaaggacgccagcggcagcaagatcaaggtgaaggacaagggcgacggcaagtttacctttaccatgcctgcctccaaggtgacggtttccgctgaattcgctgagatcgagacgctggacttcgcggacgtttccaccgacgcctactactatgaggccgtgaagtgggccgccaagaagggcatcaccggcggtaccggcgacggcaccttcaaccccaacggctcctgcacccgcgcccacatcgtcaccttcctgtggcgcgccgccggctctcccgagcctaagagcacggtgagcttcgcggatgttcccgcagacagctactacgccaaggctgtggcctgggctgtggagaacggcatcacgctgggtaccggcgacggcaccttcagccccaacgccacctgcacccgcgctcagagcgtgacgttcctgtaccgcgcactgggcaccgcgcccaccacggtgaacggcttcaccgacgtgacggccgatgctttctatgctgacgcagtggcctgggccgtggagagcggcgtgaccaacggtacgtccgcttccaccttcagccccaacaacggctgcacccgcgcccagatcgtgaccttcctgtatcgcaccatgaagtaacttcatacgcaagcagcgggaaacctcattcgagatttcccgctgtttttttctgcccggccggggcgcggtttacagggaccgactcatccgacttttgcaaaatg

SEQ ID NO: 12253 - DNA, 3654 bp, Unknown
  gut microbiota DNA sequence
tctactcctaagcgttaggccgctggttcgactccagtccggggtgccagagaaaagcagaacatccgatcggatgttctgcttttctctggattttgcgccttttcgaaaaaatctccggaaaaatccaagccgggaaggagatggccttgcatttttgggaaaggcatagtaaaatactaccaaatagaggcagagtagaagcacgcgtgtcggccaacaggccacagtgccggaggaacggggagttgtccgccggacgaaaggagatttccgcagtgtgtgcttcgcatcccgctgccgcataccggaaccggcgggcggtgcttgcccggcctcctctgtgcggcgtaactgcccacagaaggaggaattttttatgtatccccatcccttttccgtcggctattggcgcacagccgccaatgagctgaaagacgtccggaagttgacctttgcagcgctgtgcatcgctttgtgcatggcgctggccgccattccgtcggtgcccctgtggggcggtgccaaaatcacctggggcttcctggcccgggcggtgtgcgcatgggtctgcggacctgtactgggcgttgtgtttgccgtggcggaggatctgctgagctttttcatcaccggtggcggcggctaccctttctttcccggctataccctgaccaccatgctgggtgtttttgtatactccctgtttttctacaagtcgaaaattacgtttggtagagtcttttgggcgaaattgctgaccaatatccagaatgtgatcctgggcgcactctggatggccattctcagcggcaaggcgtggtacgtcaccgccagcggcagcgccatcaaaaacctgatctgtctgcccttccaggcaattttgctctataccctgttcaccacccttcgtccgtttttggtgaaaatgcggctgattgagtgacagggaaaacctcttttcggtgatacgtgcgccccggcttcggccggggcacttttcatatgaaaaccggcgggaaagggggaagttcatcatttgctttccctttgttcacaaattgtttacctgcccccattgactttagatagcaggggtggtaaactgcgtttagcactcagggagaaagagtgctaaacatgatttgaggtgctttttgtggacttgactgaccggaaaaagcaaatattgaaagtggtggttgaggattacatccgcaccgccgagccggtaggctccaaggccattgccgcggaaatgggcggcagtgtttcttctgccaccatccgcaatgagctttccgacctggtggagcttgggtatctggaacagccccacacctcggcgggccgggttccgtcccccaagggctaccggctgtacgtcaacgagctgatggagcgccagcggctctccttagcggagaccgaaaagatcaaccagtccctccagatgaaaatggaggagttggaccgagtgatttctcaggcgggtcgggccgtcagcagctttgtgaattaccccgcctatgtggcgactgccggaaagggcagcatcaccgccagccgctttgatctgctgccagtggatgagaaaagctgcatcgtggtcatgatgatgggcgacaaccgggtgaaatcccagctgctgcggatgcagctgaaggtggaccgggaccagatggccgctttggtggagcttttgaaccggcatttcacagggatctccatcaaggagatgaaccagaagctgatggccatttcgcagggcattaccccgcagctgtttctgctgctgagccagacagtgaattacgcggtggatgttctggaggaatccaaccatcgtgagttcatcatggcgggcaccaatcagctcttgaagctgccggagttccgggacgccgacaaagcccatgaattgatgagctttctggcggacgataaggaaaagctgccggtgccggacgagggacctattaaaattttgattggcccggaaaatgtgaacgatgccttaaaggacaccagtgtggtggtggccagttacgatattggtgatgatatgcgggggttgatcggcgtggtcggtcctacccggatggattacgccaccgtggccgcccggctgacgggctttgccgatgggctgaccagactgttcggcaaacaggaaaaacaagaactacccccgaaggaggatacagatacatgagcgaagaaaccaaagagcctttagaggagactcccgtgaccgcggaaacggcggagacggagcaggaaaagactccggagaatcaggaaccggaaaagaaggccaagaagaaagaaaagaaggaaaagggcatcacctttacccgggagcaggtggagaagatggagctggctgccaagcagctggaatccgtgaaggatcagttcacccgcctcactgccgagtatgacaactaccgcaagcgcaccaccaaggaaaaggatggcatctatcaggatgccaagggcgacaccatcaagaccttcctggcggtgtatgacaatctggagcgggccgcagccgccgagggcggcgaggacgatccccacaaaaagggattggagatgatcttccaccagttcaaggagctgcttgccaaggagggcgtcaaggagatcgaggccaagggcaaggaatttgacccggagctgatggacgccgtcatgcacattgaggacgagaaccttggagaaaacgtagtggctcaggtgttccaggcgggctttgagctgaacggcaaggttctgcgccacgccattgtgcaggtggccaactaaaaggagatttatatggataagaagctgtaccgtgatccccagaacgggatgatcgccggtgtgtgcgccggtgttgccgagtatttcggctgggaccccacctgggtccggcttggctgggcgctgttcacactgctgggcggcagcggactgattctgtatctgatcgcggcgatcatcatgccgcggatggaccgtatgtgatccgagcgccggtgaaaaccggggtatgcaaatagttatcaataaaaattcagataaatttggaggaattcattatgtctaaggttatcggtatcgacttaggtacaacaaatagctgcgtggctgtcatggagggcggcgaagccgttgtcatccccaacgcagagggcaaccgcaccaccccgtctgtggtggcattcagcaagaccggcgagcgtatggtgggccaggtggcaaagcgtcaggccatcaccaaccccgaccgcaccatttcttccatcaagcgtgaaatgggcagcgattacaaggtgaatgtggacggcaaggcctacacccctcaggaaatcagcgccatgatcctgcagaagctcaagagcgacgctgaggcctatctgggccagaccgtttccgaggctgtcatcaccgttcccgcttactttaccgacgcccagcgtcaggccaccaaggacgccggcaagatcgccggtctggacgtgaagcggatcatcaacgagcctactgccgcggccctggcctacggcgtggataaggagcagtctcagaagatcatggtctacgacctgggcggcggcaccttcgatgtgtccatcctggacattgacgacggcgtcatcgagg

SEQ ID NO: 12254 - DNA, 9516 bp, Unknown
  gut microbiota DNA sequence
gatccaataggtttttctgctttcttgtcggaatcaactcatgggaaggatcaatacgcattcggggtgaccactggtgcaggcataaagaatgttgtatccctgattatggtcttcttttgcgacccaaagcatcccagttctcagattgatcgtctggccgtccagagtaaaggaagtgaacccaggagtacctccgtagtggtcgaattctttgagataatccttattgatctcccccgtctccatgaactcatattggagctgggcgtaatagctccgcacgttggcccagtcggttgcgacacgcgccttgtgaagctgtgaactgaaggtcgggatcgcgacggccaccagaacggcgatgatcgccacaacgatcagcatctccatcagtgtaaatccgtgattccgttttgcggtcggggttgttctctgtttcgtcattttgccaccattcttcataccgtatcggcgcgggccgcccatagggaacagggggcctgccgtatatgctctgttttgcccggcttccaattcaagtgtgagccgagtccgagtttttattatatggataacgcctgccgccgtcaattctttgcggcaaaatttttaaattttgtgcattttggtgaaaaaagcgggtgctttgcaggagcgttggacggaatatggcggacatctatccgtaaatgaacaacagcagcggcaatttgccgctgctgctgtgctgtaatttggaatagcaagtttgagcatccgaaaggggagaggccgtcactgaatggcgaagatcagctccgcggtgcaggccgtctcgccgttcaccgtggcggtgcaggcgccgatgcccaccggaccccggcgcttcgtgagggtacattccagctccagaacgtctccggggatgacctgccgcttgaagcgggcgtttttcacgccgccgaacagggcgatcttcccccggttctccggcagggacaaaatcgccacggctcccacctgggccagcgcctctaagatcagcacaccgggcatgacgtgcttttggggaaagtggccgcagaaaaacggctcgcccacgctgacgcacttgatgcccttggcccacacgccggattctccgtcggtgatgcggtccaccagcgcgaaggggtagcggtggggcaggatctcggcaatctcattggaatttaactgtaagcccatgtcagtcctcccattttttcagcagcaggctgccgttgtgtccgccgaagcccagagagttgctcagggcgtaccggatgtccgccggacggccctcgttgggcaccacgtccagatcgcacgccgggtccggggtctgatagtggatggtggcggggaggaagccgtcccgcaggctcagggcggtgaagatggcttccacggcgccggcggctcccagcatatgtccggtcatggacttggtggagctcatagccagctgataggcgtgagggccaaacacggttttcaccgcggcggtctccccggcgtcattgaggtgggtagaggtgccgtgggcgttgatgtaacccacctgctccggcgcaacgccgccgtcggtcagcgccatggccatggccttggcaccgccgctgccgtccgcaaggggagcggtgatgtggtgggcgtcgcaggtggcgccgtagcccgccacctcggcgtagatcttggccccgcgggccttggcgtgttccaattcctccagaagcagcacgcccgcgccctcgcccatgacgaagccgctgcgctccgcgtcaaagggaatggaggcccggtcggggtcctccgtctgggtcagggccttcatggaggtgaagccgccgatggacatgggcgtgatggaggcctcggtgccgccgcagagcatgacctcggcgtagccgtcccgaatgtagtggaaagcgtcgcccacggcgttggtacctccggcgcaggcggtgacggggcaggagcacatggcccggaagcccgcgtcgatggccacctgacccgccgccatgttgcagatggcggtggggacatagaagggggatacccggtcaaagcccttttcctgaccccggctgtgctccgcctcggtgatggcctgtccgccgatgccgctggagaggatcacaccgcagcggtccgcatccgcctgctccacggagaaaccggcgtcggacagggcctcccgggccgccgccacggcgaactgggtgaaacggcccatacgcttggattcctgacggcccagcagggcctccgggtcgaagccctttacctctgccgccagcttcaccttctgggcggcgggatcgtaatgggtgatggggccgatgccgcacacgccgtttttcacggcctgccagctttctcccgccgtcagtccaatgggggtcacagcccccagaccggtgataacaactctgcgtcgttccatgtcgcgttcctcctcacatactcatgccgccgtcaacggccaaaacctgcccggtgatgtagcccgcgtcctcgtcggctaaaaaggccacggccttggccacgttttccggcgttcccatgcggcccatgggaatggagccgagggcggcgtttttcgcggtctccgacagtgcggcggtcatatccgtgtcgataaagccgggggccacggcgttgacggtgatgttccgtcccgccagctccttggcgagggatttggtcataccaatgacaccggctttgctggcggcgtagttcacctgtccggcgttgccccggagacccaccacgctggagaggttcacgatgcggccatagcgctgcttcaccatctgccgggccacggccttcatgcagaggaaggcaccccggaggttggcggcgatgacggcgtcaaaatcctccggcttcatcatcatgagcaggccgtctcttgtgatgcccgcgttgtttaccagaatgtcgatgcgaccaaaggttttgagggcggcgtccatcagggccttcacctcgtcctctttcgacacgtcgcaccggatggccacggtcttggctccaagggactcgcaggcggcaacggtctcattggccgccgcttcattgcccgcgtagcagagcaccacattggctccgccccgggccagttccagacagatcgcacggcccagcccccggctgccgccggtgacgacggctgttttttcagaaaaattcatagcgatgctcctttgagggtctccgtcagctgttccagctccgccgcggtctccacggcgtacaccggcagctccgggacggttttcttcacaaagccgctgagggccttgcccgggccgatctccaccagcgcgtccagccccatggcggccatgcggcggagggaatcctccatgtagacgctgctctgcacctgccgcaccagcagctccgggatggcagcgccgtcgggacgctccgcgcccagacagttgaagatcacggggatctgcgactcccggaactccacggtgcggaaccgctccgccagagcgtccccggcgggggccatgaggggggtgtggaaggggccgctgaccttcagcggcagacagcggcgggcgcccttttcctttgccagagccgccgcggtctccacggcggccttctcgccgccgaggaccagctggccggggcagttgtagttggcgatgaccacgcagccgtgggcggaagcctcgtcacaggcctcctgcaaggccgcccggtccagccccagcaccgctaccatggcagagggccgaccggctgcggcatcctccatggctttgccacggaaggccaccagctccacggcggtgtcggcgtcaaagaccccggcggcgtggagggcagaatactcgcccagagacagtccggcggcagcggcggggacgatgtcccgctccgccagcagcgcggtcatgcctgcggcgaaggccaccatgcagggctgggtgtagcgagtctgattcagaatgcccttcgtgtcggtgaaggagatttccttcaaatcgaaatccacctgctccgcggcgctgtccagcacggcgcggaaggtggggaacgccttgtacaggtcggcccccatgccggggtgctggctgccctgtcccgcgtataaaaatcctaacttcattgtgcagctctccattcgtccatgatctgagccatctgctccggcacggtggagagggcgttcacctcgccgccggcggctccgcagaaaaacaggccgttctcccaatcgccgttccgggcggcgatgagggccttggaaatgcagtagggggcgtttttgccgtcacaggtgacgatgcacttcacacaccgctccggaggcggctgagtgccgtcctccacccgccggatcagggggctgcggagggcccgtcccggcatccccacggggcttttcaccagggtgatgtcgtcagcctttgccgctaagagccgctgcttgtagccctcggaggcgtcgcactcctccgtggcgatgaaccgggtggcgaactgcgccccggcggcgccctccttcatgtagcgggccatgtctgcgccgtttttcacgccgccggccacgaaaaccggaatgtcccggcccgccttgtcccggaagggggcgatggcggtcagaacctcccgcaaaaggtcggaaagggaggggggcgcgtccagatcctgtcgggagaagcccagatgccccccggcctccggcccctccaagatcaaaaagtcggggatgcggccatagtgccggtcccacagcttgcacagcagccccgccgcccgtccgctgctgacgatgggggcaatggcggcgtcgctgtcggaaacttcggaggccagcgcggggagatccttgggaagtcccgcaccgcagacgatggcgtcagcccctgcccggagagcggtgcggacgctgtcggcatactgggtggtggcgaccatggcgttgacggcgatgagccccgcgccgtgggccaaaaccttggcatggcggacctgccggtccagcgcccggaggttggcttcaaagggacgtttggcgaaatccggctcctgaaagccgcagacggcggtggagagggtccccatgccgccgcaggcggctaccgccccggcaaggccgtccagactgatgccaacgcccatgcccccctgtaaaatcgggagggggagggcctttccccggatcgttactgccatgctgcctccgtggccttcaaaacggcctgactgccggtgtacagctcctcgaagatctgacgcaggggcttgatctcgtggagcataccggccacctgaccggccatgacgctgccccgctccatgtcgccctcaaacacagcgcggcggagaccgcctaaggtgacgtgttccaattcctccagcgtggctccacgcttttccagagcgagatactcccgcgccattttgtttttcagcacccgcaccggtccgccgatggagcggcccgtgacagtggtgtcgctgtccttggccttcagaagggccagcttgtagttttcgtggatggggcactcaaggcttgtcagcaggcaggtgcccacctgaatgccacaggcccccagagcgaaggccgctgctgcctgccgtccgtcggcaatgccgccggcggcgatgacgggaacatccaccgtgtcgatgacctggggtaccagcgccatggtggtcatttcccccacatggccgccggactccatgccctcggcgatgatggcgtcggctccctgatttaccagccgcttggcaaggatggaggccgccaccacgggcagcaccttgatcccggcctctttccacgcggggatgtacttgccgggactgcccgccccggtggtcaccacctgaacgccctcctcaataatgatctgggccatttcgtcggcgcaggggttcatcagcatcagattgaccccgaagggcttgtccgtcaggctcttgcagatgcggatctgcttgcgcagcaggtccgcctccagcatcccgccggtggcgatgacgcccaaggcccccacgttagagcaggcggcggcaaattcgcctgtggcgatgttggccatgccgccctggataatggggaattccgtccccagcagctcgttgagttttttcatagtgtactcctcaatttcacgccatttccagcaccgcgccgccccaggtcaggccgccgccgaaggccgtcagcagcaggcggctgccgggacccacgcggccctgctccaccagctcactgaggaccagcgggacgctggcagcggcggtgttgccgtaacggtcgatgtttttgtagtatttttccggcgggatgcggtatttccgcacggctaaatcaatgatgcgggcgttggcctgatggaacacgaagaagtcgatgtccgccggggtcagccccgcctttttcagcgtggcgtccatacaggcgggaacggtctccacggcgaatttgaacacctgcgtcccctccatggacaggacgtttggctctccccggccaaggcccggcagacgcaggagaacgtcgtccccccggctgcccagcacggccccgatggagggccagccctcccggcactccaccacggcggcggccgcgccgtctccaaagaggatgcaggtgccccgatccgtccagtccaccacgcggctgagggcttccgccccaatcaccagaccgaatttccggggggaggcgttcagcaggcactccgccgtgtggagagcgtagacaaagccggtgcaggcggcgttcaggtcaaaacagggggtatcctccggcagacccagcgcccgttgcagcagacaggcggcagagggcaccacagtgtctgccgagacggtggccacgatgcacacgccgatgtccgccggggtgatcccggccatgtgcagggcgtcccgcgcggcgctgacgcacagctccgtgagggtctctttttcacagcggtagcggctgcggatgcctgtgcgggcggtgatccactcgtcattggtatccaccagccgggaaagatcgtcattggtgacggtattggcggggacacagcggcctgtgccccggagcttgatcccgttcatgcgtcctccttcccgcggccaagggcgcggaatttctgatagcgccgttccgtcaggctgacggcgctttccttcagcaggggttccagacaggcggtcagcgcccggtccagattccacagcgtccggctggggtcggtctgcgcgccgccctccggctcccggacgatgccatcaatgacccccagctttttcagctccggggcggtgagcttcatcagctccgccgcctcgccggaacgctgggcgtccttccacaggattgaggcgaagccctccggggacaaaatggcgtacacggcattttccagcatcagcacccggtcggccacagccagcgccagcgcgccgccgctgttgccctccccggtgacgacggcgatgaccggcaccgtcagacggctcatctcaaagagattccgggcgatggcctcgccctgaccgtgttcctcagcctccagaccgggataggctccggcggtgtcgataaaggtaaaaatagggcggcggaacttctccgcctgcttcatgagccgcagcgccttgcggtagccctccggccccggcatcccgaagttgcaccggaggttttcctccagcgttttgcctttccgggtgccgatgacggtgacgggccgcccgtggaacagggcgatgccgcctaaaatggcggggtcctcccggcaggcccggtctccccgctgctcaaagaaatcggtgaacagtccgtcgatatagtccgtgatattgggccgctggggatggcgggccagcgccacccgctctgcggcggttttctcagccatgacgttctcctttcccatggagcttcagcagacggatgagggtgtcccgcagatccttccgggggacgaccgcgtccacaaagccgtgttccatctgaaactccgcccgctgaaagccctccggcagggtctcaccgatggtctgctgaatgacacggggtccggcgaaaccgatgagggcccccggctccgctaaaataatgtcccctaacgaggcaaagctggcggtgacgccgccggtggtggggtccgtgagaacggagatgtacagcagtcccttttccgaaaaccgggccagagccgcgctggttttcgccatctgcatgagagacaaaatgccctcctgcatccgtgcgccgccgctggcggcaaaaaggatcaggggcagcttgtttttcccggcgtgctcaatggccagcgtcagcttttctcctacggcggcactcatgctgcccatgaggaagcggctgtccagcacgccgactacacagcggttcccgcccacggtgccggtggcggtgaccaccgcctcgttcatgccggttttccggcgggcgccgtccagcttggccccgtagccggggaagcggaggggatcaccggctgtcagcttttcgtggagttcccggaaagagccggggtccagtacgctgctgagccggtaataggcccccatggggaagtggtagccgcacagggggcagacggacagcgccgccgccacgtccttccgctggctctccccgccgcaatgggggcaggtgactaacttttcaccggggacgtaattctcccgcatggctttcatggccagcagccgcgcccggcgtttcgcaaaaatgttttccatgtattatcctttgtgatcgtctacccggcggctgaattccagcagctccggcaggcttcggtccagaaaggcggtggtgcagccgccccggacaaaggtggggtggaacagcagctcataggacagctccgcgttggtggggaagccctccagagtaaattcctccagacagcggcgcatcctgcggatggcttccagccgggtgggggcgtggaccatcaccttggcggccagagaatcgtaatagggggagagggtgcagccgttatagagggcggagtccacccggacgccggggccgccggggaagtggagaaattccaccttgccggggcagggccggaaattggccgtggggtcctcggcgttgatgcggcactcaatggcgtggccggtgagggtcacgtcctcctgagtcagatcaaggggcagaccggaggcgatgcgcagctgctggcgcaccagatccacgccggtgatcatctccgtgatgccgtgctccacctggatccgggtgttcatctccataaagtagaaatgctgcccgtcgctgtccagcagaaattccacggtgcccgcgccctcatagcggacggcctgcgccgctttcacggcggcccggcccatctcctcccgcagttccggcgtcaggcaccgggcgggggcctcctcaatgagcttctggttccggcgctggatggagcagtcccggtctcccagatggatgacgtggccctgccggtccgc

SEQ ID NO: 12255 - DNA, 37865 bp, Unknown
  gut microbiota DNA sequence
ctgatccagagccacaggatcaaaggaggcgaacatacccacattgggcacgatgggcacatcgttttcgccgtgacagtcacagttgggagacacatccatcaccagagacacatggaagcagggacggccatccaccaccgccttggtgtactcggcgatcttgtaattcaggatggagggggcctcgtcatacatgcactggatggcgtccttggggcagaccgccagacaccgggcgcagcccacgcatttgtcagtgtcgatggtggccttgttgtcaggaccgaaggtaggcgcgccgtgggcgcagatcttggcgcaggcgtggcagcctacgcacagcttctgcttgacgaagggtttgccggagttgtgctgctccatcttacccgcacgggagccgcagcccatgccgatgtttttcaggcagccgccgaagcccgcctgctcgtggcctttgaaatgggtcagggagatgaacacatcggcgtccatcaccgcccggccgatcttggcctccttcacatactcgccgccctccacggggacggccacctcgtcattgcccttcagaccgtcggcaataatgatatggcagccggtggaatagggggtaaaaccgttgacataggcagattccatgtgatccagcgcgtttttgcggccgccgatatacagggtgttgcagtccgtcaggaagggcttgccgccctgactttttaccagatccgccacggttttggcccagttggggcggagataggccatgttgcccggctcgccgaaatgcattttgatggccacatatttgccgtccatgtcgatgtcgccgaaaccggcagtcatcatcagccgggccaacttctggggcaggttttcccgccaactggggcagcggaaatctgcgaaataaactttagatgccatagtgcattctccttatcagagcttttgagaactttcctgagatgattataaaacctgaagttaactttatgtcaaggacaaaaaaggaattcgatctctttttactatccttcgtccagatccacagtcacccggtcagtgccgtgctcatcgaattcagagagataggcgtcgatccgcgccatgagtgcgtcgtaattctcccgggtcaggggctgaccgtccagatcccgcagggccagctcctccgccagcagctcgtagaagatcgtatcctcatactgctcgatggcctcgtggatgccgccgtcggcaaaggcgcgggaggggataagactgccccggtaccgctccaccagcttgggcatcccctgagggacgcagtgggagaagaccttgccctccacctgatcgtattcctcgatacggtcatcacctcgggtggaattcagcacccagtttcctatgtataccagatccagcagataccggaattcctgatctgttaattcgagcttcataaggagccacctcccatatccctttgatggagggtattatagcagaacccatctgaaaatgctacctgaaaaagcgggcaaaaagccaaaaatctgtctccagaaccgaaaaaaccgccgtccggcaaatttcaactgcgaaaaacggcgcttttgcccttgcacagcggaagaggctattgtataatatactttctgaacgaacaccctggaaaaaaggaggcgagcggtatggataaccgtcctatcggggtatttgattccgggttgggcggactgacagcggtgaaggccctgcggcgtctgctgccgggagaggatctcatctattttggagatactgcccgggtgccatacggcggacgttcccgggagacccttttgaaatatgcccgtcaggacatcgcctttctccggtcctttgacctgaaggcggttctgatcgcctgcggcacagtgacctccacctctctggatactttgcggaaggaaaatgatctgcctgtgttgggcgtggtggagccctcttgccgggaggcgctggctgtcacaaaaaataaaaagatcggcatgatcgccacattggcctccgctcgctccggagcttacgaacgaactctgaagggtctggacgccgatgtgcaggtggtcagccagccctgcccgctgtttgtcccgctggtggagaacggccggtttcggcagggggatgtagtcatcgagacggtggcccgggaatacctgacgccgctgatagaagccggcgtggatacactgattctgggctgcactcattaccccttgctgaaagacatcatcggggagatctgcggccccggcgtcaccctgatcgactccggcgcggcctcggcccgggcactgcggcagcagcttgcagcagagggccagcttacggaccggcagcagggcgaaacccgcttttatgtcagcgaccggccggaggattttgagaagctggcggcggtatttttggaagaacccctgagccggggggcggagaggatcgacattgaacagtattgaacaagaaaagctcccggtgatgatctccgtccggggagaacagtattttgatgatgtggaccccaacgccacggagctgatgacggaggggacactggaacagacggaggacggcttccttctgagctatcaggagacagagcttaccggcatggaggggaccctcaccacctttgaaatcggccccggccgggtgatcctgcggcgcagcggcagcgtcaactcgcagatggtgtttgaagaggggcggcagcacacctccctgtatgaaacgccgtacggtgaactgtccgtggatattcagaccagccgcctgcttcataacctgacggagcggggcggactcatggagatcaagtattccattgcggtagaacacgtggtcacgggtcggaactgcttcaagatccgggtccggcgaaaataaatgacaaatttaaccgaagaaagggtttaacgatatgacgaatatgatccaaaacgcgaaggaccaggctgcggcgctggcaatggcagcctacaaggcggctgctgcggacggcactctgccggaggcagaggtcaagaccgcccccgtagagatccccaaggataccgccaacggcgactataccaccacctttgctctggctgccgccaaggcactgggcaaaccgccccgcgtgatcgctcaggcgctgttggatcacatggatctcaccggcacctactttacctctgcggagatcgctggccccggctttctgaacttccgtctgggagaccagtggtatgccggcgtcatgaacgccgtggaaacggagaaggacgtctacggcaccaatgacagtctcaaggatcagaagatcatggtggagttcgtctccgccaaccccaccggacccatgcacatgggcaacgcccggggcggcgtgctgggtgatactctggcctccgtcctcgccgcctgcggcgcggatgtgtccagagagttctacgtcaatgacgccggacaccagatcgacaagtttgcccgttccatcgaggttcgctacctccagcttatcaatggcgaggattccatcgccttcccggaggatggctatcagggcgaggacatcaaggaactggccaaggcctattatgacgagcacggcgacagcctgctgaatgcctccgagcaggagcggcaggacgcgctggcgcagttcggcctttctgtgaacctgccccgcatgaagacggatctggagcgctataagatccattacgatacctggttttacgagtctaccctccacgagagcggctatgtagccgagactgtggacctgctgacggaaaagggctggacctacgaaaaggacggcgctctgtggctgaagacggccgatattctgcgggatcacttccgcaagcagggcaaaaaggaagcggacattgaaaagctggatctgaaggatgacgtgctccgccgggccaacggcttctacacctacttcgccgcggacatcgcctatcaccgcaacaagttcgccgtccgcggcttcgacaaggtcatcaacatctggggcgccgaccatcacggccatgtggcccgcctgaagggcgcactggacgcgctgggcctcaatggctctgagcggctggatatcgtgctcatgcagctggtgaagctgctgcgggacggcgaggtggtccggatgtccaagcgtaccggcaaggccatctccctccacgatctgctagacgaggtcagcgtggacgctgcccgctggtattttaacgccaagcccgacacgcagatggaattcgacctgggtttggccgtccgggaggacagcgagaaccccatctattatgtagagtatgcccacgcccggatctgctccctgctgcgggccttggagactgacggcgtgaccgtgccggagaccgccgacctgagcctgctgtccggcgaagcagaaaaggccctcatcaagcagatcgctcagtactgcgaggagatcaagctggcggcacgggattatgaccccagccacatcaaccgctgcctgcaggagctggcggcctgcttccaccggttctataccgcctgccgcatccggggcgaggagcctcaggtagctgccgcccgtctcaagctggcggacgatacccgcatggtgctgaagaacggcctgaagctcatcggcgtggatgccccagagaagatgtaaggaccttcgaagttacccaagcgtctttgagaaaatgcgcagacagccgctgatgaggctgtgtatcagatgacttagggcgaaagcgcagccttatcatagtgcataaaaaaagagccttgcggctctttttttatatcctgaaacggaattgacagaggaaccttccggcggtatactctgcgtataaaattgcttgcgaaatgggtagtgcatatggaagaacatgaaaccatcgtgaaaaatcgaagcgccgctctgcgggccgcttttcccgccaccgtcccggtgatgacggggtatctctgcctgggcgcggccttcggcatcctgctgcggaccgccggatatgggatcggctggtctatcgccatgagcatgatctgctactgcggcagtatgcagtttgtgggcgtctcactgctgacggcggccttcgacccctttcaggcgctgctgatgtccgtgatggtcaatgcccgccacgctttttatggcctgtccatgctggaaaagtatcggggcaccggcccggttcgccctgttttgatctgtaccctgacggacgagaccttttctctggtatccacactggagccgccggagggcgtagctcggagggacttctacttctggatctcactgctggactacctttactggcaggtgggctgcacgctggggaacgctgtgggcgggctgcttacctttgacacaaccggtttggattttacgctgacggcgctgttcatcgtgctgctgctggaacaggtgaagaaaaaggaaaaccgggccgccgggatcatcggcatggtctgcaccgcagcaagtctggcggtgtttggcccggataatttcctgatccccgccatgatcttgctgctggccgttttactgggagggaggaaaagactgtgcaaatgacaaacgttcaggccctcatcaccattctggccatcgctgtggggacgcagtttacccgctggctacctttctggctcttcccggagaagaaggacccgccggcggtggtgctgtatctgggcaaggtgctgcctcccgccatgatgggcctgctgacggtgtactgcttcaaaaatgtctcctggctctccgggacccatggcgcaccggagctgctggcctctgccgccgtggtggggctgcatctgtggaaacggaacgtgctgttctctatcgccgggggcacggcgctgtacatggttctggtgcaggccgttttcgcataaaataaaataaatcgcataaaatggaagcacagccaaatgctgtgcttttatttttcgggcgggaggtcattatggggagacggtggcggttctggcccctgacgggctttcttacggcggcggtgctgggtaccttggcccacttcgcgtacaggtggagcggcggggcgctgttggcgggggtgttctgcgctgtgaatgaatccgtatgggagcacatgaagctgctgtttttcccggtgttcctctttacggcggcgcagttctgcttgggagagcgggacggcctgctggcggcccgggcggtcagcattacggcgggactggccctgatccctacattgtattatacctacaccggcgtctggggagagcacgtgctctgggcagacgtagctatcttttatttgtcggcggcggtgacattttggctggacggcctgctccgccgccagcggcggctctggaagatgggatgccaggtggcgggactggtgtggctgtgggtgctggcgttcctgtttgtctggtggaccttttcaccgccccacatcgccctgttccgggaccctctgacgggactttgcgggataccgtagaaaagcggcgctgtccttttgggacagcgccgtctctgttatttcttgtagaagtggaaatcgcagcaatccccgccggtccccaatgtctgagtgcgatggaaaccgactcttttcagatcaccgaaggcgtaattgtcacattcgcagaaaaaacggcaggcttccggacagccgcatgatacgcaggtatcatgccagagacactggtggatggtcaggtcaaattcctccggctgttcctcaaaggtgctgacccaggcatcactggaggaggttgttttccggaaggcccagcgaaacaccgagaaaaaccgggggatccattccagaccggcgtaccggtcatgggaggcgggaccctgtacctcccgcacatatttttccatgagcttttcagcatccagcccccggcgcttcaatacagtgtagactgcgacccgcggcaggatcgtgctttgcataagggtgcgccgggagggggaggtctcctgagagctggctaaaaacgatgcggcttgttcccggctttccgccatgaccgccgttccctctttttcccccaggacccggagaaagaaacggtccagcatttcccacatggctttttctttcttttgtacggacataggacctcctttattcaccggcaggccgatcatcgaactgagcggcccgggagcggatgtattgttccagaatatccacggtgccggggatgtccagccgggcgctgttgatcaccagatcgtaacatttggcatcgccccagtcacctttgcagtgctggtcatggtagatccgccgctgccggtcctgatgcttgatgaagtccaaggcttcctcctccggcagaggggtgcgcttgacccgaaaatccagatccgcccggacgaagatggatatcagcccttcccggtccgccagcacctcttcagcgcagcggcccagtaccacgaaggattctccggcgttagcgtgctggcgcagcagctcaaactgcatctgggccacgcagtcctccggggcgctgctgatgccccggacggagcggcagaacaggggggagtaaggacgctcatcgtagcgctccagcgtttcggcgctgacgcccttgtcctctgcggctttttgcagaatgctcttgtcgagcaggggaagctgaagccgctccgccagcgcatgggcgatatccagtccgccgctgccggattcccggccgatggctacgatcagttgatgggacataggaaggacctccttacaaaatggtgggcagcagcaccagcgcggcgtacagcaccggctgatgcagcagatagagcagcagagagtgacggcttataacggacagccccggcaggcgaatatccggcagggcggggatctccggccgcaatcggtagagatagaacccggtccagaacagaaagagccacggcagcagggcgaaataggctgaggacgcaaaggcgggggcgggaaaacccagaccggcggtggcgagatttgtgtaccagccacggggcagccgcagcagcggcacccaagcaaagccgagatagccgtggttcacatcccgtgccagcaggaacagggaaaagctgagaacaagccccagccggggcggaatccgggtcaacagagaacggagaggggcagtcagcagggcggcagtccctaaaaaagtcagcacgccgaaccggatcggctcctccggcgttaccagagttgttgccagagacacggcggcaccaccgaaaaagctgatcgctccccggcggatagggtggcggctggcctgacagcaatacccggagagcagaatgaaggtacagcagatgctctgctgccagatatacgcccaaaagccgttataccaggcccacggcaggccccggagatacaccagatcccagcagaggtgataggcgatcatgctgaacagggtcagtccacgaagggaatccaaggtgccgctgcgggagcggatcgcgtttgcgttcatagcacatccatccttgcggaagaagtttcttcctcaaaaataccacaattcgacagatttttcaagatttaccggtcctgcaaaacggcgatactgcccaaagccaggcctagctggacaccggcccggaaaaagaagtgcttgtggcggcagttgatgagaccgtggaggtccgccagccccaaaagctcttttcgcaaaggctgatcgtcggtaaagcggtccatcagggcatgaaaccggcgggcgtagtcctgactgtccggctgaaactgatccagccgccgctgctccttctccaccagatccaccagcagttgaatggtatcgtcctgtaaattcataaaaacaccccttcttttaattacatcattatacatcatgatatgcaaaatgcaagcacttgttttaaatattgcatcatgtgtatactatatagcataaggtggtgtatctatgccagaagttgttttggtaaaccgaacacggtttacttcctcattgaaaaatgaattgctggatcagtttgaccagctggcaaaggagacgcgaattcctaaatcccgcctatttgacgaggccatcgaggaccttttgaagaaatacgcggcaaaggacctctgacgatgggggaaaccgggcaatttcgcctgttttccccgtttttcccttgcgcgagcaggggagatgtgttagagtagctaagtctgtgtatatgaattcaggaggaatatcatgccaacattagaagaagaaatttcccggcggcggacattcgctatcatttctcacccggacgccggtaagaccacattgacggaaaagtttctgctctacggcggcgccatcgcgcaggccggcgaggtcaagggcaagcgggccaaggctgccacctctgactggatggagatcgaaaagcagcgcggcatttccgtcaccagctccgtgatgcagttccaacacaacggcttctgcatcaatattctggatacccccggccatcaggacttctccgaggacacctaccggaccctgatggctgctgacagcgccgtcatggtcatcgacggcgctaagggcgtggagcctcagacccggaagctgttcaaggtctgcgccctgcggcacatccccattttcaccttcatcaacaagatggaccgtgagacccgtgaccccttggagctgtgcgaggaggtagagcgggagctggggatcgacacctatgctatgaactggcccatcggctgcggcaaggagttcgccggcgtctatgaccgggaaaagcagcggatcctgttcttctccggcgagaccaagggcaagaaggtcaactccatggaggtagccttggaggaccccacactggacgagacactgggcgcggaaaaggccgccaagctgcgggacgaggtggagctgctgggagccggacgggactttgatatgcaggccgtccggaacggcaccctatctcccgtgttcttcggttctgctctgaccaccttcggcgtggagccgtttttggaggaattcctgcggatgaccaccgctccgctgccccgcgtcagcgatcagggcgaggtggatgtgttctccccggacttctctgcctttgtgttcaagattcaggccaacatgaataaggcccaccgggaccggctggccttcatgcggatctgctccggcaagtttgagcgggacacggaatattaccatgtccagagcggcaaaaagctgcgtctcagccagccccagaccatgatggccgcggagcgcgagatcgtggaggaggcctacgccggcgacatcatcggcgtgttcgaccccggcctgttcgccatcggcgataccatcaccgtgccggggaagaagttccggtattccggtatccccacgtttgagccagagcactttatgcgggtctctcccaaggacaccatgaaacgaaagcagttcatcaagggtacggagcagatcgcccaggagggcgccatccagatcttcaagatccccggcgcgggtctggaggaggtcatcgtaggcgtggtgggcaccctgcaattcgacgtgtttgagtaccgtatgaaaaacgagtacaacgtggatctgcggatgagcagcctgccctatgaccatctgcggctcatcgagtccatggactgccatcccgacgagatcgtgctgtgcaccggcgccgccgtgctgcaggacttccgggatcgctacctgctggcctttgacggcgagtggagcgtgggcttcctcaccaagcacaatcccggtctggttctggcggacaccctgtctgtataataaaatcaaggaggtaggaccatgctgaccatccggcgcttccaaaaaggcgatgaggagatcctctccattatgatccgccgcactctgcgggaggtcaattacaccagccccaaatccgaactggattacctgatcccccactattctccggagaccatggttgagctgtctgagaccggccatacctatgtattggaagaggacggacagatcatcggctccggcacggtcctgccggatggcgagacagaggcggagatcgtggcggccttcctgagcccggagagcatcggcaagggctatggccggaagctgtttgaaacactggaggccgacgagctggcagcgaaggccacgcgggtctggctgacctcctcggatatggcgctgggcttttacgagcacatgggctgggtgaatcccaacggcccccgtgcccgggcgggagaggacaacctgctctatatggaaaaacggaaataaacaaaacggaccgattttccggtccgttttttccttgacaaaaccgctggcaagcagtatgttaaggctaacagggaaccgtccctgactttgaaaggagaaaatgccaatgggttgtttctattgcgatgagcaccacgagggccgggaggccattatgttcaaggttggggagatgaaggccggtgtgctgtatctcttcaaggatcaggcccacaagggccgctgcgcgctggctctgaaggcccacaaaaaggaactgtgcgagtgcacggatcaggagcgggcggattttgccgaggatctggctaaggccagcggcgccatcaaggagctgtggggctgcacgaagctgaacttgggctccttcggcgacacgaatccccatctgcatttccatatcgtccccaagtatgagggcggctttgagttcggcggggcttttgccatcaccaacccggagccggtatacctgacggatggagagtaccaggagatgatctccgcactgaaggccaagctgggtatctgaggacatatataataaggaacaccggggtgcatagcatcccggtgttctttgtgccggatcgatacaccatataatatgcggaggcggcctgatcgggaatgagataccggagcgggaaatggcccggagggggacatttgccccgctgccgtgtgcatccgcgtactgccaaaaaaatttcaaaaaaactatgaaaaacagagaaaaaggtcttgacattccgctgaatatccgatatgataatcaagtccgcgtggtggaagcctttctgcgcgcagacactgcgatgaaccgggagattgctccgcaaggaggtaacttccggggagtatgtccgataatcgggcggctgagaagtcctgtatgcggcgtagatcgccataccatgggacaagtaccggccacagtgccggtctttttcatgagtaggaatgatacgcacggttaagcgtacagaaaatttctcgccgtaggtcgtcgagacccgtacaacaacctacgaaacatttggaggaaatcaacatggcacagaaagaaatgatccgcattcgcctgaaggcttacgatcatcaggtcatcgaccagagcgctgagaagatcgtagagaccgccaagcgcaccggcgcccaggtgtccggccccatccccctgcccaccaagaaggaggttgttaccatcctccgcgctgttcataagtataaggacagccgtgagcagttcgagcgccgcacccacaagcgcctgatcgacatcaccaactccagccccaagaccgttgaggccctgatggctctggagctgcccgctggcgtggagatcgagatcaagctgtaatcctcgcgattacaaaacttcccaagctcaaagaagtgtaaacacttttttgaatatgttgctcacccaatcgcctgtcaacttgcgtgagacaggcagggtcatgtcggcagagcaatgcggattccgtatctaagccgaccaataacctaacaggaggaaatacacatgaaggcaatcatcggcaaaaaagtgggcatgtcccagatttttgacgagaacggccacgtgatccccgtcaccgtcattgaggcgggaccctgcacggtcgttcagaagaagacttccgagaaggaaggctacaatgcggttcagctgggctacgaggacgtggccgagaagaagctgaccaagggcgagatgggccacctgaacaaggctggcgtgtctcccaagaagcacctgcgcgaattcgacctggacaacgctgccgagctgaacatcggcgacattgtgaaggctgacaccttccaggctggcgacttcgttgatatcaccggtatcagcaagggccacggttatcagggcgtcattaagcgctggggcgcacagcgcacccccaccagccacggcggcggccccgtccatcgtcacgctggttccatgggctcctctaccgatccctcccgtatcttcaagggcaagatcggcgccggccacatgggcgtggatcaggtgactgtccagaacctgtccgttgtgaaggttgaccccgagctgaacatgctggtcgtctgcggcgccgttcccggccccaagggcggtctggtgaccatcaagagcaccgttaaggtccacaaggtcaagcaggccggcgctgacatcagcaagaacccgcagaaggcttccggccgcaacccgcagaaggcttccgcgagaaacaagtaagaaaggggtgcttaaagaatgtcttccatgaaagttttgaacatggccggcgcagaagtcggtactgtggaactcaacgacgagatctttggcatcacgcccaatcccgtcgctgtgcatgaggttgtgaagaaccacctcgccaattgcagacagggcactcagagcgccctcacccgtgctgaggtttccggcggtggccgtaagccctggcgccagaagggtaccggccacgcccgtcagggctctacccgtgctcctcagtggactcacggcggtatcgtgttcgctcccaagccccgcgattacagctatgtgctgaacaagaaggtcaagcgcctggcgctgaagtccgtcctgtccgccaaggctgccgagggcaagctggtggtcatcgactccatcaagatggacgccatcaagaccgctgacttccgtaagttcctgagcgctgtcaaggtggacggcaaggccgtcgttgtcacccccgaggtggacaacgtcatcgtcaagagcgcccgcaatatccccggcgtgctgactaccgtcgccaacatcctgagcgtctatgacatcatcaacgcccagtatctggtggtggatcaggccgccctcgccaagatcgaggaggtgtacgcatgatgaccgcttacgatatcgtcattcgccccattatcaccgagcgtgccatggctggtgccgctgacaagaagtatgtcttcgaagtggccaagtccgccggcaaggtggagatcaagaaggctgttgaggagatcttcggcgtgaaggtcgcttccgtcaacaccctgaacgtcccggctaaggccaagcgcatgggcgccggccgtcccggcaccacccgtgcctggaagaaggcttacgtgaccctgaccgctgattctaagaccatcgagttcttcgaaggcatggtctaaggaaggagtaaagcagaatgtctattaaaacttttaagccgacgactccttcccgccgtcagatgacggtttccggtttcgacggcatcgacaagaaggcccgtcccgagcccagcctcaccgagcctctgaagaagagctccggccgcaacagctatggccgcatcaccgtccgtcatcgcggcggcggcaacaagcgcaagtatcgtatcatcgacttcaagcgcgacaagatgggttccgccaccgtgctgcgtctggagtatgaccccaaccgcagcgccaatatcgctctcatcgagtatgaggatggcgagaagcgctacatcctggctcctgtcggcctgaaggctggtcacaagatcatgaccggtcccgacgccgatatcctgcccggcaacgctctgcccatcgccaacatccccgttggtaccgtgatccacaacatcgagctgcatcccggcaacggcgctcagctggtgcgtgccgccggtacctccgctcagctgatggctaaggaaggcgatgacgctcagatccgtatgccctccggcgaggtccgcatcgtgcgtaccaactgctatgccaccattggccaggtcggcaacatcgagcacgagaacatcaacattggtaaggctggccgtaagcgtcacatgggttggcgtcccactgtccgcggttccgtcatgaaccccaatgaccacccccacggcggcggcgagggccgtgcccctgtcggccgttccgggcctgtgacgccttggggcaagcccgccctgggctacaagacccgcaagggcaagaaccccaccagcaagttcatcgtcaagcggcgtaacgagaagtaaggaggcaaggtaatatgagcagatctattaagaaaggcccttatgttgcccctgagctcctcaagagagtcgaggcaatgaacgagaagaacgagaagaaggtcctcaagacctggagccgcagctccaccatcttccccgctttcgttggccacaccatcgctgtccatgacggccggaagcatgtgcccgtgtatatccaggaggatatggtcggtcacaagctgggtgagtttgctcccacccgtaccttccgtggccacaccaaggataaataattgaaggaggatgctgaacatggaaaacaaaactgctaaagcgtatctgcgctatgtccgcatctctccccgcaagatccagatcgtctgcgatctgatccgcggcaaggatgccggaaccgctatggccattctggcacagacccccaaggctgcttccgagcccctgacgaagctgctgaagtccgccgtggccaatgccgagaacaacttcggcatggaccccgccaagctggtggtgtctgaggtgttcgccacccccggccccatcctcaagcgtatgatgccccgggctcagggccgcgcttaccgcattaacaagcgcacttctcacgtcaccctggctgtgacggaaaaggcataagaaagggaggagacagtttatgggacagaaagttaatccccatggcctgcgggtcggcgtcatcaaagactgggattcccgttggtatgccagtgaagagaaggtcggcgacctgatcgtcgaggatcagaagatccgcaagtatctcaagaagactctgtacggtgccggcgttcccaagatcgagatcgagcgcagcaacgacatcgttaccatctatctgcactgcgcccgtcccggtgttgtcatcggcaagggcggcgagcagatcgagcagtatcgtctggctgtggaaaagatgatcggcaagaaggtcaagctgaacatcgtggaagtccgcaaccccgatatgaacgctcagctggtggctgagaacatcgcccagcagctggagaagcgtatctctcaccgccgcgccatgaagaactccatggcccgcgccatgcgcgccggcgccaagggcatcaaggtttgctgctctggccgtctgggtggccgcgagatcgctggcgttgagcactatcacgagggcaccatccccctgcagaccatccgagccgacattgagtacggcttcgcggaggctgccacgaccttcggccgcatcggtgtgaaggtgtggatctacaagggcgaggtcctctctcagaccctgcgcaccactccccgcaccatggacacctccaagccctatcaggagcgtcgtgagcgtcgtcctcgccgtgacggtgatcgtcgcggtggtttcggcggtgaccgtcgcaacggcggcttcaaccgtgatcgtcagggcggcttcaaccgtcagggcggtgccgagcgtcgtccgcagggcggcttccggcccaacaccaatcgtcccgctgctcccgcagcccccgctaaggaaggaggagccaactaatgttaatgcctaagagagtcaagttccgccgtatgcagcggggccgcatgactggtaaagccacccgtggcaacaccgtttcttacggtgagtatggtctgatggctctggaacccggctgggtcaagagcaaccagatcgaggccgcccgtatcgccatgactcgttacaccaagcgtggcggtcaggtttggatcaagatcttccccgacaagtccgtgactatgcgtgccgccgactcccgaatgggttccggtaaaggtacgcctgagtactgggttgccgtggtgaagccccagcgtgttatgtttgagatcgctggtgtccccgaggagatcgctcgcgaggctctgcgtctggccagccacaagctgcccatcaagacgaagatcgttgcccgcaccgaggaagcaggtgagtaagatgaaggcaaatgaaatccgtaagatgaatgccgaacagctcaatgagaagctgaccggcctgaagaaggacctgttcatgctccggatgcagcacgcaaccaaccagctggacaatcccgttaagatccgtgaagtgaagcacgatattgcccgagtcaagaccgtgctggcggagctcgccgcttccgataagcagtaagaaggagggaaacgagaatgaacgaagttagaacttcctcccgtaagacccgggtaggcaaagtcgtttccgacaagatggataagaccgtggttgtggctgtgtccgaccgcgtcgcccatcctctgtacaagaagatcgtcggccgtacctacaagctgaaggcccacgatgaaaacaatgcctgcggtatcggtgataccgtgaaggtgatggagacccgccccctgtccaaggacaaacgttggcgcgtggtcgagatcatcgagaaggccaagtaaggaggtgccagtatgattcagcaggaaagttatctgaaggttgccgataataccggcgccaaggaaatcaagtgcatccgcgtcctgggcggttccacccggaagttcggcaacatcggcgacgtcatcgtggcgtctgtccgtaaggcccagcccggcggcaccgtcaagaagggcgaggtggtcaaggctgtcatcgttcgcagcgccaagggtgtccgccggaatgacggtacctatgtccgcttcgatgacaatgccgccgtcctcattaaggacgacaagaaccccagaggtacccgtatctttgggcctgtggctcgtgagctgcgcgacaaggattacatgaagatcctgtccctggctcccgaagtgatttgatggagggctcgaacaatggctatgaacattaagaagggcgataccatcgtcgtcctgtccggcaaggacaagggcaagcagggcaaggtgctgggcactgtgcccaagagcaccaagatcgtggctgagggcatcaacatggtgacctgccacgtcaagccccgccgtcagggcgaggagggcggcatcgtcaagcgcgaggctgccatcgccgcctgcaaggtgcaggttgtctgccccaagtgcaacaagggtacccgcgttgctcacaagatcgagggcgacaagaagatccgcgtgtgcaagcactgcggtgcggaactgtaagaaaggagcgagataacaaatggcaagattgaaagaacagtataaagccgaagttgctcccgctctgatgaagcagttcggttacaagtccgtcatgcagatccccaagatcgacaaggtcgttatcaacgtgggctgcggcgaggctcgtgaaaacgcgaaggtgctggacaatgttgtgggcgatctgggtaagatcaccggccagaaggctgttgtcacccgtgctcgcaagtccattgcaaacttcaagctccgtgaggagatgcccatcggcgccaaggtcaccctccgcggcgacaagatgtgggaattcctggatcgtctgttcaacgtggctctgccccgtgtccgtgacttccagggcatcaaccccaacgctttcgatggccgcggcaactatgccatgggcatcaaggagcagctgatcttccccgagatcgagtacgataagatcgacaagatccgcggcatggacatcatcattgtcaccaccgctaagaccgatgaagaaggccgcgccctgctgcagcaggttggcgctcccttcgcccgctaaggaggaagacagtaatggcaaagacttctatgaagatcaagcaggcccgtcctgccaagttctccacccgcaagtacaaccgctgcaagctgtgcggccgtccccacgcctatctccggaactacggtgtctgccgtatctgcttccgtgagctggcttacaagggcgagatccccggcgtgcgtaaggcttctttctaaaaaaattgaaaatggcgcagcaaaaagacttgacgaattaaaatttgtctggtatgctgaaaaatggggcatttctgaggaaatgcacccattacgccatgttcagaagtgtttttggagcctggcacttattttctttaacaaaggtctttgatatgggaccttgttaatacggatggcgaaaggtcatgaccaattgtgcaccacgcgcgagcggactgctccattggccatgatacctcgctgccgaagcggtcacagaccgcaactctataaataggaggaacaatccatgcatatcaccgatcctgttgcggatatgctgacccgcgtccgcaacgcaaacaacgccaagcatgaaaccgtggatgtccccgcgtccaacatgaagaagagcattgctcagatcctgctggatgagggctacatcaagagcttcaccgtggaggatgacggcctgcagggcatgatccacatcacgctgaagtacaacgccggcaaggagaaggtcatcaccggtctccgccgtgtgtccaagcccggtctccgtgtttacgtgggcgccgatgagctgccccgcgtgctccgcggcctgggtattgccatcatctctacgtccaagggcgtcatgaccgacaaggctgctcgtgcagctcacgttggcggcgaagtcctggcattcgtctggtaaggagggtatcgaacaatgtctcgaattggtagaatgcccattaccgttcccgccggtgttaccgtgaacgttgctgagggcaatgtggtcaccgtcaagggacctaagggcgaactgactcagagcctgcggcctgagatgatcattaaacaggaaggtacgacgatcaccgtggaacgtccttccgacgataagctgcatcgcagcgttcacggcctgacccgcaccctgctccacaacatggtcatcggtgttaccgagggctttaagaaggagctggacgtcaacggcgtcggttaccgtgttgccaaggagggtacgaacctggtcatgaacctgggtttctcccaccaggtgatcgttcctgagattccgggcatcactgttgaggttccgggtcccaataaaatcatcattcatggatgcgacaagcaggctgtcggccagtttgctgccgaggtccgcgagaagcgtcctcccgagccttataagggcaagggcatcaagtatactgacgaggtcatccgccgtaaggttggtaagaccggcgccaagaagtaaggaggtgtgccgaaatgattactagacctaataccaataagcagcgcatgaagcgtcataagcgtgttcgcgctaagatctccggcactcccgtgtgcccccgtctcaacgttttccgcagcgaggccaacatctatgcccagatcatcgacgatgtgaacggcgtgaccctggcttccgcttcctctctggacaaggccatcgaaggttacggcggcaatgtgaccgctgcttccgctgttggcaagctgatcgctgagcgcgctctggccaagggcattgagaacgtcgtgtttgaccgcggcggctatctctatcacggccgtgtgcaggctctggctgagggcgcccgtgaaggcggcctgaaattctaagggaggaggaaacgagaaatggcaagatttgaaagagaacagagcgagtatatcgaaaagctcgtttacctcaaccgtgtttccaagaccgtcaagggcggccgtgtcatgaagttctccgcgctgatggtcgtgggcgacggcaagggcaaggtcggctatggtctgggcaaggccgctgaggtccccgaggccatccgtaagggtctggaagccgctaagaagaacatgatcactgtgaccatgtccggcagcaccattcctcatgagactgttggcgaggctggcgccggccgcgtgctgatgaagcccgctgctcccggtaccggtatcatcgccggcggcgctgtgcgtgccgtcgtcgaggccgcaggcatcaaggatatccgttccaagtgcctgcgttccaacaaccccaacaacgtcgtcgccgccaccttccagggcctcaagagcatgcgtggtcctgaggatgtcgcccgtatccgcggcaagagcgtcgaagagatcgtgggttaaggaggcgctgagaaatggctaaaaatattacgatcaagctcgctaagagcctgaacggccgcctggagaagcaggttgccaccgcacattccctgggcctgcgtaagatcggtgacgtcaccgtgcagcccgataacgattccacccgcggcaagatcgccaagatcggctacctgctgcaggtcaccgaagagaagtaaaggaggacggaatcatgaaattgagcgaactgtctcccgctgagggctccgtccgtcaggcttaccgcaagggccggggcgccggcagcggcaatggcaagaccggcggccgcggccacaagggccagaaggcccgttccggcggcaaggtccgtattggcttcgagggcggccagatgcctctggcacgccgtctgcccaagcgcggcttcaacaacattttcgcaaccccgctggagatcatcaacctgagtgccctgaacgtgtttgaggacggcgacgtcgtcaacgtcgaggctctgctggccaagggcatcctgtccaagtgcgagtatggcttcaaggttctgggcaacggcaaggtcaccaagaaggtcactgtcgaggcttctgctttctccgcttctgccaaggaggctatcgaggcagcgggcggaaaggcagaggtgaagtaaaatgatccaaaccattcgcaaagcatggggcatccctgagctgcggaaaaagatcgtttttactctcctgatcctgctgattttccgtctcggcaacgccatcatggtgccctatatcaaccgggacgctctggccctgcagatgcaggtctggggcaccggcctgctgggcctttacaacgtgatgagcggcggcgcctttgccaccgccaccgtgtttgccttgagcatccagccttatatcaacagttctattatcatccagctgctgactgtggccatccccgctctggagcggctggcccgtgacggcggcgaggaaggtaagaagaagatccagtccatcacccgctacgctaccgtggcgatcgccattctccaggccattggctattacttcatgatgaagaattacaacctcctggagcaggacggcatctgggtggcactggtcatcatcgtgactctgatcgcaggttcctccttcgtgatgtggatgggcgagcaggtcaccgagttcggtgtaggcaacggtatctccatcattctgttcgccggtattctggcccggatcccctctatggtttccggcatgaaggacggcatccagagatggtccgccatcaacgcgggcactctgactgcggagaccctgacctctgccggttacaccgaggcacaggcgcaggcttacctgaacggcgcgctggctccctggagcattgcgctgctggtcatcggtatgctggccctgatcgcattcattgtctttatcaatgacgctgagcgccgcattcccgtgcagtatgccaagcgtcaggtgggccgtaagatgtatggcggccagagcagcaccctgcccatgaaggtgaacatgtccggcgttctgcctgtcatcttcgcccagagcatcgcttctctgcccatcaccatctggaccttcatcggtatgcccaaggaaggtactgtgtcctacagcatctacaatgccattgatacgaagtccgtcatctacatggtggtgtacttcatcatgatcattggcttcagctatttctactccagcatccagttcaaccccgtggagatcgccaacaacctgaagaagcagggcggcttcattccgggcttccgtcccggccagcccaccgtgcagttcattcagaaggtcctgaaccggatcaccatgttcggtgccatctatctgggtatcgttgccatctgccccctgatcgtgggcaagatcattggcaactcttccctggccatcggcggcacctccgttatcatcgtggtgggtgttgcgcttgagaccgtgaaggcgctggagaatcagatgctgatgcgtcagtacaagggcttcctggaataaaaaggaaggcgtgctgtcatgaaaatgatcctgttaggcgcccccggcgccggcaagggcacacaggctgagcgcctgtgcaaagtgctgaatatccccacaatctccactggcaacatcctccgggccgccgtgaaaaacggcacccccaccggcaagcaggcggaagcctacatgaaggccggcaagctggtccccgatgaggtcatcatcggcatcatccatgaccggctggacgaggatgactgcaagaacggctatatcctggacggcgtgccccgcaccatcgctcaggctgagtctctggagaaggccgggatccggtttgacgacgtaatctccattgagatccccgatgaggcgatcatggagcgcatgagcggccgccgcgtctgcgagcactgcggagccagctaccatctggtggctgtgcctcccaaggtgcccggcgtgtgcgacagctgcggcggcaagctgattcagcgtcacgatgatgaacctgagacggtcaagcaccgccttgaggtctatcataaggagacggaacctctcaaggatttctacgctgagaggggtctcctgagatcggtggaaaatcaaccctctgtggaggccacaaccaaggccatcctcaacgccctgaggagatgagcttatgattacgctcaaatccgcacatgagatcgaactgatgcgccgagcgggaaaaattaccgcggctgcccgtgctttggcaggggaaatggtaaagcccggcgtaacaacccaggagatcgacagggcagtggagcatttcatccgcaagcagggtgccgttccctcattcctccattttcccggcccgccgggagtccgggcattccccggcagtgtctgcgccagtgtcaacgatgagatcatccacggtatcccgggtccccgggtgttgcaggagggtgacatcgtcagcattgatgtaggcgcctatatcggaggatatcatggggactgcgcagccaccttcccctgcggcaaggtctctccggaggctcagaatctgatcgatgtgaccagacagagcttcttcgagggcatcaagtttgccaaggaaggctgccggctgtatgatatttccgcagcgatccaaggttatgtggagagtcacggctgctccatcgtccgtgaatatgtcggtcacggcatcggcacggagatgcacgagtcacccgagattcccaactacggtcatccaggccgcggaccccggcttcttcggggcatgaccatcgcggttgaacccatggtgaacgccggcactgccgccatccgccagatgccagacggttggaccgtccggactgcggacggcaagttggcggcccactatgagaatacgcttctgatcaccgacggggagcctgagatcctgacggctcccgccatctgaggaaagacgtatatggagatcgcaaaatcagatattgttcgttccgatgccggcagagatcagggaaaactcttcatcgttctcgcggtggagggggagtaccttctgctggcagacggaaaaggccgcaaggcggagtcaccgaaacgcaaaaaacgcaaacacgtgctgtttgtggcggaggatgacagccgtctggcggataagatcaaacgcagcgagaagatcaccaacagtgagcttcgcaggacactcgcggcctaccgcggggaagtccaaccggaccaggagggataacgtttggcaaaatccgacatgatcgaagtggaaggcgttgtggtagagtccctgcccaacacgactttccaggtggacattggaaatggccacatgattctggcacacatctccggaaaactcagaatgaatttcatcaggatcttgcccggcgataaggtcaccgtggagatgtctccctatgacctgacccgtggccggatcacctggcgcagcaaataagccgcgtccggcgaaatctaagacacaaaacgctgaaaggaaggttacaaacttatgaaggtaagaccgtccgtgaagcccatgtgcgagaagtgcaaggttattcgccgcaaaggccgtgttatggtgatttgcgagaaccccaagcacaagcagcgccagggctaagattgattggaggttaaaaagtatggcacgtattgccggtattgacctgcccaaggataagcgcattgaaatcggcctgacctatatctatggcattggccgcaagagcgcgaaggacatcctggaaaaggccggggtcaaccctgacacccgcgtgaaggatctgactgacgccgaggagcagaagctccgtgacgtgatcgacaactatatcgtcgagggcgatctgcgccgtcagaccgctctggacatcaagcgcctcagcgagatcggctgctaccgcggcatgcgtcatcgcaagggcctgcctgtccgcggccagcgcagcaagaccaacgcccgcacccgcaagggccccaagaagaccatcgcaaataagaagaagtaagaaaggagaacagcaatggcacaggcaaagaaagtcatccgccgtcggcgggagaagaagaacattgagcgtggccaggtccatatccgttcttctttcaacaacaccatggtaaccgttaccgatacccagggcaatgctatttcctgggcttcctccggcggactgggtttccgcggcagcaagaagtccactcccttcgcggctcagaccgcagccgagacggctgcccgcgccgctatggagcatggcctgaagaccgttgaggtcttcgtcaagggtcccggccagggccgtgaagccgctatccgcgcgctgcaggccgtgggtctggaagtgaccatgatcaaggacgtcacccccatcccccacaatggctgccgtcccccgaagcgccgccgcgtgtaatcgaaagaggaggtaacaagcaatatggcaaagaatatgcagcccatcgccaagcgctgcaaggctctgggcatctctcctgctgagatgggttacgctaagaagaccaccaatcgtaatcccggcggccagatgcgtaagaagaagagcgaatacggcctccagctggctgagaagcagaaggtcaagttcatctacggtgttctggaaaagcagttccacgcttactatgagagcgctgctgccgcttccggtaagaccggcgataacctgctgatcctggttgagcgccgtctggacaacgttgtgtatcgtatgggtctcgccgctacccgccgtcaggcccgtcagctggtgagccacgcccacttcaccgtcaacggcaagaaggtcaacattccttcctacctggtgaaggctggcgatgtcatcgaagtggccgagagcagccgttcttccgagctgttcaagcgcctcactggtgagaatgcccccatgaccctgctgcctgcctggctggagcgcaccaagggcactctccagggtacggttgctcaccttcccacccgcgaggagatcgatactcccgtggaagagcacctcatcgtcgagttgtactccaagtaattgggaggataccctcgaagaatggtacgaactgcaagcggcacgcggcttgaccgcgtgaccgcaatgacaagatgaaggagggtaaccgcatgatcgaaattgagaagccccagatcgagtgcatcgagaccccggctgacatcacttatggcaagtacgtggtagagcctctggagcgcggctatggcaccaccctcggcaacgccctgcgccgcattctgctttcctctctgcccggcactgcgccgacgaccatcaagatcgacggtgtgcagcacgagttttccaccatccccggcgtcaaggaggatgtgacggagatcgttctgaacatcaagagcttgctgaccaagctccatggtgattccggcaagaccgtctatatcgaggcggtgggtccctgcacagttaccgccggcgacattaaggccgacggtgaggtggagatcctgaatccggatctgcacattgcgacgctggacagcggtgccacgctgaacatggagatcaccctctcccatggtcggggctatgtgcccgccgaccggaataagcccacgcaaaacgtcatcggcaccattgccgtggattccatctatacccctgtcaagaaggtcaactacactgtggagcccacccgtgtgggtacctccagcgacttcgacaagctgacgctggaagtctggaccgacgggaccatttctgcccgggacgctgtttctctgggtgccaagatcctgtgcgaccactttactctgttcaccgacctctccgaaagcgttggcagcaagcctaccgtggtggagaaggcggaggcccagcgtgacaaggtactggaaatgaccatcgaggagctggacctctctgtccgcagcttcaactgcctcaagcgcgccaacatcaacaccgtcgaggacttgatctccaagaccgaggacgagatgatgaaggtccgcaacctgggccgcaagtccctggaagaggtcatcaacaagctggcgatgatgggcctgcacctggctgacgaggaaaacaactaaattttccgccgggaacaccccggcgcaccaaaatccttacaaggaggagaaccgaaatgcccggaactcggaaacttggcaagaccagcgaccagcgcatggctatgctgcgtcagcaggtcactgatttcctggataacggcaagatggagaccaccatcacccgtgccaaggaaatcaagcccatggctgaaaagatgatcaccctgggtaagaaggccgacctggccgcttaccgtcaggcgatgtctttcatcacccgcgaagatgtctgcaagaagatcttcaaggagatcgctcccaagtatgcggagcgcaacggcggctatacccgcatcatccgcaccggcatccgccgcggcgatgctgctgagaccgctatcatcgagctcgtctgattcagacccgctcacggcgtaagcactgataaaagccccattgtcatggaactcgagaccatgacaatggggctttttatgggttaattaaatagctgtaacgccattttatgtagaacaagcccccggaaaagcttccgggggcttgttcagaaaaaagaagaaaaaagagaaaagcaaaaataagaactggacttaccgcacgccaaagaggagatctccgtaggtggggaagggccaatatttgtcggcagtgatggactctgcctcgtcgcagaccactcgcagctctgccattttttgcaggaccacatcccggatcacataggctgcgtccgttacatcggggattgctttcaaccggatcagggtggtatccagagaggaagcggcgtcactgatctcgtccgccagcttggagagtttggagatcagatccttttcatatttacaggccagcccgggaaccgccgcagttttggcggccacagtgccagacagattgcccagataggcctccacagcaggcagaatttcctttcgggccatatctaccatggtaagcccctcgatattgacggtcttgcagtagttttccagacagatctcataccgggaacggatctccgcttcggaaaagatcttcagagaagtgagcatctctacatttttcttttccaacacagtggccagagcatccggtgtggtgcggagattcagcagtccccgtttttctgtggcctccttgatccaggcgtcatcatagccgttgccgttgaaaatgatccgcttgtgggccttgatggtctccttgatcaggtcatggagcgcggactcaaaatcagacacaccctccagccggtcggaaaattccttcagcgtttctgccatggctgcgttgagcatgatgttggcacaggcgatagaatcggaggagcccaccatacggaactcgaatttgttgccagtgaaggcaaagggggaggtccggttgcggtccgtagtgtcccgggtgaatttaggcagcacatgaacgcccagtttcagaacggttttctcggtgccactgtaaggggtgtccgtctcaatggcatccagaacagcggtaagctcgtcgcccaaaaagatagagattacagcaggaggtgcttcgttggcgcccagacggtgatcgttgccggcagtggcaacagacagccgcagcagatcctgataattgtccacggcctgaacggcggcgcacaggaacagcaggaactgggcattttcgtagggcgtctcaccaggtttgaacagattcacgccggtgtccgtagccagagaccagttgttgtgcttgccgctgccgttgacgccagcaaagggcttttccgccagcaggcacaccagatcgtggcgggaggcgactctctgcatgatctccataatcagttggttctggtcggtagccacattggctactgtataaatcgaagccaattcgtgctgggagggagctacctcgttatgttccgtcttcgcatagatacccaatttccacagttctgtgttcagttcctccatataggcttctacccggggtttgatagcgccgaagtagtgatcatccaattcctgccccttgggaggctttgcaccgaacagagtccgaccgcagaagaccagatccttccgcttttcatacatggccttgtcgatcagaaaatactcctgctcagggcctacgcagggatggacgcacttgacgtcctcattgccgaagagcttcaggacccgaagggcctgcttgttcagcgcctgcatggatcgcagcagcggtgttttcttatccaaggcctcgccactgtaggaacagaacgccgtggggatgcacaaggtatgtcccttaatgaaggcataggaagtggggtcccaggcagtatagccgcgggcctcaaaagtggcccgcagaccgccggaagggaaggaggaagcgtccggctctccctgaatcagctccttgccggaaaattccatgatgacgccgccgtcgggagaaggggaaatgaagctttcgtgtttttctgcggtaatgccagtcagcggctggaaccagtgggtgaaatgggtagcgccgtgctccacagcccagtcccgcatggcggtagctaccgcgtctgccacatgggcgtccagagaagcaccctcatcaatggtcctcttcagagaagcataaacatcggagggcagcttggcccgcatgacccggtcatcaaataccagactgccgaaatagtcagaaactgtacgcatgtataaactcctttccttcataaaaaagggggcaccgatcccccggaatcacattccgggacaccgttgcccctccgcataacaatcaaaaatagcgtcttgaagattactctccaagacgccattgcctttgatgttggggattatacacgataagattttgcttgtcaagatgtttcctacaaaaaaacggaggaattttcgggaaatttgccgaagcctcttgacatcccggaaatacctgttaagatagaaatacaatttcaaagtcccttatcaagagtggcggagggagcggcccgatgaagccacggcaacctgttttcacaaggtgccaattccgacggaaacgacagatgaggagcggaaaacgatcttttcacgcgcttccatgtcggaagcgcgcgttttttgtcatccggcgagggacagcaaaggagaaagaacatggcaagaacctacttatttacctctgaatccgtgaccgagggccaccccgacaagatctgcgaccagatctctgacgcggtgctggacgccattctggccaaggaccccaacggacgcgtggcctgcgagaccaccgcttccaccggcctggtacacatcatgggcgagatcaccaccagctgctacgtggatattcccaagatcgcccgggaagttatccgggatatcggttatgaccgcgccaagtacggctttgactgcgatacctgcggtattatttccaacatcgacgagcagtccagcgacatcgctctgggcgtggacaagtctctggaggccaaggaatccggcgaggccgagctggataacggcgccggcgaccagggcatgatgttcggctacgcctgcgacgagaccccggagctgatgcccctgcctatttctctgtctcataaaatggcccggaagctcactgaggtccgcaagaccggccttgtgaactatctgcggcccgacggcaagactcaggtcactgtggagtataacggcgagaagcccatccgtgtggataccgtggtgctctccacccagcacagccccgaggtgacgctggagcagatccgcaaggatatgatcgacatggtcatcaagcccaccattcccgcggagctgctggacgagaatacgaagatctatgtgaaccccaccggccggttcgtcatcggcggccctcagggtgacagcggcctcaccggtcggaagatcatcgtggatacctatggcggcagcgcccctcacggcggcggctgcttctccggcaaggaccccaccaaggtggaccgctccgctgcttacgccgcccgctgggtggccaagaacatcgtggcggcaggactggcccggaagtgccaggtgcagctggcctacgccatcggcgtggcccagcccgtcagcgtactggtggataccttcggtaccggtacggtgggggatgagaagctggaagaggctgtgaagaaggtctttgacctgcggcccaccgccatcatccgggatctggacctgagaaagcctatctatcgccagctggcggcctacggccacatgggccgcgaggatctgggcgtatcctgggaaaagaccgaccgggtggacgccctgaaggctgcccttcagtaacggaatcaactgtcagatagaacccaccccggagtacacagtactccggggtgggtttgagtttaccgataaagcagtagattttccgtagcggtaaggaagggtgtgcgcgggaaacccaagaagggtgtcctgcgcaattgagatcctaagttttcagaaattctataaagttctgaaaacttgttcagcggggagaaaaaagcttttttcgatacgctgaacccaccccggagtacacagtactccggggtgggttttttcaaatcttttccagcatggaccggacggtgtccagatccgcggaagtgaggccgtaaagcgcggctacagcccggtcaagctgctgccggacggcgtcctgacagcgagggtctgaggctcggtggccctcctcgcagagagcggcgatggatagatgacggctgtccgcggggtcaaaggccggaatatgcagcttgtccagcacatgagcggaaatactggtggggttcatgtagcaggtgacgcagcagcgcaccggagcggagctgagaattccgcagagataataggcctcctcccggcagtcagtgcccacatagaccaccttttcgttgggcaggggcagcgtttctcccagataggggtcctgcatcggggtgatgaccgccgtgatgaaggagcgggcgatgtagcgccacgctaccttgtagcgggaaaacgtatagggccccacccgcagcagcgcgtagaagtaacgctcttggatggcccgttcccacccggcgaagcctttccgggtttccagaagatcccggaaccgggtcaggtaggcgtaggtcagcggcagatcctgtcgcaaatccgcttccgcaagaggatagattttggtttcagccgtgtgggggcacagcagccaggcacggctgcggacgctccactgggagaggtcgctgccctgaataaggggatagacgcaggttggctccagctccgccgtaacggcgggggccttgcggcgggccttttccgccagattggtgacccgcagggtattgcctgtccgttccagaatctggaaccgatagacggcgttggccccgccggtgaatacgccggtccgggcctgatagggattgctgcctaaaagagcgtccagtactggagcaagtccattgggagcgctgacccacacggagccgggatcatcccggtgggcgggagcggcggtcatgttctccatccgtacaaaggggagaacggaggcaatcgtcgcgtccagtgaccggaccgcccgccggaagccgggctttgcctgccagtgccggtaggggacagggaaaacgtggcgggcgtcccgctggatgagtaccagcgcaacaggggtgcagatcccgtcaaagggtcggatacggccaaggtcctccacctcaagcacccggaaatccagaccggggccgtccagatggaaccgccggaacccggcaccgttctgcgcggagcggaaagtagcctgccgcaagataaaactgaggcgcccaccggggacgagaaagcggtccaacgcggcgcaggtgaacagggtagacacatcctccttggaaaaaccgagccgggggccttttacctgcaacaggccgtattccccccacaaatgctgggacccggcccgataccggggggacaggtactcccagttcacccatgggggatttcccatgactatatctgccttttgatggaagaacgcccaaatacggttcagcaaaataccggccaaaagaagccgcccattcgggggcagagaggtgagcagaccgcgtgcttccggcatggaaagaaatttcttcggatcggggcgcatttccactgcctgacggcagagggacaggggaacatcacatgccagaccacagccggtgtcgatcaccagtgtatccccccggaggatggggatattcagagcgtcatagcggtaaatggaaagaaacagacccacttccggcagcggctggcgggccatgacggccagataattgaccttcgccgttaggactgccaatgggtggaggtcgaagcctgccacctgatcagataagggagggtcttggggcgtatccgcccggatcatgcggagagcctggatcaaaaaaacaccggagccacaggcggggtccagaaagcgcaaatctccggcctgctgtccgcttgcgctgacggcattttgcagggtccgttccgccagccagccgggggtgtagtattccccaagggcatggcggagggccggggggaccacggtttcgtagatgcggctgagactgtccggggaaagggtgctgccttccggacaggtgtcaaaggactccagacaggcccgcaattcctcacactgggtttccagcgccgggtcccagatgtccagcggccagatataccagtcatccccacagaaattgcggataccccggttaacaaaggccctgccggagagaagctccgtcagaggcggttctggggtcgcaccccggagggtgttccaggcgatgagcttgatgagcacactgtaaaaggtctggatgctttgcaggagccggggcaattccggcggtgtgtcaaaaccaaaccgatcacccaaggacccggcgtcggtttttgcattgggagagagccgctggtgcagatcaccgtagatcagctccaattcctgcgcccacagctcaaacagcgctgaaccttcccacagggtggggtccagccactgataaaaacaacggacacaccgcaccatgacgccatggagcggtgtgtcctcttttttcagttggatcaagatggaatgcagatcgtacatggtccctccggcgggctgactgccgcctgacagtttatttggtttccgcagcggcccggacaggcagttcactgatgagggtggagcccagcaccagaacggcgccaaggatcccgctccaacccagaggctccttcagcagcagagcggagaggaagatggctacgatggggtcgatgtagctgaacagcaccaccgtctgggcggggagataggtcatggagccgaagaacagggaatagcaccagccggtgtggaaaacacctacgatcagcagcagtacggcgcccagaggtgtcagagccatagcggctacatcctccgtcagcaggatataggggatcatcaccagtgctgccaccgccagctgcaccaaggtccgctcacaggcggggacctgatccagaagcttgttgatggacacatcgctggcataaagcacggcggaaagaagggccagtaggataccggtggcttccccggcttccggcaggccggactgggggactccggagacaaacaccatgccgcacagggcggccagcacgcagaggagctttctggtggtcagcttttcgtggaacagaaagggggaggccagcgtcacgaacaccggcgccatgtagtagcacagggtagcggtggccacggtggtgtaacggtaggcttcaaacagcgtgatccagttgaagctgatgatcgcgccggaaagagccagcagcttccaatgcggctggacgcttgcccaccgaaagggtgtccggcggaaatacagcagaagcagcaggaacactgcgcccaccgcgccgcggacaaaggcgatgacagaggagggcaggttgatatagcggacaaaaatgccgatggtgccgaaggcggtgacggcaatgatgagatccagcttggcacggttgacggacttcataggaacaaacctctcttggaagaaaatgatatattttatgccagcagcggcagcagaacatccgtcagcagtcggagggcctcttccagatcagactgggacagaccggcgtaattgaccaccagcgtgtgggcgaagcgggggtccggtacggcggcatactctgagagaaagctcagtcggatgccggcctccgccgtcaggcggcgcaattcttcatcggagcggttggtatccagccgcagcagaaagtgcagaccggccccctcctcggaaaaggtgacatggctggccagcggcgaagcccggaaggcgctgatggtggcggagcggcggtcccgatattccttccgcatccgggagagatggcgctcatagtgccctccggcgatgaaccgggccagaacgtgctgctccagcgcagggaccgtacaggcatagaagcccagctcctgccggtagcgttccagcagccggggcggcagcaccagaaagccaagacgcatagagggggaaatggtctgggaaaaggtgttcaggtaaatgacccggccccggtcatcgatgctttgcagggtggggatgggacgaccagtgtagcggaactcgctgtcatagtcatcctcgatgatggtggaaccggtatcctctgcccagcgcagaagggcttgccgccgggcgatgggggtcaccagtccggtggggtactggtggttgggggagatgtgcagcgcccgcgccttggatctcatcagcgccgccagttctacgccctgattatccagcgggatggggacgcaggcggctccgcaggcgtcatagacctgacggatcttgggatagccggggtcctccacggcgaacaccgtgtcccggcccagcagttgggccagcaataagtaaaggtattccgcaccggcgccgatgacgatctgttccggggagactgccatacctttgaagtcccggagatcgtcggcaatggcctgccgcagggcagccaagccctgatggggcaccggggacaacagagcctccggtgcttccgagaggacctgccgggtgaggcgggcccaggtggaaacggggaaccgggcagtgtccacctgattgcggcccagatccagccgccaggaaacagtggtggtctccggcatcaaaaccgagcggacagcaggcggtggggcctgctccacggcggagacaaaaaagccacgcttgggccgggcctgtaaatagccctccgcttccaactgactgtacgcgccctccacggtaacaacggagacccgcagatgctccgccagcgcccgcttggagggaagccgcgtcccggcgggcagagcaccgctgagaatgtccgcccggatccggcggcacaggtattcatagagggggagagaaccccgttcctccatggggtaagtcagcatagcggcacctccagaatgggatgggaaaaacgccccggcaagggtgacccagccggggcggaatgattagaaagaaaactcagaaactgcccgggccgtcggagaaatctgactgccgggagcggaactccggcatatcttccttggcggcatcgaaataggcaagctggacgcactggtagttaggcagatagaagatggacagcgcgtagacaaaggcggaggctgtcaggatctgccacagagacatgggtacggcgaggactgtggagggatccataccactga

SEQ ID NO: 12256 - DNA, 7433 bp, Unknown
  gut microbiota DNA sequence
ggatccagcccatgtagctgagatccagcttgaacagctccattttatacccctgtgtctgtcgcttgctcagattcagcgcctccataatatccatctccggatcttcatagagattataaagggcgaagctgtagcggtaataggcgatgatgccggggaatacaaacagcatggaccacaggaacacaaacaggttgatcacgatgttcagagcgatgattttgccggtgaaggagaacccatcgaacagcacagcgtattctgagcgctcccggcggcggatgtccatgcagtagagggcaaagccggcggctaagatccactcagccagcgttgtgaggatggagaggaaggtggataccagctccggcccgggaatcagggcctccagcaggctgagcagaaacagacaggcacagtacagggccgtcatacccttgggggatacctgagctgtctgcaagagtttccgggtctgggctttcatttcggcgcggtcaatgggcttcgtcataaaaagggacctccattcgccgctccggcagacaggccggactgcggcgatactttctgaaagatatgcttcatcatagcatacctccgaaaaaaagacaagagaggcagagggggtacagcgactgcgggagttgtcggcaggaaaatatgcaggttgaccaaaaagagagggtgggcttgtgcaaaaacagggaaaaagtggaggaatacaaagaaattgataaattttatacaaaaaaacgaattcatagtctggacatttttcaacgggtggtgtagaataaagcgcagtatgtgatagtgtgccgaagcatggcctgccatgccattgcccgatggcggggcggggtatgctttgacacctatcaatggagtaagaatgaggtgaagacaatggcacaagctttctttggcggcgttcatccccatgatatgaaggccgcaaccaatgaaaaggccatcgagcagctggcacccccggctaccgtggtcatccccatgtcgatgcactttggcgcaccctgcaccccgatcgtaaaagtaggcgaccaggtaaaggtgggtcagaaaatcggcgaattcaaggggctgggcgccccgatccatgccagcgtttccggtacggtgaaggccatcgagccccggcccttctctatgggcggcgacatggtgtccgttgtgatcgaaaacgatttccagaacacggtcagcgaagaggtgaaggctcctgccgatcccgacgctctgacggtggaggaaatggtcgagatcgtgaagaatgccggtatcgtgggtatgggcggcgcgaccttccccacgcatgttaagatctccggcggcatcggcaaggtgaaggacgtgctcatcaacggcgctgagtgcgagccttacatcaccggcgaccatcgggccatgctggagcgtcccgaggagatcatcggcggcgctacctatctggccaagatgttcggtgtggacaaagtcatcatcggcgttgaggacaacaagcagaacggcatcgacgccatgaacaaggtcatcgctgagaagaaggcccccgttgtggtggagcctctgcgctgccgttacccccagggcggtgagaagcagctgattcaggccatcaccggccgtcaggtgcctcccggcggcctgcccgctgatgtgggctgcgcggtgttcaacatcaacaccaccatctgcatcttcaaggccatcaccaccggtatgcccgtggtgaacaaggtggtcaccgtgtccggttccggcatcgtggatcccaagaacatcgagtgccccatcggtacccccgtgtctctgctgctggacgcttgcggcggcgtgaaggacggtacttacaagctcatcgccggcggccccatgatgggcatggcccagtataccgcggatattcccgtggccaagggcaccggcgccatcctcgctttctgcgagaaggaggagcagaccgttgagcatccccagtgcatccgctgcggtaagtgcgttgccgcctgcccggtgcacctggagcctctctttatgtatcagtatgccgagaagggcatggtggatgagctgaacgaggcccacatcatggactgcatggagtgcggcgcctgcgcttacgcctgccccgcccgtatgcacctgacccacatgttcaagaccggcaagcagctcgtcaagaacaagatggctgctgatcgggccgccgctgaggccaagaaggccgcggaagcgaagaaggaggcataagagatgaccgattacaagaatttgaagctcattgccacttccaaccctcacatccgcggcagtgagaccacccggtccatcatgctggacgtcatcattgccatgtgtcccgctctaatctgggccatcatttacttcggcgtggaggctctgctcctcaccgccgtgtccgtcattggctgcgttgtctttgagggactgtaccgcaagctcatgcacaagccccagtccatcgatgacctctccgctgtggtcaccggtatgctgctggctttcgtctgccccgccaccaccccgctgtggatgatcctcatcggtgacttctttgccatcattgtggtcaagcagctctttggcggcatcggcaagaacttcctgaaccctgctctggcaggccgtgccgctctgctggccagctatgccggcgccatgaccacctggctgcctgccggcaccaaggccgccatcggcggtggtatgcctgtggacgtggtttccgccgcgaccccgctggcctatctgaagaccggcgatctggagggcctgaagcagatcgcctccgtgggtgatatgttcctgggcaaggtgggcggctccatgggtgaggtttctgccctgatgctgctcatcggcggcctgtacctgatctggcgcaaggtcatcaactggcagactcccgtggcctacatcgccaccgtggctgttctgaccgtgctgttccccaaggccggcggcgctgagtatatgctttacagcatcttcggcggcggcctgttcctgggcgctttcttcatggctaccgactatgccacttcccccgtcaccaagaagggccagctgatctacggtatcggctgcggcctgttcaccgtgttcatccggtacttcggttcttacaatgagggcgtttgctactccatcatggtcatgaactgctgcaccgcgttgatcgacaagtacaccaagcccgttcgtttcggcgtggtgaaatccgacaagaaggaggcagccgcgaaatgagcaatgaagtgaagaccaaggaaaaggtcaatatggaccccaagtacatcatcaagctgactgtgaccctgctgcttacctgcatggtcgtggctggcctgctgggctgggtcaacagcatcaccaaggataagatcgccgcgatcacctgggaaaagaccgtggccgctatgcagaaggtcattgaggccgacgatttctccgacgctatggagctgaccgacgatatgaccgccgctgccaccgctcagggcggtacgctggcagccgtctatcaggctcagtccggcggtcagcctgtgggctacgccatcaacgtggaggcttccggctctcagggcaccatctccatgatggtgggcattgacatggacggtgctgtcaccggtgtttccattgtcaccaactctgagacctccggtatcggctccaaggtcatgagcaacgagcctctgaccaacggcacccgcgttctggatcagtttatcggcaagtccgccgctgacggcgttctgtccgttggctccaacgtggacgccatcaccggcgctaccgtgtccaccaagggtgtgaccaccggcgtcaatgccgctttggctgctgccggcgtcatcggttaagagaggaggacactgaagtatgaatcttggtaaacaattcaaggacggtatgctgacgcagaaccccgttctggttcaggtgctgggcatgtgctctaccatggccatcaccacctctttcttcaacggcatcggcatgggtgtggcggttaccatcatcctgaccctgtccaacatcattatttccgctatgcggaagatcatccctgataagatccgtatcgccatgttcatcgtggtgatcgctggcttcgtgacctgcgtggacctgtctatccaggcgtttctgccggatctggccaactctctgggcgtgttcatccccctgatcgtggtgaactgcatcatcctgggccgtgcggaggctttctcctacaagaacggcatggttgcctctttctttgacggcatcttccagggcatcggctacacctgggtcctgctggctatgtgcatcatccgtgagttcctgggcggcggcaccttcggcggcggcgtcctgggcgctgtgaacgaggctggtcagcatgtgggcatccagatcttccccgctgattacggtatcggtatgctgaccctgcctgtgggcggcttcctggtgctggctgctctgatcgctgccatgcagtgggctctggctcgtcccaagaaggataaggaggagagcaaataatggaaatctttaagctgctttcgatcacgctgggcgcaatcctggcaaacaacttcatcttctcccagttcctgggctgctgccccttcctgggcgtttccaagaaggtggataccgcagtgggcatgggcgtggccgttaccttcgttatgggtctggcctccgctgtgtgctttgtggtgaacaagtacatcctgatccccctggatctggcttacatgcagaccgtggcattcattctggtcatcgcttctctggtgcagttcatcgagatgttcctccagaaggccatgcccgctctgtataccgctcttggcgtgtatctgcccctgatcaccaccaactgcgcagttctgggcgttgtgctgctgaacgtgcagaatggctacaacttcattgagtctgtggtctacggcatcaccggcggtctgggcttcctgctggccatcgtgttgttcgccagcatccgtgagcgtctggtgttcgctgactatcccaagtgctgggacggtttccccatcgcgctgatcaccgccggcctgatggctctggcctttatgggcttctccggcctgaaggtttggtaaggaggtaggaaagatgggaaatattattgctgctatcgcagttctgggcgctctgggcgctctgttcggactgatcctgtccgtggcttccaaaatctttgaggtcaaaaaggatccccgcgaggaggctatcctcagccatctggccggcgctaactgcggcggctgcggctaccccggctgcggcggctgcgctgctgccattctggccggcaacgctcctgtcaccgcttgcgctcccgcaggccccgacaatgctgccgccatcgctgagatcatgggcatggctgctcccaccggtgagcgtcaggtggccttcgtccgctgcaacggcggcgaggctgctaagaagcgctttgagtatgtgggcgtgcatgactgcctctctgccaccaaggttgctgccggtcctctggactgccgcttcggctgcctgggcttcggctcctgcgtgaacgcctgccagttcggcgccatgtccatcggccccaacggcaccgccgttgtggaccctgagaagtgcaccaactgcggcgcctgcatgaaggcctgcccccgcggcctgattacctccgtgcccgccagcaagaaggtccatgtggcctgcgccaacctggataagggtaaggctgctatgagcgtctgcggcaactcctgcatcggctgcggcctgtgcgagaaggagtgcaagaaggacgccatccatgtggtcaacgacgtggccgtcatcgactatgacaagtgcgtgggctgcaagctctgcaccaaggtctgcccccgtgacgccatcctccccaaggccaccgctgaggagaaggaaaagtataaggccatcaagaaggctcaggctgagaaggccaccgctgccaagaaggctgcggaagaggctgctcctcaggcctaagactccgtctacggatcaaatcccggcgcggtctgtctctgatcaggacaacaactgaatccgggaaaaccccgacagatcatcgctttgcgatgtctgtcggggttcctttataacaaggttccagtttgactttgtattctaaaaggagccagagccttgtatcttcgatggtttcagagggcatagaaagacaaaagggaattaggatatataaaaacacgggctgaaagtgtttacactttcagcccgtgaacagttgggatttatcgatttaccgcttgcccggcgttttcgccgttagagggggcggaggaaccgccgtattctgtttgctcccgccgcatgagcgagacgcggacacggagctgctggagcttgttttcaccttgaatccctacttttccatagatatccctgcgataggagtagactgtgctcatcttttttccgagctgttccgcaagcacctgagcactgactccgtcaaccattgcatcgatcacagcccgagattcggcccccagcttttgataggaagaaaggaacacatgatactcttccgggtcaatttcgtcctttcgtttttgcgccaagcgcttggcgttggcctccacctgctccatctgcccctgtagatcctgtttttctgtttccagatcggtaatggtctgttcgtggtcacggagtttggtggaaaggggcagaagttcttcaaaaaagggctgtccctcatcaccgccgatctcggtgacatgatcaatgtcttccagaatgggcctgaaataacgccgcgtgtaaaacagacagcgggctccaccgaaaaataccagcagcatcagcagcccgccaatctccaatttgcttttcagcaggagccgaccatagtctcttttggggatcagaaccgtcagggcatgaggctcgatatcgccgctggcggccatgaagggctgagaaaggcccacgaaggaaagctctgttccggtgaaagccgtgagtccctcccggagatttttttcgtcagcagttcatccggtacaaagcagaagccatctgcgggataggtcagaagccctttcgaaacatccagcccctcggcggaatccgccaggatacaggccagacggttgatgccggagggctgaacatggtgagaggagaagtaggtctggtttactgcaaagccgcacaaaccgtatacagtaccatccacacccagcatgggaactgtcagaaggatcgcgcgttcagaggtgtcgggcagggtcagcagtgaggttgtccggcagtcacgctcaatgggaacggatgccgttttcagatgttcggcaaagccggggaactccgac

SEQ ID NO: 12257 - DNA, 764 bp, Unknown
  gut microbiota DNA sequence
ccgaatctttgccaaagatgatgtgtcgtttcttgttttagtgtcttaacaatgttacagacggaatcagtcgtgtcgtatccgagaaggatatgcacgtggtctttgtctgtttccatcgccacgatttcgtagtgatgagcatcagcgatgctctgaatcttttgttttatggcatcaatccataagtcacctagatgcgccttgatgctcactatctattattatataatagatagtgaaatagcaaggaaaggaggattgactatggctcaaatgtccatcacggcaaaaatccaagtagtggcatctgatgaagataagacgttacttgatgaaacgatgtctgtctatcgtgaagcgtgcaactatgtttcggactatgtgtttcgcacacacgatttaaaacagttttcgctcaacaaggctctgtatcctacgttgcgtgcagaattcggactgaaatctcaaatgactcagtctgtattcaagacggtcattgccagatataagactatccttgagaatcagaaagagtggatcaaaccgtctttcaagaaacctcagtatgacctcgtctggaacagagactactctctgacgcaagaccgcttttccataaacacgctcggcggaagagtgaaactgccttatttcgcggaaggaatgtcgaaatacttcgaccgctctatctatcggttcggcaccgccaagctggtgaacaagcatggcaagtacttcctacatatccctgtgacctatga

SEQ ID NO: 12258 - DNA, 1246 bp, Unknown
  gut microbiota DNA sequence
atcgttgcgacttacgatagcaagcacaagtccgggtttgtgagaggccggcctatcaagcagaaaagagcccactattcagcacttagaaaagaactccagatgcggcataccccgtcttcaagacgtagactcaaaaggatcagtcaacgagaaaaccgttggatgcaggatgtcaaccattgtgtatcaaaggcactcgttgtaaataaccccgcgcacactctcttcgttctggaagatttgtccggtatccgtcatgccacggaacgtgtcaaaacgaagcaccgctatgtttctgtatcgtgggctttctatgacctcgaacagaaactcatctacaaggcgaaacagaaccaatcttccgtaatcaaggttaaccctcggtataccagccagtgctgtcccgtctgtggacacacagaaaaggcaaaccgcaacaaaaagatacatctgtttacctgtaagaactgtggctacaagtcgaacgatgaccgtatcggcgcaatgaatctgtatcgcatgggaatcaactatctatatgatagccaagtacctgatacagttgcggcagagtaaactttgccgcaaagggtgctgtcaaccaccctacgatgtaacgccacttgagacagcaatgtctcttggggttaaaggtcggaggagctatccgttactacgactgggcagttacaagcccatggcctttaggccgtggattgttgactactcctattctcaaggggtgtttcgatcgttcaacttgtatgaaacaaccgcaattcccgtttaaaattatggtatggtatgaccttgacttttttccccagaaagatatcattaaaatgtcttatttttgacatacgaaacggaggggagcaccgctatgctgaaagatatcgccgaagctatgctgggcagacgcccctttgacctggtaatccgcaatgtgcagatcgtcaatgtgttcagcgcctctattgtaagcggatctatcggcattgtcaacggtcatatcgccggggttttcggcccggaggaagcgccggagggccgccgaaccatggacggcggcagcgcttacgccctgccgggcttcgtggattcccacatgcatctggaaagcagcatgctgacccccgaccactttgcccgggtggccctctcctgcggcaccaccacggtgtgcgccgacccccacgagatcgccaacgtgctgggcatcgagggggtccggggcctggca

SEQ ID NO: 12259 - DNA, 433 bp, Unknown
  gut microbiota DNA sequence
ccagttatcttgaactggtgtcctttatcaaggccaacggcgctgctcccaagagagatttgacagagctatggaagcggatcgtgttcaatatggctgtttccaatacggatgaccacatgaggaatcatggctttatcctcaaggcggatggctggcatctctcacccttgtacgatgtaaaccccgtcccggagggtgacgagctgtccctctgcgtaaacgaggacgatgcgacgatctccctcgaccttgcgctggagatcgcaccgtattgtgagatcagcaccaaggacgcagctgctatggcggcggatgtcctgaaaaccgtccgagaaaactggaaccgccttgcaacagaatgtggattgagccggagcgcacaggaatatatgagaccggccttctcgctggctcttgaagaatagaagaa

SEQ ID NO: 12260 - DNA, 6219 bp, Unknown
  gut microbiota DNA sequence
aaagccggcggttatttttttacaaaagatacagaagaaacttggcactggccctttctattcgcttttgaatatgctataatcaaaaatgaatagatcacacgcgggaggtactctcatggcgcatacacctgaccttcctcatttctttgaggaaaatatcaatctggagggacttttcgatatcctcagccccaaaaacaatctggtcctggcagacgatatgatgctctctgacgcagacggcatcattctccgagtcagtgagaactatgagcggaactttggctttacccacgattccatcgtgggtaagtcggcttttgatctggaagcgaacgggactttccggccctgtatcactgcggaggtcatccggcagaagaaaaagatcaccgccacccagaccatcaaccacacccataaaaatgtcatgacggtgggaattccgctgtttgaccaaaacggtgtgctgaaatatgccgtgtgcttcaacacggtgtccatggagcagatcaacaccattcagcagaactaccggcatttacaggactccttgcagcagtatacgcaggagatcgcggaactgcggctccgggccaccgccacggatttggtggtgaagagccctgccatgcagcggttatggacactgatcctgaataccgccaacacgaaggccaatattctcatcaccggggagaccggcgtgggcaaaagcgcagtggccaaggccatccacgccatcagcaaccgggccaacggcccctttatcgaggtcaactgcgcggtgctccatgaaaacctcattgaatccgagctgttcggctatgaaaagggagcctttaccggcgcggcctctgccggtaagattggtaagatcgaactggccaaccacggcaccctgtttctggatgagatcggagagctgccgcctcatattcaatctaagctgctgcagctcattcaggaaaagaccatcgagcgggtgtccggcaccaagcgcattgagttggatttccgtctgttggtggccactaaccgcaatctggaggaggaggtgcagcgggggctgttccgttcggaccttttctaccggctgaacgtcatccgggtccacattccccctctgcggcagcgccctgaggatatcctgcctatggcgcatcagtttttggagcggttctgcaaggaatacggcaagcagctggcgttaagtccccggtttgtggcctttctggagcaatatccctggcccggcaatgtgcgtcagctggaaaacctgatggaacggctggtcatcaccgcccagaatccgattttggacattacggccctgccgctggaatacaacagcggcggcagcgcaccggacctcccctctcaggaggggactctggcggagcggatggatgccttcgagggacagatcatccgggattcctaccgccgctgcggcaccacggtggctgtggcgaaggaactgggcatctctcaggccaccgctgtccggaaaatcgccaaatatgtgaaggaccggaaggaatgaagctgttatgaatctcatttctttaaaaacagaactgcggcaggagctgaagctgacgccgcagctactgcaatccatggaagtcttgcagatgaattctcaggagttgctggactatctggggaatctctccgaggagaatcccaccttggaactttcggaggcctcggagcttcgctctgcctatgcggagctgcggcagaaagccagttggctggacgcggggacctttgggacctcctttgcccatgaggaggatgccccaccggagccgggagcgactgataaggagctggacagcctgtctgcgtttctctgcgatcagttggaacggaaacgactgccgaagcccatgctggccctgtgtaaatatatggcggagctggtggacgaggacggatatctgacgcaggaggatctggacggcctgacagaaatgaagatcccccagacgatggtagatcaggcactggatacgattcagtccttggagcctgccggtgtgggcgcccgggatctgtcggagtgtctggtgcttcagctgagccgccggaaggacaacgttccctacgctatggacattgccgcacggttcctcacggaactgagccgcagccactatgggcccatcaccaaggcccttggggccagtatctctgaaattcaggcggcggagaaggccatcgctgccttggatcctcaccccggtcaggcgtttcagccggcagaaccaaccctctacgtccggccggatgtgttcattgtggagttggaaggggaattgcaggtgctgctgaacgaatactatcttccaaaggtcactgtgaacccttattacagcagtatggccaaggagagtgacgatccggaggcccgcacttatttaaaggagaagctgcggcagaccaaatggctgctggacagtctggaacgccggggcagcaccctgcgccgctgcgcgcaggccattctggacgtgcagagaccattcttttccgggcagactgcggaactgtcacctatgaagctgtcctctctggcggaaacgctggacctgcacccttccaccgtttcccgtgccgtgcgggataaatacctgcaatgccgtcagggaatctatccgctgcgatactttttcagtcgggcggtgggacagcaggggctgtcccgtcaggcggtgaaacagcggatgctgcttcgcttcaaggatgaggattccggccatcctctcagcgatcaggcactttgcgacctgctggcggcggaggggattttcctggcccgccgcaccgtggcaaaataccggattgagctggggatcggttcctctacggcgcgccgggcccggaaccgtggaaaataaggcatgatgtgttaagaccaaaaggaggaaggccctgagtggcttctactgacaccaatttaaatttataggtatgcgttgatttgacgcatacctctgttttttgcaatgacgggtgtatgaccggcaagacagcctatgggactgggcacgttttataagagccgtgtaaaacggaaattgaaatggatttgcattgcgtaaggcgacgtaaaaattttgtaaaaactaaaaacttttcttgcaatcaaggttgtcagtttgtataataggcgtatgaataaaggggtgagctttatggacaatgacggattgacccaatatatgcgaatcgcaatctctgtggctgagcggatcgcggcgggagaactgcgggaaggggaaaaaatctccggtcggtccaagctctcatcggaatacgaggtgtcgccggagactgtccggcgggccatccagcttctcagtgatatgcgggtggtggcggtgaaggagcagagcggcgtatatgtactctctgcggacaatgccaagcgctatctgagaaactttgagaaccgggcggatctgatgagcaaacgccggaaactgcgggaactgatcgagaaaaaggaggcgctgaaccgccgcatgggggagctgtgccagagtattctggaggatactctttatcctgttcaaccggcggagacgctgcctacgtttagctgccgggtgccagatggctggtacggcatcggaaaaaatttgggtgacctgcgattctggcaggctaccggcgctacggtggctgccatccgccggggcaccacggatattctttcccccggcccctacgcggagctgtacgccggggataccgttatttttgtgggcgaaaagaaagcgaaggaggcggtggaacgcttcctgaacacagagcaggaaaccggatccggcaagggtccttaatcggaaaggagcagcctatggttcacaatcaacttcacgcaatcgacctcatcatcatcgcagcctacctgatttccatggttttgatcggcgtggtggtggtcaagaaagttcagagcatggacgactactatctgggcggccggtccttcggtccactggtgctgatggctaccgtgtgcgccaccatcattggcggcagcggccttatgggccgggcgggcgtggcctattccagcggcttcaaggccattatgacggcactgccctatcttctgggtatgtttattttctccggctttgccgggcggatctccgcagtgggcactacgttccatgtgacctcaatcccggacctttttgagcagcgcttcggcaagaccaccaaggtgatcctgggctgtctcattgccttcaccatgatgggcaccgtggcctcccaggtgacggccaccgccaccatcatcaatatgctgggcaatgagatcggaatttcctacgagatgggcgcgctcatcgcctgtgtcgtgtttatagtctatacggccacctccggcctgttcggcgtgatctatacggatgtatttcagtttgtcatgctgattctgtttgtctacattctgattccctcggcgtctctggtcaagctgggcggcttgtccgcctttttggaggggcttgctccggaattagcaaagccctatctggatggcggcatcgtgggcgacatcatcacctatttcgtctttactctggcgggagcggaaatgtggcagcgggccttcgctgccaagagccagaaggcggccaaggaggggctgtttctggggacgctggcctacggccttaccattccgctggtgtggttcatgggcgtggtggcacatcagctggtgtcggcggaaaagctggcccagtacggctctacggacgcggtggttccggctctggccattgagatcctgccggtgggcctgacaggtctggcgctggcgggtattctgtccgtcatcatgtccacggcggacagctacctgatcgtctccgtgcagacctgcgtccacgatatttataaggtcttcaatcccaatatttctgagaaaaaggaactgcggctgacccgcgtgttcgcggtgatcctacccttgggagcgctggtgatcgccctgtacatcaaaaacgcttacagcattctgatgttcgcgtggagcttttacgcggcggcggcaggactgccggcatttgcggcgctgtattggaaaaaggccaccaaggccggcatcatcgccggtatggtggcgggtttcacagtctgtgtaggctggaaactggcgggggtgcccttcggcctcgggcctacggtccccggcgccattgcctgcgctgctgcattggttggagtcagtctggctacctatcggaagacaccgacccccttcctggacccttatcagaacgcggcgggccgctgaatggttgatgccggtatgaaaatctgataccatatcctccggggaagattccccggagaatttttcgctttttacgcgacggaacgcacggatttctcgtctatatgggcagagagacaaaaggaggcgcggctatggacgatacgcagatcattgacctctactgggaccgggatcagggagccattacggctaccgccgggaagtacggcagctttctccatgctctgtcctggaatatcctccgcagccatcacgatgcggaagagtgcgttaacgatacctatttccgggcctggaacgccatgccgcctgagcgaccaggtgcacttcgggcctggctggggcggatcgcccggaacctgtcactggaccgctggaaggcagggcggacccaaagccggggcgcgggtatggagacgctgctgggggaactggacgagtgcatccccgaccatcggggaccggagcaggcggcggaggagcgggttttggcggaatgtgtcagcacgtttctgcggggacagacggcggataaccggtatatcttcctgcggcgctattggtacggcgaggatatcgccgccatcgcaaagcgtctggattgcggcgagagccgggtaaaatctgccctgttccgtacgagaaaggccctgcgggcatttttgggaaaggaggggatcgtggtatgaaagcagagcgattgttccgggccatcggtttggtggatgagggtctgatcgaggcggccgctgagacccctgcgaaaaagcggcccgtctggcggcggtatgcggctgcagcggcctgcttgatggtgctctgcggggcgggagccgtctatctgatcaccggcggatttcgcggctatggggccagtgcggggg

SEQ ID NO: 12261 - DNA, 3667 bp, Unknown
  gut microbiota DNA sequence
ggtgttgcccctgaccacagcagaagaaaaccccggcgtgacggcggaacgccacacggattgggattttaccccccggacagacccggaggggtacgattctcagtggggcgctacggtgacggacagctatgttctccgcaatccaaccgatacggatgtgacgctgaccctgctgtatcccattgcgggcgggatcaaggatctgctttccatagatcccagcgtgacggtgaacggagagaaagcggagacggagttggttatcggcgattacgcgggcggctttggcggtgccggcggcggtgacacttctaccctgaatctgcgatatcccagccaatggacggattatcaggcgcttctggacggcggtgattacagagagacggttaccgggacgcaaataccggcggatatgccggtcacggtctatacctttacggattttgaagcgcccacggagcaatatcaggcggctacccaggcggtgacgtttacggcagatgaaacccgtaccacggtactgtcctacggctttgaggggtacggctgggatgaacgcaccggagagatcacttacagctattttgtacctgacggtcagcggcggagtaaaaccgacaagaagctgatcgtgatcgggacggacctgacgggctatacattacaaggctatcaggatggcggctgcgattccggcgaggagatagagggtgtttcctgcaccgttactcggagtgcgaccacgcttcatgagacgctgctgaccctgtgccgggagatccttgacacaatggaagaaaatcccggctattacggctggctcagcgaggcggcggagattttgaacccggaaacttattgcttgctggcggagcgggcgttggagcaatacggcctgttgtcggataaaccggtggaccgttatgacagcggacggctggatgagctgatggacgaggtgctgtctgtggatcgggtactgtatctgaaaacggaggttaccgttccgactggcggtacggcggaggtcacggcgcagtactggaaggcccccagcttcgactttgcctgctccggttcggaccgccggaacttgcagggatatgatctgatgaccacgctggattccacgctgaccttcacggctcagacggcctccgttacccatgcagaaaacgtccaaatcacaggtcagaacttcggctttgatccggaaaacggcgttacggaggtgacgtggacttgaaccagccccattactatttggaaattcaaccgattcgtaaagagacggattgacagttgggatgaacaggaggcacagcgtcagcgctgtgcctcctgcgttcatctgttatttttcgtagaatttgatcagagcctgattgcccagatcaccgcagccccggtcgatcagggattgacagttggaaagcgcctgctgcaaaacattcagatccagcccggcgttttctgcttcctcttccgcaaggcgcatatctttcacaaagtgcttcatgaagaagccgggggcaaagtcacctgtcaggatcttcttgccctgaaagtccagctgcttgctgccagcggctccggtggatacggcgcccagcaaagtattcccgtctaacccctccgccttggcgtaggtcagagcctcacacacgccggaaagcgccccggcgatcatgatctgattggccattttggcgtgttggccgcagcctgcgggaccgaaataggtgatgttagtgcccattgcctggaaaatggggaggcaagcgtcgaaatctgcctgatcgccgcctaccagaatggaaagcgttccagcacgggccccgctgtcaccgccggtgacgggggcgtccagcactcgcagtctccgggcggcgccctcttggtagatccgctgggccagggtggggctggtggtggtcatgtcgatgagcgtcatacccttggcggcgctgtccagaatattgccgggggcaaagtagacctcctccacatccttggggaagcccaccatggtgatgaccacctcgctggcctttacgcactccgcaatgctgccgtggggtacggcaccctcggataccacgtctgccactttttccgggtgacgggcataaatgtggaccttgtagcccgctttcatcaggttccgcaccatggctttccccatgatgcctacgccgatccagctgattctccgcatattgatccctcctgtgtcatttttttcagcatggcacatttaaagaggggtgtcaagagaaacaactgtccttgttgtaaatacacataaaattagtaggaaaagcgcggaaaatttgacatctgaaatcttgacggatgaactgcgcggggctataatcagtccatcaatttcggagcgggccaacgcttcggccatattgaaaatgcgtggatcgagacaagtaccgtggccaaacggtcacagcgagccggggacagtggaagcccggtacaacggggcggcgggaataacactcaggagcagcgatctgaacggcggcagcccagtaggagagacgcggtgtgcggcgttaaagcacaggggtttgttggaaccccgcaaaggggctgattttcaatcagcaagttaggtggcaccacggatgcggcagcgattcgtcctaaaattttaggatcgttcgctgcttttttgtattcggaggtgttttttatgtgcgcaattatgggattttccacgaagaaactggacaagcatgagatttgggagtatttcgaccggaccctctcccgggggcctgatatgtcccggctcatggacaccggctccggctggctgtgcttccaccggctggccatcatgggcctgactgaggctggcatgcagccctttgagctggacggcgacatggtggtctgcaacggcgagctgtacggcttccgccccctgaagcggcagctgacggagaagggctacgaattcaagagcggcagcgactgcgagatcattctgccgttgtaccgggaatacggcctttctatgtttgccaagctggacgcggagtttgccatgatcatctatgaccacaagacggattccctcatcgccgcccgggaccccatcggcatccggccgctgttctacggctatctggatgacggtggcatcgtgttcgccagcgaggccaagaaccttatcggcctctgcaaggaggtctgtcccttcccgccggggcattattacgcagacggcaagtttgtccgctacgccgacctgaccaccgttacggagtattgccatgacgatctggaaaccgtctgccgcaccatccgcaacaagctgatcgccggtgtggataagcggctggacgccgacgctccgttgggtttcctgctctccggcggcctggattcctctctggtgtgcgccatcagcgcactggtgctgggaaagaagatccgcaccttcgccattggcatggacaaggatgccattgatctgaaatacgccagagaagtggcggattacatcggcgcggatcacaccgaggtgtatatgacccgccagcaggtgctggatacactggaagaggtgatctccctgctggggacctatgacatcaccaccatccgggccagcatgggtatgtacctctgctgcaag

SEQ ID NO: 12262 - DNA, 2430 bp, Unknown
  gut microbiota DNA sequence
tgctgagctgccggggagttgatctccccggcagcttttttgcggtcagcagaaggttggattcccgcagaaaaatgcccgaaggagatgttccttcgggcattgcgtgtattcggcagaaatcagctgctttttcccagatacgcttccttcacccggctgtccgccagcagctccgagccggtgccggacatggtgatggtgccggtctccagcacataggcgaggtccgcgatcttcagggccatgttggcgttctgttccaccagcagcaccgtgacgccctgccggttgatctcccggatgatggagaagatgtcctgcaccaccagcggggccaggcccagagacggttcatccagcatcatcagcttggggcgggacatgagggcacggcccacggccagcatctgctgctcgccgccggagagggtgcccgccagctgccagctccgttcctccagacggggaaacaggctgtacacccactggatgtctttttcaatctccgccttgtcccggcgcagataggccccgatcttcagattttccagcaccgtcatatccgggaagacccggcggccctccggactcatggcgatgccggtggagatgatcttgtcgatggacttgcccagcagctcctgcccgtcccactggacggagccgccggaggcctttaccagtccggtgatggtccgcagggtggtggatttgcctgcgccgttggcaccgatcagcgtcacgatcctgccgtccggtacttccagagaaatgccccggagggcctgaatgccgccgtagtggacctggaggttttcaattttaagcatcgtcagccacccccagatacgcgtcgatgacgcgctgatttttttggatctccgccggtgtgccgtgggcgatcagcttgccgaaatccagcacatagatgcggtcggaaatgcccatgaccagattcatgtggtgctcgatgaggaggatcgtgatcttgaatttttcccggatctccccgataaaggctgtcagctcctccgtttcctgagggttcatgccggcggccggctcatccagaagcagcagcttcggctccgccgccagtgcccgggcgatctccagccgccgctgcttgccgtagggcaggctggtggccaactcgttcttcacatcggacaaccctacgatctccagcagctcctccacctgcgcccactgggccgtctcctccttccggttcagccggaacgcggcggaaaacacgctgctggtggagcggcaatgcttggcgatgagcacattgtcgaacaccgtctgggtcttccacaaacggatgttctggaaggttcgggccatgcccgcccgggtgatcttatccggggtaggggagagagtctccgtgtaaagtccatcgcactggcccttgtactgctttttcattttgccctgggggtggttttcgatgatcttcgccccatcgaaccacaccgcgccgttggtgggctggtacacgccggtaatgacattgaaggcggtggtctttcccgcgccgttgggtccgatgagggccacgatctccccctcgttgacctccagctccagatcgtccacagccacaacgccgccgaactgcatggtgatgtgatccagtctcaaaagctgctcactcatggctgtaccgcctccttcttcgcttttttctgccgctttttcaggagatccggcagctctttatctcccatgatgcccttccggaagaacagcaccaccaccatgatgatgacggagaacaccaccatccggaagccggtgcgcaggaaggggaccttgaagctgccgatgtaggtctcggcgtccagaaaccgcagccaccattcgctggccgccacatacagaaatgccgcgatgcagctgccggagatggagccgataccgccgatgaccacgatcagcaggatctcgtaggtcatggccgtggtgaacaccttggcctgcgcctgattggcgaacatggcgaacaggccgccgcccaccccggcgaaaaacgagctgatgcagaaggccagccgcttgtggcgggccagattgatgcccatggcctctgccgccacctcatcatcccggatggccttgaaggcccggccgtaggtggagttgatcagcagtacgatcaccgccacgcacacccccgccagcagaaacggtacgaaggtggacagccgcaggattaccttgccgtcggcattctggatattgaagctggagaaggtggggaagttattcaaggcgttggcgccgttggtcacggggccgagggggtcccactggaaaatggcccggatgatctccgcgaagcccaaagtggcaatggccagatagtcggatttcagacgcagcaccggcaggccgatgagccacgccaccgctgccgcc

SEQ ID NO: 12263 - DNA, 22464 bp, Unknown
  gut microbiota DNA sequence
ctacctcaccagcatccactttgtactcaatatctgccgaagattttgcggacacagccgggaccatcgtcatgaccatgatcatagtcagcaggaaggccggaagccgttttctgaaaaaccgtctcataaaaaacctcctaaattcagtttaacatccatgtatacttctataaacctaccatagcggaaagtcactttgcaatcatgaacaaattgtgaacaagatgctacaatccggttaaaatttatcgctgcgaacagccggaattttttacaccacagcgggcatttccttctcgtgaaacagtccttcaagccgggcccgcttttcatgccgcgccgcccttccccagccgcggaaaaggggtttgtattttgaggaaatatctgctataataaaggtcaaccttagaaaacttggtggccggacgctgctgcgggccgtgtgccccggcgaacacgcccggagaaattccgggccgcagcttgggacgataggaagtaatgcgatgatcgatcaatatggccggacaattgattatctgcggctgtcggtaacggatctttgcaattaccgatgccaatactgtatgccggcggagggcgtggaaaaaggcccccacggctccgttctctccgtggaggagtgcggggaaatcgcccaggcagcagtacgctgcggcgtgcggaaaatccgcatcaccggcggcgagccgctggtgcgccgtgggattctggacatctgccgcaccctgcgggccattccggagttggaggagctgtgcctcaccaccaacggcagcctgctgccggaattggcaaagcccctgcaggaagccggagtggatcggctgaacatcagtctggacaccctgcggacggagcgattccgggaaatcacccgccggggagatctggaggacgcctttgcgggcatccgggcagcggaggacgccggatttcagaatctgaagctggacaccgtgctgatgggcggcgtgaacgatgacgagatcgaggattttctgagcctgacaaaagagtacccctgggaggtgcggttcattgaactgatgcctatggggccgtgtgcggcatggccaaaggaacgctttctgccggtaacggagattctgaaccgattcccggcgctggaagaaatcgaacccaatggcgtggcccggcggtaccgtctgccgggagccatggggactgtggggctgatcacccccatgagccacgagttctgtggagcgtgccgccgcatccgggtaacggcggacggcaagctgaagggctgtctccacagccgggaggaaatctccctccggggacttcacggcagggaattggaggacgccatcctccggggcatcctgcaaaagcccaaggggcaccacctgacagagcatgccagcgatacgccccggaccatgaatgagatcggaggctgaaccatgggagaactgacccatttcaacgaacagggccgcgcccggatggtggatgtaacggaaaaggctgtgacccaccggcgggcggtggcggcgggggagatccgcgtatcaccggaaactatggtccatatcaaaaacggcaccctgaaaaagggagacgtgctggcggtggcccaggtggcgggcatccaggccgccaagcacaactgggagctgatccccatgtgccaccctctgcccctgacaggtatcgacatcacgttccatctgtcggaccagccctgcatggtggaaattcgggccgccgtcacctgcaccggcgtcaccggcgtagagatggaggccctgaccgccgtttctgtggcggccctcaccgtttacgatatgtgcaaggcggtgcagaaggatatggagatcaccaacatccgcctgctggaaaaatccggcggcaaaagcggagactataagcgagaggactgatagaaccatggcaaaggtcgtatccgtcaatatcagcgagaaaaagggaacactgaaaaagcccgttccggaaattaaattgaagctgcgccacggcatcgtgggggacgcccacgccggggactggcaccgccagatttctctattggcggaggaaagcatcgacaccatgcgcccccgctcccccatcgctctggaccccggcgtattcgcggagaatatcaatacagagggcatcgacctcaagcacctgccggtgggcacccatctgcgcatcggagagacggaggtgggggtcacccagattggcaaggaatgccacagcgactgcgccatcaaaaaggcggtaggcaagtgcgtcatgcccacggagggcatcttcgccgtggtggtaaaagagggcgttgtcaggcccggagacgaaattgaggtgctgaagtgaagctgatccgaacagaggaggccgtgggccacgtgctgtgccacgatatgacccagatcatcaaggatcaatataaggacgcccggttccgcaagggccacatcgtcacagaggacgatattcccgtgctgctgagcatgggcaaggagaacctgtatgtctgggagatgactccgggcatggtccacgaaaacgatgcggcggagcggctgctggccctgtgcggtcaggagaacatgctccgcagcgagacgaaagagggcaagatcgagctgaccgccgcctgcgacggcctgttccgggtggacagccgccggctggtggcagtcaattcgctggaggagatcatgatcgccacccgtcacggcaataccgccgtgaaaaagggcgacaagctggcgggtatgcgggtcatccccctcatcatcaaggaggaaacgctgcaagccgccgagcaggcggcgggcgccggccctctattggagctgctgccctatgtgaagaaaaccgccgctatcgtggccaccggcagcgaggtgaagaagggtctcattcaggacaccttcaccccggtggtgaaggagaagctggcggcctacggtatcgaaaccatcttcatcacatattccggcgacggcgtggacaacgtggcgggcgccatttcggaagcccggaacaccggtgcggacatgatcctctgcaccggcggcatgagcgtggacccggacgacaacacccccggcggcatccaggcaagcggcgcacggatcgtcacttacggtgcgcccgtgctgccgggtgccatgttcctgctggggtattttgaggccggtacgcctatctgcggcctgcccggctgtgtgatgtatgccggggccaccattttcgacctggcgctcccccggatcgccgcaggcgtggaactgacccgcagagacttcgccgtgatgggcgagggcgggctgtgccttggctgcaagccctgtcactggcccaactgccccttcggaaaataaaagcgagagcgcccaagcgcgcttctgcttttccgaaccgttcatcttgattgagtatcacgctttactctgtaaagtcgagatagattttccatcgaatcagaaaggaagaaccaacatgaaaaagtgtttgtctctgctgctggccctgtgcctgaccctgtccctcgccgcctgcggctccaaggccgacaccagtgccgacgccgctgacggttctcagacgcaggacaacgcccccgcggaagcccccgccggtgagccggtggagctgatcgtgttcgccgccgcctccatgacggagaccatgaaccagctcaaggaaatgtacgagcagaacaaccccagcgtgaccattacatataacttcgactcctccggcaccctgctcaagcagatcaaggagggcgcggactgcgacctgttcatctccgccgctccccagcagatgaacgccatggacggcagcctcattggtgatacggagaagaatcccgacagccttgacctcatcgtcaccgacagccgtgtaaacctgctggaaaacaaggtgacgctcactgttcccgccggcaatcccaagggcattgagagctttgaccagcttgccgagttgctgaagggcggcgaggtgatgctggccatcggcaacagcgacgtgcccgtgggccagtacactctgaagatcttcaactactatggcattgacgagaccgccgttgcggataagctgacctacggcaacaacgtgaaggaggttgcctctcaggtcagtgagggcgctgtggactgcggcatcatctatgccaccgatgcccactccgccggtctgacggtggtggacagtgccactgccgaaatgtgcggtcaggtcatctaccccgccaccgtactcaagggggacaaggaggatgccgcccaggacttcctggcctatctccagaccgacgcggccatgaccgtgtttgagtccgtgggcttctccgccgcttgaccgagaattttttctgaaaaggccgacgataaatcgcttgcccgccgctgatacggcggcgggccgtcggtcctccatcccttccccctcaggaggtaacttatggatctgtttcccctatggaactcgctgcgcgttgcggctatttccacggtgatcgtctttttcgccggggtcttcgcggcgtactatattgcccgcctgccccggctggtgaagggcgttctggacgtggtgctgacgctgccgctggtgctgccccccaccgtcatcggctatctgctgctgcggctgctggggccaaagcggatcctcggcgcgtggctgctgcgtcatttcggtgtaaaggtggtgatgacctggtggtctgccatcttcgccaccgccgtggtgatcttcccggtgatgtaccgcaccgcccgcggagctttcgaatcctttgacgagacgctggcctactccggacagacactgggcctttccaacgcctatattttctggcacatccggatgccctgctgccggcagggcatcttagcgggaacggtgctggccttcgcccgggccctgggtgaatacggcgctaccagcatgatcgccgggtacacccccggcaagaccgccaccatctccaccacggtctaccagctttggcagaccagcaatgacgcgctggctatgaaatgggtaatggtcaacctaagcatctccgccgtggtgctgctgacggtgaatatgctggaacgccgggactttctggtatccggcgggaaaaggagggggacggcttgagcctgcttgtggagattgaaaagcagctggggaatttccatctgaacgtccgctttcaggcggagacggaaacgctggccctgctgggggcctccggctgcggcaagagcatgaccctcaaatgcatcgcggggatcatgaccccggatcgggggcggatcgtgctgaacggccgggtgctgtttgacagcgaggccaggattgacctgccgccccagcagcgccgggtggggtatttattccagaattacgccctgttccccaccatgacggtggagagaaacatcctctgcggcatccgctccggttccaaggcggaaaaaaacgctgcactgacggcgaccctccaccgctttcggctggagggtctggaaaagcggtatcccgcccagctttccggcggacagcagcagcgggtggcgctggcgaggattctctgctcccagccggaggtcattttgctggacgagccgttttccgcgctggacagctatctgaaatgggacttggagctgaagctgtccgattttctggagaatttctccggaccgattttgtgggtgtcccatgaccggggcgaggtgttccgcaactgcaagcgggtgtgcatactggatcagggggcctcgcaaggaaccttcactctgcggcagctgtttcacgagccagaaacggaggctgccgcccgactctccgggtgtaaaaacatcgtggaggccgtaccggcaggcagcgccgtaacgctgcctgcgtggggcctgacgctgaactgcggtaaaccggtcccggcggatgtccgtcaggcaggcatccgggcaagacacgtgatgacggtgccggagggcaccccggacgccttctactgcacggtggagcgggtcattcaggatgtgttcaccaccatcgtcctgttgcggccggagggggctgcggacggtgcccccctcctgcggatggaactggaacgggacgattggcggcggctgaaccgcccggaggggctttggatcgccgtccagccaagggatattctactattgaaatgaggagatgatcgtatgtatcgtgctgctgtattgacggtcagcgaccgtgtttcccggggcgagcgccccgacgagggcggcccgctggtggcggagctgctgaaaaacgcaggctatgaggtggttcggaccgatgtggtgccggacgagcaggtgcagatcgaagcggcgctgcggcagatgtccgacggcggcgacattcaactgcttgtgaccaccggcggcaccggcttcgccccacgggacgtgaccccggaggccacccttgccgtgtgcgaccggctaacccccggcatcccggaggccatgcgctatgcctccatgcagatcaccagccgtgccatgctgtcccgggcgcaggcgggcatccggaaagggaccttgatcctaaacctccccggctcccccaaggcggctaaggagaatctggaggcggtgctgcccaccatcggtcacggtctggaaatgctctccggccgccccgccgattgcgccaagctgacggactgacgcggaaatttctttcgtaatcggctgtccttcccccgcaagcaaaaaatcggcacctgcttttggcaggtgccgatttctgttaccctataatgcacttgaatttttggcgtaagtttggcgtaaatccgcttttgcccactcaaaaaatcaagcgatttcaaggctttgcggggacggcttagtacatgccgcccatgctggggtcagcggcgggagcgggagcggggggttcgggcttgtcggccaccagggactcggtggtcagcaccatggcggagacggaagcggcgttctccagagcggagcgggtcaccttggcgggatcgatgataccggcggcgaccatgtcgcagtactcctccttgtaagcgtcgaagccgtagcccagcttgccggaattgcggaccttctccaggatcacggagccgtccaggccggcgttggcagcgatctggcggataggagcttccagagccttggcgatgatgcggacaccggtcttctcgtcgccgtccacgctgtccagcagagcttccacagcggggatgatgttcacgaagatggtaccgccgccggcgaccacgccttcctcaacagcggcgcgggtggcgttcagagcgtcctcaatgcggagcttcttctccttcatctcggtctcggtagcagcgcccaccttgatgacagccacaccgccggccatcttggccagacgctcctgcagcttctccttatcgtagtcgctggtggtgttggcgatctggctgcggatctgagccacgcggtccttgatggcggtggcatcaccggcgccgtccacgatggtggtgttctccttggtgaccttcacctgacgggcacggcccagcatgtcgatggtggcggtcttcagttccaggcccacttcctcgctgacaacggtaccgccggtgaggacagcgatgtcctgcagcatctccttgcggcggtcgccgaagccgggagccttgacgcacaccacgttcagggtaccgcgcagacggttcacgatcagggtgttcagagcctcgccctcaacgtcctcagcgatgatgaccagcttcttgccggactggaccagctgctccagaatgggcaggatgtcggagatcacggagattttcttatcggtgatgaggatataggcgtcatcaatgacagcctccatcttctcagtatcggtaaccatatagggagtgatatagccgcggtcgaactgcatgccctccacgacctcgctgtaagtctcagcggtcttggactcctcaatggtgatcacgccgtcggcggaaaccttctccatggcgtcggcaatcagcttgccgatctcctcgtcaccgctggagacagcgcccacacgggcgatatcgctggagccgttgaccttcttggcctgcttctttacctcggctacggcggcttccacagccttggacatgcccttcttcacaacgatggggttggcaccggcggccagattcttcagaccctcgtggatcatggcctgagccagcagggtagcggtggtggtgccgtcaccggcaacatcgttggtcttggtggaaacctccttcaccagctgagcgcccatgttctcaaagggatcgggcagctccacttccttggcgatgctgacgccgtcattggtgatgaggggagcgccgtacttcttatccagaaccacgttgcggcccttggggcccagggtgatcttaacagtatcggccagctgatcaacgccggcctgcagagccttgcgggcttcatcgccgcgcataatgagcttagacataattcatacctccgaatttttcttaaagtgggggactgcgtcccccctttgcccgtaaagggcacaccgcatccgtaaagcagcaaagctgctaacggctgcgcagtagattccccctcgccagtttgtgaactggcgacgccgtccaggacggctggggtcaaggaatttttgccacgcacatgtcgcggcaaaaatcaattcaagcattttgtcaggacacatgccccaccgttccttcgtccccttccggcgcaaaccagcgaagcgtttgtgtcggaaaaacgaggagcagcggaacgagcgagctttggccgcaaggccgaagcgagggatgtgcagcttgtgacgagttactcgacgatggccaggatatcgttctgacggacaactacgtactccacgtcctccaaggtcaccttggtgccggcatactggctggtgatgaccttatcgccgggcttcacggtcatggtgacttccttgccgtctaccatgccgccggggcccacggaaatgacctcagccacggagggcttctcctttgcggagccggtgaggatgatgccgcccttggtggtctcctcggtctctaccattttcaggatcacacgatcagctaacggggtaagtttcatgttgggttcctccttgtatattttcatatgataaacaatttcagcgttagcactcagtctccttgagtgctaacgctgttatcatagtacaactgtcccggtttgtaaaggggtaatttgtaaataagttatgaagtttccattggggaaaatcgtcggttcccgccctcacttgggaccggcaccgtaattgggatcacagcccttgggtccgaagaaattcaaccttttttccgacaaagtcagacgcacatcccggctgtggatggtctccccgtccagacaggtcacaatgtcatcttccgactgaatgcggacgtttttggcagtcaccacccggatcacctccggcggcagcgagcggtagcggccatcggaataggcgccgaacaatccagcgaatttcaggcggctgatatttttcaccagaacggtgtttagaatcccgtcgtccattcgggcctccggcaccggggtagagccgccgccgtagtaccggccgttgcacatggatacaagggcaaagtcgtcttcgatcacctcatcgtccagcgtcacggtccagtgctggccaataccccggaacaggaaattcaccgccacggcggccagatagctgccccgtccgctaaggaggggggaatcccccagctcatggacgctctccgccacccgggcatcaatgccgctgcaggcaatggtcagacattggcggccgttgcagtcgataaggtccagaggatggacctccccgtcccagaggttttccgcgtccgtaaacttggcggcgtccggaccgaagtttttcaggaaatcattaccggtcccgatggggatgcaggtcacagccgcattgtcaaagcctgccgcaccgttgaccacctcgttcagagtgccgtccccgccgcaggcgtaaagccggacctcctccccggaggacaccagccgtcgggcgatctcctccgcgccgccggaccgctgggtcagcagacattggcaagtcaggccatgctgccgcagacggtccgccatttcataaatgcggcccgtctggtcctttttcccggcatgggggttaatgatgaagatatgctgcacgggtgaccactcccctttcaactgaaaccgtcaaattctgattacaaattgtcatttttgcccgcatgattgctttttgtataaaattctccggtcatcttccgtacataaaggcgtcgcacttgatcatgttccccacaaaatctttgattttgcggggccccggatcttacctgaccggtcaggcaaagcccgcccggtccaaggttttgtctgcggcaaaacgcttgcgcgccgttgacgcggcgtcggcgcgctgcgccgttacggcatgatctccggtcatcttccgtacatgaaggcgtcgcacttgatcatgccgttgtagagcttgcgctttttgtcggcgggtcggccgaagcaccgctcaaattccgtgtgggagctgagcaccagcacccgccacttgggaggcagatcccggagggctgcgccgaacattcgatacagatcctcggcctccttcttttccagcagccgttcgccgtagggcgggttggtcaccagctgaccgtattcgctgtcccggtggaattttcccgcatctgccacttcaaagcggatgcagtcctccacaccggccagctccgcattgtgccgcgccagctccacagcggcggggtcgatgtcgccgccccagatatcataatggccgtggaattccttatccatggcctcgtcaccggcctccagccacagcttggagtccatgtttttccaccgctgggcggcgaagctgcggtccaggccgggggcccggtttttggcgatgagggctgcctcaatgggaatggtgccgctgccgcagaaggggtcgcagaagggatcctttccccggtaacgggagagggtcaccagcgctgccgccagcgtttcccgcagaggggcgcccatgttctgggcccggtagccccgcttgtacagcccctcgccggaggtgtccagatacaaggtcgctacatccttgatgatggaaaactggatctgataccggctgccggactccggcagggtctccacgccgtacttctcccccagccgcttagcggacgcctttttcacgatggactggcaggcggggaccgaatgaagctgagagttcagggaatagccctttactgggaattcgccgtcccgtgggatatagtcctcccagggcagggcgtagaccccctgaaacagtgcctcaaaatcacgggccgggaaggagccaagctccatcagcacccgcgcaccgcagcggaggttgatgttcagccgggcaatgtcagccaaagttccttcacagtggactcggccgttttccgcccggacattttttaagtccagacggcgcatctcgtccgccaccagactttccaaaccaaacagacagggaaccgtcagtgtcatggtccatgtctcctttcaactttcaaaactatattagggtcagtataacagactgtccgctgatccgcaaccggaaaccgtgctcccaccgcaaattggaagtggtttttcgccggaaactgtgctatactgcaagcagaaatggattttgcaaaaaaggagggttctttgatgatgaactggatctggctgggggctgtggtggccttcggcgttttggaggccgctaccgcggcattggtatccatttggtttgtaggcggtgcggcggtggctctgctggcgtcctttttaggtgcggcgctgtggcttcagattgccctgtttctggcggtctccgtgggtattctggcggcggtccggcccctgatgaagcgagccaacgcaaaaaccgtccccacgaatctggaccgggtcatcggctgtactgcccgggtaacagaggaaatcgacaacgaggccggcaccggggccgtgtatgtagagggcaagacctggaccgcccgcagcagcgacggcacggtgctgcccatcgggacccgcgtgatcgcggagcggatggagggcgtcaagctctatgtgaagccggagccggtaagctccacgcggcagaactgaccgcttaactgaataaaaccccctgcgaggaagcggctatgccgtttcccgcagggggtttttatcttctatcttcggatggatgccccatcgcgcactcggaagatttttgttttgatccgtcccggtgcaagaggttccattcaatttcgatttgacagagtccctgtaagcacccggccaaagcagatcagcgtcccggcctccgctgcaggcaaggtcacatccccatccgcacggcggcggttcaaagaaaacaaatgtaccgtaccggaatcgtcccggtcatactgccggcaaaggaccttgccgttcacgctgaaaatacctacatctccctctcgcagaggcgtgcggctcacatacgccaccgcgccgtcctccagatagggggccatagcgtccccgctgatgcggacggcaaattccgccgtctgcggcacttgctctgtgacggagatctcatcaaaatcctctcccggtactgcggaaacacagcctaccgccgccagcgtgtggtacagggggatgatcctgccctcgggccgctccgccgggagcggggacgtctcctgtcggcaggcccacagcgcttcggtcacagactgcaccgtttcacgtcccaatggagaaagctcccggaatttccgcagcaaagtctgttcttccgaactcagcgtctgtccgcctccccggaagctgtcccgaaacagttgattgggatctgtctccaaactgtcaaacagccgcagcatcacatcttcctttggaaagctcagaccgttttcatagttgctcactgccgagggggacactcccagccgccccgccagttccccacgggacagcttcagctccccacgccggaatttaattcgttcgccaaaactcatggaaaaaaactcctttcgttctgttcctcgacaactctcgacacaggtgtcttaatcataacgaaaaaaagtgttgctgtcaatccattttaacaagtttcttgtaaaattattcttgacttagcaaaattcttgtgataatgttacctagttgacagggaacttgtcctggcgataagcaaaagccacatgggaaggagggcagcaagcagacgggccgcaggctgttccatgcaagtcatccggttccgctttctccggtccacccgctgaaaccgtgcggcgaatactgcgggcagaaaaaaatcgagcgcagacaaagtctgcgttcgattggtgggggaaggtggattcgaaccaccgaagtcagtgacaacagatttacagtctgccccatttggccgctctggaattcccccatatgaaattgtggagctggtggacggattcgaacccccgacctgctgattacaaatcagctgctctaccagctgagctacaccagcagttcccaacagcaaggattatcttagcagaacatatccaatttgtcaacaactttttttcattttcgtatttctttttaggagggatctgtttgagcacaaaaaagcgctccgtttccgccgtggtacgctgttccatttgtgggcgggaaatcgcgtcaggagaggaatactgggtctgcaacggcaccttggcctgcaccgactgtctacctgacctggcccggcaggagctcctgccctgccgggtgctccggggaaaggaggacagactatgacgctgttggaaatgtctgttgtttacgcggaacacgccgccgtgatccgaagtcggatcgtggagcttcgcggtctgacccggcaggaaacggacccggaagccgtccaggccctcaaacgccgggtggcggcgctgctgcccctgtggcaggaggcccgggatctggccagactcaccgctcattattacgactatgataaggaggctcaccgatgaatcagatcagtctggacgccaagggcggtcaatttctggcagatctggccaactggcagcgggaaagcgccccggataactctgcggacctggagcggctgcgccggaatctgcgctttgcccgccagcaggtgctcacgaagcggcagcagcagatgctggagctttactacgatcagggactcaccatggggcagatcgccgccaagctccatctgaaccgctccaccgtctgccgcacacttcagcgggccagagaacggctttatgcgtgtctgcgttataccttataaggacagttcagttaatcttataggcggtccgtcttgcggtccgggagaaaagcccgtataataggggcagaatcgttgattttacatcatacgcgcccgcgcttataaaatctggttgaaaaggagaccgcgatggatatgaaaccgatcattgtcatggccggaacaccggtagatacccagatgggcatggactgcctcagcacacagggattgcccggcgtcttttgcccgatatcagaggaccccaaccagcagacggctttccagatctcctccacggaggaaaagattgacaccgtagtctcccttctgtgcgcggcgcagcgggagcatggctgcgaaaaagccttcatttactgcaattctctttccggcgcgctggatttccagttcgttgcccgggaaaccggcttgaagatcgtcacgccgctggacgtttaccggctgctggcgcctaaatatcactctctggccgtgatcgccgccaacgctcagggcaccgccggaatcgagcggaccctgctcagtgccaacccggacctgaccctgcgctctaccggacttctgcctgtggtgttggggatcgaggccggagaggaccccgatacgctggtgaaacagaaccgtctgccggagctggtgaactggtatcaggcgttgggtgcagaagcgctggtgcttggctgcacccacttcccctatttcaaagaggctctcctccgacagatcaccctgccggtcattgaccccgcagaggaaatgctccgcctgctgaatacctgaatgaagaaaacaccccgtcagccgcaatgcggctgacggggttcactttactttcagcaggggttgctgaacagctcccggcaatgctccgccagcagcgccgccgtccgttcaatccccaaccgtgcgctgttgatgcagatgtcgtaattctccggcaggccccaggggcggccggtataatgcgtataatacttctcccgctgggcgtcggtcttttccaccagtgcccgggcggccttttcgtccagattttccagttccatccggtgatggacccgccactcaaagggagcgcagataaacaggctcaggcaatccacatcctgccccgtcagcacaagatccgcgcagcggcccacgatgaggcagtcctccttctccgccagttcccggatgatctcgctctgcatctgaaagagcacatcctccgccgactgcccctgcttgaccttggggccgccctgatagaaggccttgaacagccaggggttgccggccttttcatccttatcggcgaatagctcctcccctacctcggcccgctccgccgccagcttcagcagttcccggtcatagtaggcaaaccccagagactcactgagcttccgtccgatctcgcggccgccgctgccaaactgtcggcccaatgcgatcacatgctttttcataggaacacaccctcctcgttttctatgcgtatacagcggcaggagccttcagccgaagggccacgccgcgaatatagtcctgaaacatcatatcgatccgccgggtcagctcctccggtgtctgggtcaactctccccggagccagctctccaccgcccctgccatcataatggtcaccaggcagatcaccacttccacctccggcgaatgggctggcaggccattttccaccgccgtctgccggacggcccggtccacgatgctgctgacatccgcctccagcagctgtttcaaagattccttgcccagagagtccagcgcgcagaggcagaccgcccgattctgattgatatattggaacagatgcagaaagccgttctgccagggggacacgccctgttgctgctgcaaaagctccagcgcttccttttcaaaggtccagcgcagcagatcgtaaatgtccgtaaaataatagtagaaatgctgccgccgcatcccacaggtatccatgatctccgccacggtgatccgttccagcggcttttgggtcatgagctgcttcagcgcaccgctgatggcctgacaagtggtctcggaggttttatacctttttcccatcttacagccccattccgttaagtcctgttaagagtatagcacaggtcaagggggctgtcattgttcatttacaggcggtttgcatagattttaaaagttttttcaggctccgtccagtcaaaaactggaaaaacgcagaattctgacaaatgaccgaatttgactgttgcaattccaaatgtctgcggatatgatacaagtgatttcatgtgaatgtgctgttgaaacgcgccatagaaaggggactcccatgagcgaccagccaaaaaaaagcaatttttttgaaaaattagccacgtttatcgtggataaacgaaacctgatcttttttctgtacgctatcgccatcatcgccagcctgatcacccagagctgggtaaaggtctgcgacgatctgacccaatatctgccggagaccacggagacccgccgaggcctgactctgatggaggatgagatgaagacctatggcaccgcccggatcatcgtgtctcatgtgacgtatgagatcgcacgggatctggcagatcagattgaagatctgaacaacatctcctccgtggacttttgggacgcagacaagtcggcagatgataccaccctgccctccgctgccaacaagacctatgaggattacatgcagggtgccgacgccctcatcaccgtcaccttccggggcgaaaacgacgaccagtccgccaaggacggtctggccgccgtgaaggaactgctggccccctatgacacttacatctctaccgatgtgggctactccaaatccgaaacattgaatgaggaaatgggcattatcttagtggtggccgcactggtcatcgtgctggtgctgctgctgacctcccgttcctacgccgaggtgccggtgctgttgctgacctttgtggcggcggcgctgctgaacaagggcaccaactttatcttcggcgagatttccttcgtgtccgactctgtgacagtggtgctccagcttgcgttggccatcgactactccatcatcctgcttcaccgctttctggaagagcgggaacacgccccggatgaccggacggcctgcatcatcgctgtcagcgccgccattccctctatctccgccagcagcctgactaccatttccggtctggccgccatgatgttcatgcagttccgcatcggcttcgatctgggtctggtgctcatcaaggccatcctgctgagtatgctggccgtgttcaccctgatgcccggactgctgatgctcttctccaaggcgatggagcggacccgccacaagaacttcatcccccagatcgaccgctggggcaagctggtctatgccctgcgtcatgtgggcgtgcccgtattcatcgtgtgcgtggtgggaggcttcttcctctccaaccagtgcccctatgtgtatggtgacaacgccgtcatgaccgttcgccgcaatgagcatcaggcagcgacggaccgggtggaaaaggaattcggcacccagaatatcatggcactggtggtccccaagggggacaccgccagtgaaaaggccgttttgaaggagctgagcggactggatgaggtggattatgccatgggtctttccaatgtggaggccaagcccggctacttcctcaccgacaagctgacgccccggcagttctcggagatgatgggtctttcctacgaggaagcctgcatcctctacgccgcctatacagcggatcaggaggataactacggccccatcgtgggcggcatcgacagctataccgtatccgccatggatatgatcctctttatctatcaggagaaggaaaagggctatgtgacgctggatgacgaggatgagcgggagatcaatgacgcctatacgcagatcaccgacgcccaggcccagatgctgggccccaactacacccgcatggtcatgaacctgaatctgccggaggaggggaccgacaccttcgccttcctgaaaaccgttcacagcatcgtggagaaatactacgatgccgacgatgtgtacttagtaggcaactccaccagtgactacgatcagtccgtttccttcgccagagacaatgtgatgatcagcgtcctgtccgtggtgttcgtggttctggtgctggtgttcacctttatgtccgtgggtctgcccattctgctgatcttggtcattcagggcagtatctggatcaacttcaccttccccacggtgctgcacaccaacatcttcttcatgagctatctgatcgttacctccatccagatgggcgcgaatatcgactacgccatcgtcatttccacctggtattccgacctcaagacccggatgacccccagagaggccctgatcaaggcgctggatctctccttccccacggtactgacctccggctccatcctgtccgctgcgggcttcctcatcgggcagatcaccacggagccgtccattgtcggcattggccagtgcctcagccggggcacgctgatctccatgttcctggtcatgttcgtcctgcctcagattttggtgctgggtgaccggatcgtggaaaagaccagcttccaggtaaagctccccgcaacgcccatcgcttctcagcgtttctccggcaccacctttgtcaatggccgtgtccggggccggatctccggctttgtggacgcggagatccacggcgtagtcaagggcgatatttccgccatcatgtcctccggcagctatgatctgccggaaggcagcggccaaccgcccgaagcaggggcgtcaccggagaatacaccgaacacgccgcctgcggattctgtcaccggaaaggagggggacgcccaatgaaacgcattcaaaaatggtccgcccttctcatggctgtgaccctgctgtttaccctggccgctcccgccgcgctggcggctgagagcaccgttaccatcaaaaccgccgaggatttggccgaattgtcccggaactgcacgctggatacctggtcccagggcaagaccgtgatcctggagaacgatcttgacctccacagtattgacttcactccgattcccaccttcagcggcacattccaaggtaacggacacaccatctccggcctgacccttaccggcagcggcaacgtccggggcttgttccgctacattcaaaacggcgccaccgttcaggatctgacggtcatgggcaccatccaccccaatgggcatcaggatgaactgggcctgctggccggcagcaacgccgggcggatcttgaactgcatcgcctccggcaccgtcatgggtgataatcgcatcggcggtctggtaggtatcaatgaaaccggcggcgagctggtgggctgtgccttctccggcagcgttaccggcaagcattccaccgccggcgtggtgggcgaaaaccgcgggaccctgacccgctgttccaacagcggcagcatcaacacccacgatctggaagacgatcccaagaccgactatacaaatctggcccagctgaactccatggaaaatgtcccggcttatacggacgtcggcggtgtggcaggctattccaagggcaccatccaaagctgcgaaaacagcggcgcggtgggctacgaccagatcggctataacatcggcggcattgccggccgcagcgccggctggctggatggctgcgtcaacaccggcaccgtcagcggacgaaaggacgtgggcggcatcgtgggccagctggagccggaggtcttgcagaccttcagcgaggatttcctcgacaagctgctggcccagctggatacgcttcaggatatcatggatcgtaccgctaaccacgctgacagcatttccgactccgtccacgcccagatgagcgatctcaccggcaaggtccgggacaccaaggacatcgccaaggaactgaccgatgccatgacggactgggccaacggcaacatcgacgaaatcaatgaactttccgctcggatctctcaggcgctggacgatctggcagacattctggatgacactggcagtgcactggatgcattggacgctctgctggatacgctggaaaaagttcggaaggatctgaccggcggcaatgacgcggcagaggattttcagaaagcccttaccaatctgcgggatgcccgggacgctgcccgggagacccataaggcagtcacatcagcagcaaaagatgttctggatgccatcatcagcggtaaggatcctcaggaagctctggatcatctgaaggacgtactggggaattacagcaccgccctccggttggctggcaccgctctggagcagatgcggcaggcgctgaacgctctgcccgcagatatttcccggctgaaaaaagcgctggaggatctgggggatgtggagaacgccgcccacaaggccctgaaccgactggatcaggtggtccgcggtctggaagaactgacgcggaagcaggctgacaagcctgaaatcaaaatagatcccatcggatctgatcttacggaaaaaggcagccagcttcaaaacgccatggatgcccttctggacagcggtgaggccctgaatcagcttctcagcgattccgcagacaccctgatcggtgacattcgtgccatcagcaatcagttccgctccattacgaatctgatccgcagcgaaaaaagcaattggaatcaggaccaaagcaagagcaaggaagatcagatccgggatcatttccaggatttatctgattcctgcgcccccgccaagcagcatgacggccggatctccgcctccgaaaataaaggtgagatcaccggcagcacaaatttaggcggcattgtgggttccgtgggaattgagattgacttcgatcctgacggcgatacgaccaaagtcggcaactattctttggatttccactaccagacccgcgcccttctgaccggctgcaccaacagcggtaccatcaccggtcggaatgactatgccggcggcatcgtgggacaggcgtatatcggtcagctcaccgattgccagagctacggcgccgtctccactgacggcagctatgtcggcggcattgcgggctgctccgacagcagcatccgcctgagctgggccaaatgcgccctttccggtgaggattatgtgggcggcatcgctggttatggcaaaacgatctctgactgccgcagtctcgtcaccgtggacggcggcgcgtacaccggtgctatcgcgggagatgtggacgaggatggctctgtgaccggctgcctgttcacccacgaaacgctgggtgccatcgacggcatcagctacgccgggaaggcagagcccgccgccttcgacgttctctgcgcaggagacactgttcccaagaccttctcccagatggaactgaccttccgggcggacggcaaggtggtagcggtagtccccttccagtacggacgggggatcgacagcctgccggagatcccggcgaaaaagggtttctccgctgtctggcctgatctggactatacccatctcaccgccagtcagacactggatgccgtctacacaccttacacctcctccctgacggatgacacccagacccttccccagatcctggtggatggcagcttcagcagccgggccaccgtcagccacacttcggaacctgtctcctggacagatgcgaagggcactgcccgcaccggcaccgccgttaccgtcacggtggacgatccggatatgaccgctatctcctacacggtccactaccggctcccggaggacggcaagcgctatgacctctgggtcaagacggaaagcggctgggaaaagcaggacagcaccgtggacggcagctatctgctgttcacctccgaccgggaaaccgtcaccttctgtgtgcaggagcggaccgccagt

SEQ ID NO: 12264 - DNA, 34668 bp, Unknown
  gut microbiota DNA sequence
aaggcccgtcagaaaaaatcgtaaatatcataagcaagaaaaaaaccggactgtgcggcgtgcagtccggtttttctcgtctccctctcatggatttcgccaaacggggcatactgttcgcatgactttcagctgggaggcatggtatgaacagcaaacggatcggcaggcgaacagttgcgctccagacaccgccctcagtcctctcctttgccaacatcggcggacggatggagggccagggacctttggccaaatatttcgacgagctgtgcgacgattcctttttcggcgaaaaaacgtgggaaaaggcggaggccaccatgcagcgtcgggttttacggcgggcgttggagcaggcggggctgaagccgggcgatgtggactatgtactggcgggggacctgttgaaccagtgtatcggctcctccttcggtctgcgggaactgggcatcccctttttcggcctgtacggggcctgttccaccatgggagaggcactggcgttggcgtcgctgctcattgacggcggctttgcggaaaccgtcgccgcccaagccagttcccacttctgcaccgccgagcggcagtaccggatgccagtcccctatggcagccagcgctcccctaccgcccagtggaccgccaccgccgccggctgcacccttctctccgcccaagggcctgggccttatatcactcacgtcacctgcgggaaaattgtggatcagggtatcaccgatcccaacaacatgggggctgccatggcccccgccgcctatgacaccctccgggcctactttgccgacacgcacaccggcccggcggattatgatgccattttcaccggggacttaggagagctgggccacgagatcgtaatggacctgtttcggcaagacggcgtggacatgacccgaaactatgaggactgcggcatgctcctctatgaccgggaccgacaggatatgcacgccggcggttccggctgcggctgctccgcggcggtattcaacggctatcttctcaccggcttgaaacagggccgctggcggcgcatcctgttcgcccccaccggggcgctgctatctcccacctccagttttcagggggagtctattcccggcatctgccatctggtgtgcgtcagcacggaaaggtagggcgtatggcatatcttaacgcatttctctgcggcggacttctctgcgccgtgggtcaaattctgatcgaccgcactcggctgacccccgcccgtattctgacgggctatgtggtcgccggcgtgttcctcagtgccgtgggtctgtatcagccattggcagattggggcggagccggggccacggtgcccctgacgggctttggccacgcgctggccaagggcgttgaaaaggcggtggcggagcagggctggctgggtgtcctcactggtggtctgtctgccacagcaggcggcatcaccacagcggtagtctccgccgtggtgatagccctgatcttcaagccgggagacaagcgataagaaaaccgggagcggcacagccactcccggtttttcccgcattgtccgcaaattgtcaccgaattgttcttctttttctgtcaaaaaactgatataatgagacttacatctacgattcgacagaaaggatctggtttctatgcggcgtatcaccacgcttttcttagctcttttactgaccctctccctcaccgcctgcggcggcacggcccagccgaaccctcccgcccagaccggcgatgacgcttctcagacggagacccccgacaccgccccggagcctgccgaggagccggaggaaccccagcaggagccatacgtcatctcctcccccaccgttgaccggggcaccgtggacggcgtgacctatgtaccgtgggacggcgtggtggagcatctgttcttccaccccatcgtggcctacccggagctggcctttgacggcgacagtcaggccgacggcatcgatgactggatggtcacagtggacgaatatgacaaaattctccaaagcgtatatgaccggggctatgtgctggtggacatcaatgacgtatggagcgaaagcaccgacgccaacggccagccggtaatgatccggaacaccctctacatcccggagggcaaaaagcccctgatcttctcctatgatgacgtaaactactatgactatatgctcaaggatggctttacctacaagctgatcctgggaaaggacggcctgctctggagctacggtctggatcctcagggcaacgaggtcatctctcaggatctggacgctgtgaccattctggataagtttgtccgggagcaccctgacttttcccccttcggcgccaagggcagcctcagcctcaccggctatcaggggatcttaggctaccgcaccaacacggacaccaaggtctggaatgatgaattggaggccaaccgtctgaaggaatgtgaggcggtgaagcccatcattgcggagctgaagcgcaccggctggaccttcggcagtcacacctggggccacatcaaccttgcgtcctcctctctggaccgggtgaaggcggacaccaagcgctggatggatgaggtgggcagtctggtaggccccaccaccattctctactatccccacggtgcccggcccgacggggatgatgtccagagcaccggccccattttcaagtatttgcaggagcagggcttccgggtgttcgcctccgtgggcatcagctcctactccaaaatcaaaactgacatctgcgcggtgatctgtgaccggctccacccggatggcaccaccctccggggcagcgacaaggtcatcggctggtacagccagttctacgatgccagagacatcattgacctggacgtgcgccccgaccggggcgtgaaatggacgccgaaatccgcgtcctgaccacgaaaaggaggctttatccatgagtcttgacgaattgaaggctgcggccgtagccatgctggaccgggcctactgcccctattcccatttccccgtgggcgccgctgtggaatgtgccgacggcacggttttcaccggctgcaacattgaaaacgccgtttaccccgtaggcacctgcgccgagcgcaccgccatggggaaggccatcagcgaaggccaccgggacttcgtccgcatcgtcatcgccggacgcagcagcgattactgctacccttgtgggatgtgccgccagtttatgaaggagttcgccccggagatgcaggtcatctgcctcaacggcaggggagaggcgctggagttgaccctccgtgacctgctgccctacggctttgacagtactttccttccgggtgagcagtaattcttcgtaaaaacaattttaaacgaggacaataaaagcagggcgctgtgcgatgcacagcgccctgctttttctgaatttttcaaaccgtgagctgatcagccctgattgccgaagtagtagttgaagatatcccacggattactgtaatagccattgccgccgttataggagccgttgttggaattgctgttattgttctggctctgctgggactggctgttgttgtccgtggcctgatcggcaggcacagcgccccaggtcacggagacctcctgctgctggccgccccggtagatggtgaaagtggattcgtcaccggcggaatacttcttcttcagggccaccagttcctgataggagtccacatccgtaccgtcgatcttcataatgacgtcgcccatcttcaacccggccttgtcagcggcgctgccctcctccacggagtagatgaacacgcccttggtcacatcgtagcggtactgagcggccatctgctcattcatggtgccaggggtgatgccaagatatgccttgttgctgacatagccgttggtcatgatgtcctggatcatcgccgccacatcgttgatggggatggcaaagcccagaccctccacgctctggctggcgtagctggaatacttggcggacacgatacccaccacctcgccgtactcgttgaacagcgggccgccggagttgccggggttgatggcggcggtgacctggatcatgttgaagggggtgccgtccacgtcaatggcccggttcacggaggaagcgataccctcgctcatggagaaggtcagctcacccagcgggttgccgatggccagcacgtgatcgcccacgttcaggctgtcgctgttgccgagggtcacgttgggcagatcggtggcctcgatcttgatgacggcaatatcgtaatcctcgtcgccgccgatatactgggcgtcatagctgtcgccattatacagcgtgaccttcacggtgtctgcgtcgcctaccacatggtagttggtgacgatgtagccgtccggcgtcaggatgaagccagagccggccccggcagtctgtgtggtctggccgaagaaattggggtcagaggtagcggtgatgttgatggacaccacgctgttgacgttggttgcgtacagctccgcgtccgtcatgggattcttgccgtccacggttttcagctggatctctgtgggcttgcggttggagacattcacttctgtagtgtcgctgccggagtgattgcccaccagataggcggtgccgccgcctaccagaccgcccagcagagcgcacaccagcgccagagaggcgatcttcaggcccagacggttcttgccgttcttgtggggcgtctgcccgccctgaggctgggactgatacaccggctgggaattctgagtctgctgctcctgctgctgacggtagctgttgagctgctcgtccacggtgggctgcttggcgtcatagcgctggcccggctctgtgccgtccttgcgataggtgtagtgatacagattctgttcatcgttatacataagtcaaacctccttgaaaagcgggcgctgatctgcgttccgccgggaacttccttaactttgattgtagtataggaccgaaaacttaaaactgtctgaaaaaaattttaagcaaatgtgaaccttatacatttttctttttccgtccctgtggtacaatacagctatcaaaacaggaggtgccgccatgctgcgcatcgaaaatctgaaactttcccctggcggcggtccttccgccctgcgcaatgccgttcttcacattttacggatccccgaaaaggacctgttggcgctgcacattctccgccgcagcatcgacgcccgggagggcgtccgcatggtctacaccgtggaggtcgaggcggcggacgaagctgccgtgctccgccgctgccgggacaagcacgtttccaaggcagccccccggcccgtctatcagctcccggagcctgtgaccccgccggaagtaccgccggtggtggtgggcgcggggcctgcgggcctgtttgccgcgctggtactggcacgagcaggcgcacggcccattctgttggagcggggccgccgcgtggaggaccgcactaccgatgtggagcgcttctggtccaccggagagctggacctcaccagcaacgttcagttcggagagggcggcgccggggccttttccgacggcaagctcaacaccggcactaaggacctccggcaccgctttattctggaggagctggtccgctgcggtgcgccggaggagatcctctatgacgccaagccccatgtgggcaccgactatctccatatcgccctgaaaaacctgcggcgggagctgctggacttgggtgcggatatccggtttgaaagccagctgacagatttagacatccgggacggtgctttgcgcggtatcaccgccaccggcccggaggggacctacacgctgccctgccggcagctgatcctctgccccggtcactccgcccgtgatacctttgagctgctctaccgccggggcgtccccatggaggctaagccctttgccgtgggcgtccgcatcgagcagcggcagtccgattgcgatgctgcccaatacaaacagtatgccggacaccccggtctgcctgcctccacctataaactgagctgccatctgcccaatggtcggggtgtgttctccttttgcgtctgccccggcggacaggtggtggccgccgcgtcggaggaacaccgggtggtgaccaacggcatgagcgaatttgcccgtgacaaagagaacatcaacggcgcgctgctggtgaacgtcaccccggaggatttcggcggggacagccccttggcgggtatcgccttccagcgggatttggaagccgccgcttatcaggcaggacaagggaattaccttgcccccgcccagcgggtggaggacttccttgccaagcgtccctccacagggccgggccgggttattcccagttaccgccccggcgttacatggacgaacctctgggactgcctgccggacttcgtggcggcgtccatcgccgaggcgctgcctatcctgggccggaagctgaagggctatgaccagagcgacgcggtgctcaccgccgtggagagccgcagttcttccccggtgcgtctgctgcggaataacgatcgccagtcccccattcaggggctttacccctgcggcgagggcggcggctgggcaggcggcatcctctccgccgccgcggacggtatgcgctgtggagaagagatctgcaagcttctgtaaagtataactctataacaggatcaggaggtcagccatgaacaatttcactttttacgccccgaccatgtttgcctttggccaaggggaagccagccgcgtgggtgcgctggtccgtcagttcggcggcagcaaggtccttctggtggcaggcggtggttccgtaaagaaaaatggagcctatgacgctgttgccgcctctctgaaagaggccggatttccctggtgtgagctatggggtgttcaggccaatccccgcagtggcaaggtttatgaaggcattgatcttgcccggacagagggggtagatttcctgctggccatcggcggcggcagcgtcatcgacaccgccaaggccatcggcatgggcgtcccctatgacggcgatttctgggatttcttcaccggaaaagccaaaattgaacacaccctgccgatcggcacggtgctgaccatctccgccgctggcagcgaaggctccgacagctgcgtcatcacgcaggaggacggcaatctgaaatggggctgccccaaaacagacctcatccggcccaaattctccgtgttggaccccacctacacctattccctgccggattatcagctggcctgcggtgcggtggatatgctggcccacctgtgcgagcgctatttcaccaacacgccggacgtagccctcaccgaccggctgtgcgaggccgtgatgaaaaccattgtggacgccgcccccaaggcgctggcggatcacagtgactacgcctcccatgcggacctcatgtgggcgggaatgctggcccacaacaattcctgcggcatcggccgggatcaggactgggccagccaccagatcgaacacgagctgtccgccttctatgactgcgcccacggcgcggggcttgcggtggtgatgcccgcctggatggaatatgtctgcggccatgatgtcatgcgttttgcccggttcgccgtcaacgtattcggttgtgaaatggatttcgcccatccggagcgcacggtgcaagctggcatccgccgtctgcgggacttcttccgcactttgggtatgcccgccacgctggaggaagtaggcggcagggcggaggacattcctgccatggtagcccatcggtgcgaaaagcccaacggcttccccttcggcggcttcgtcaagattcaggaggtggatatggaagcggttctccgccgctgtgccaattgactacgccgccgcaaatttcacttggaacaacaaaactcccccaaggaacgattccttgggggagttttccgacagtttattactttgcgtattcgacacacttcgtctcgcgaatgagattgaccttgatctggccgggatattccatctcttcctcgatcttcttggccaggtcacgggccaggatcaccatctgatcctcgttgacctgctcgggcttcaccatgacacgaacctcgcggccggcctgaatggcatatgccttctcaacaccctggaaggaggtggcgatgctctcaagctgctccagccgcttgatgtagttctccagattctcgcgccgtgcgccgggacgggccgcggatatagcatccgccgcctgcaccagacaggccacgatggtccggggctccacatcgttgtggtgggcctcgatggcgtggatgatctcttccttctccttgtacttccgggcaaattccacgcccagctgcacatgggtgccctccatctcatgatcgatggacttgcccagatcgtgaagcagaccggcccgcttggcagtctgcacatcggcgcccagctcggcggccatcatgccggcaatgtgggacacctcgatggagtgctgcaaaacgttctggccatagctggtgcggtaatggagacggcccagcatcttcaccaactcggggtggaggttgcggatgccgcactcgaacatggcgcgctcgccctcggccttgatggtggcctccacctcacggcgggccttctccaccatttcctcgatatgggtgggatggatacggccgtcagcgatcagcttttccagtgccagccgggcgatctcccggcggaccggctcgaagcaggagacggtgatggcctccggtgtatcgtcgatgatgagatccacaccggtcagagtctcgatggtacggatgttgcggccctcgcggccgatgatacggcccttcatctcgtcattgggcaggggaaccacactgacggtcagctcggccacggagtccgccgcacagcgctggatggcctgagccaccacttcgcgggcgcgggtctcgcattcctctttcatccgggactccacctctttgatcttgagggcagtctcgtgggtcacttcgctctccacctgctgaatgaggtattccttggcctcgtcagcggtgaagccggagatcttttccagcatagccgtctggctctgcttgatggtgcggatctcctcctgttccttctccatggccgcgtgcttctgggccagagattcttccttcttctcaatggtctccagcttgcggtccaggttttcttccttctgctgcaagcggttttcctgccgctgcagatcggctctgcgggacttttcttccttctcgtaatcagtacggcttttcaggatctcttccttggcttccagcagcgcttccttctttttgctctcggcgttgcggatcgcttcgttgacgatgcgccggccttcttcttcggcgctggagatctctttttcagatacttttttgcgataaaggaagccacccgcaaagccgccggctaaggcaacaacgcctatgatcacggtcagcataaactgtgactcctttctttgactttggcgaaaaatgccataaaattcaccgtccgtcccaccagtcagcgggccggtacggttcagaacacaaacaggcggacaccccttttgccgcctataatgatccctatatagtttaatcagaaggcgtagttatgtcaagtcatttgctgcaaattttgaccggatcagcttttcccccgcagccggtccgcttttctccctatacgtcgatataggccgcagcggcgtatcccacctgatctccgtattgcaccacataccatccattccactcgccgtaaaccgtcacctccgcgccgtttggcaggttggcgattaccgtaccggcgggggatggcgtgctgcggagattcagtgtgccgtagctcaggcggaccgttccccgtttcgggtccatatgcgggatgaagggcaggccgaaatactccgtcagcgccttgacaagctgccgggccacatcctccacatggctctccagccagagggcgtcggaatagttgtcatggtagccgatctccaccagcaccgccgggaaccgggaccgggacacctctcccagtgcggtggtagggcgggtggtgaccttgtcgggcagcgggtagatctcccgcagatttttggcgatcagctccgctccccgctgcccaccggcgctgccgggatagtaaaaggcgataatgccccgggcggaggtctgggcggagccgtttccgatggcgttggagtgcagtgccagatagaagtcataatagccgctgttggcctcccggatggcggcccccgccgaggtatccgggtcattgcggcggtagcggatgccgttggaccgcagatacggctccatagcgtccacgatccggttcatccagtattcctcgctgccgctgccagtaacataggggttccagtcctgggtggacggacttaaaaacacaatgggcatcaaagttccctcccatacagataatgaatgtgcagagttttttgttatagtgaaattctgtctgcttcatagtatggcgttttccctggaattgtgctatactggcccggaaatcaagcctaaaaggagcacagcttatgaaaatagagcgtggctatcccacttataccgtcacccccaaggcggaaaacgccatcgtcaaggggcatccctgggtgtatgatgcagagatcctgaacatagaaggtgaaatagacaacggcggactggtggatgtcatcagcaagaagggccgctatctgggcaccggttttttgtcccagcagtccaagatccgtgtgcggctcatctcccggaacgccaatgaccgctttgacgaagccttttggcggcgaaagctgcaatgggcgtgggactaccggaagtccgtcatggacccggcggatctggacgcctgccgggtgatctttggcgaggcggacgccttccctggtctgacggtggataagttccacgatctgctcagtgtgcaggtgctgtccgttggcatggaaaatttacaggaccttctgctccctgctctggtggacattctccggcaggacggccagcccatccggggcgtgttcctgcggaacgacgtggccctccgggacaaggagggcctgccccagggcaagggctggtacgccctccccggcgaaactgtgccggacagcccggtggtggagatcgtggaaaacggggtcaagtatctggtggacgtggaaaacggccagaaaaccggctttttcctggaccagaagtacaaccgccgggcggtgggccgtcttgcagcgggcaagaccgtgctggactgcttcacccacaccggctccttcgccctgaacgccgccctgggcggcgccaggcacgtaacggcggtggacgtgtcggaatccgccgtggagatggcccgggccaacgcggagcgcaacggcgtatccgatattatggactgcgtggcggccaatgtgttcgacctgctgccccagctggaaaaggagccggtgaagtatgacttcatcattctggaccccccggccttcacgaaaagccggaaaaccgtggccaatgccatcaccggctacaaggagatcaactaccgggccatgaagctgctgccccggggcgggtacttggccacctgctcctgctcccacttcgccacggcggagaaattcgaggccatgctccgctccgccgctcacgatgccggggtacagctgcggcagatcgaatcccggcagcagaactgcgaccatcccatcctctggggcgtggacgaaacggattatctgaagttttatctattccaggtcgtataaattctgttgaatattgcgaaaaggactcggatactgatgcatccgagtcctttttctctgcccctaaaatagcgccccggtgccctttggcaccggggcgctgctttttcaattggtttttattgggcgcacaaacggagatcagccgtatccgcaggtcaccagttcccaggcgccgccgtcgctgcggcccagccaccactgccagccctcatactccgtatcggcatcccaggcgtcccgctgctccacgggggagtgaaagctgctggaaaacaggatgcactgagtaaaaggctcagtctgctctttcatttccagcccgttgagccactcaatgttttcgtcgctgcaggccgcgtcgccgccgtaggccaggctgtgaagttcacagccttcccaggtggcaaactccgcttcaattacctggatggcagcgtccatgtcctcctgggtgtagagttcggaattgccgtagtcaattttcaccttgggcggctcctgggtgtcctgcttgccgcatccgcccagagtgcctaaaatcatgatcgtcagggaaacagccaaaagttttttcatatccattcctcctgcattcctcaatcatttacttttcaggtgattctgtggcctgacggctgagccgtcaggccacaggtttttttacgccttgatctctacgatgcggaccacgccgtcataaacatagaggttcatggtgtcgccgtaggctttggcatcatccagcgtcatccacttgccggtgtcatcgttgtagcactggacattggaggggacctcgtaggtccggctgccgaaggtcacggccgtcttgccgatccaggcactggaagagacgttgctcagcttgctcatggtgtcaaatctggtgaacatgagcctgtcattcacgctctttttgatacttgcagccacaaaagcaccagtgctgacactgttaccgctataaaccgtatatttttctgtatcactgcaaacgatcgtgatcgtgcggtcagtctccttgccggttgtcggatcatacttgctgtccacaatcgcacggccaaaaatcatatcgcctgcaaggccgttattcagcacgatcaagtccacctgaccggcccagttggtccgggcataggagacgcggccggagttgacgccggtctggctcagctcgctgagggcgatctgtctgccgccgtcaaagagcataacgttgtccgccagctttctgccgcccagcgtaccttccttgggaagcaggtcaccgccgacaccgccggagatcttgttgagcttcaggccgctcttgtcggcatacaccgacactacctgaccggcgtattcgctcgctgtgccgatgttcagcagcgcaccgccgcagaccaactgcacatcacccttttcggacaccaccgccatggcattgccccgggcaccggtgttgttggcatcctcggcaccggccacctgaccgtccgccgtcagcagaaggacgatctgcttgccaggcttcagcttggacagggaatccactgccgtaggcagaacattcagttccttgccgcccagcaccgtaatggtggcggggctgctgggagagggcttgcagtcctcgtagtagacggacacccgggtatcgctgacaatgatggaattggtagcggaggcgtaggtcgccacgtcatactttttgaggtctgctgccgtggcaggggaaccattcttgtaaatctggtagctgttgttacccgccatggagtccagtccggcaacagagccgttggcaccgatgatgaccgccgcattggaaacgccattgctgccggtgatgggcaggaaggtcaggatctcgccggcgctgttgaggaccgccttgcccttggagccgatgaggctggtggaggcaacgggatgcgccatggtatacgtcttaccgccggcagtcatcgtgcccttaccgccgtccacggcggtaaggtagacctcctcgcccactttgtagttgaacagcgcctcgcccttgccgtgcttggcctcaaaaaggttcaggaacagcttggccgcctgtgcgcgggtcaggcccgcgtaggcggaggtgataccggtggacttcaaaaggccgttggtctgggcctccgccatgtagctctggggccacacgccgcccatgtcctcgtccttgtagcccaggccccgcatgaggatcgtcaccgcctgtccggcggtcacggtctggccgggcttgaacttaccgtcggcaaagccggagatgatccccttcctcgccgccatattgatgtaggcggacgcccagtgggagggcttcacgtccgggaagatggtaacggtggaataccgtcccaactcgccgctgccgtccatggcgtaaactgccattttgcagaactgtgcccgattcagaacggtgtccgggcggaaggtaccgtcgccgtagccgtccagcacacccatgagccgcagagtttccacggcggtggcggtatagctgtcgctgacgtcggaaaatttggtgacagccgccgccccggcaggcaccgtcagcagggagcccagcatgctgatcgccagcagccaggtcaaaattcgttttttcataagtctctctcctttaatccgcccgcagggcttccacaggctggagtttcgatgcttttgccgccgggtagctgccgaacagcacgcccagcgccacggaaaggccgaaggccgccagcgtcacccaagtggcggggaaaatggtcatctggaacaaaatcttgcccaaagccagactgccgatggtgccgaagataatgcccacaatgccgcccatgccgcagagcataccggattcgatgaggaactgggccacaatgctgctccgctgtgcgccaaggctccggcggataccgatctcgcgggtccgctccgtcaccgtcaccagcatgatgttcatgataccgatgccgcccaccagcagggagatggcggcgatgccgcccagcaccagagagatcatagtcagctgctggttctgataatcctgccagtagccttccttctgcacctgatagccgcccatgctctgatccaccacgccggagagatacccgccgatctcggtgatggcggttttcatgctggcgtcatccttggcctttaccaaaaattctgtgggggccgtatcccccagcaaccgggtagcggtgtagggaaggatcataaagttatccgtctggtaagcggaaggggtatccggctccacgcgggcgccatacacgcccaccacttcaaagttgttgccgttgaccttcatgatctgtcccacagggttggcgctgccgaaaaagacccgcgccgcctgcgcgcccagcacgcagatctgattgtatttctcgcagtccagccacgcaaggtctctgccctttgcgattgccagattgttgcaggcgctgtactggtcggagccgtagtagatctgcgggggaccgctgaccacgttgtactgctggtcatatttccactccattgtggagctgtttttcgtaccgtataccaccgtagcgttggatgagcccttgggggtaatgccaataatggactccttcagtccggagcaaaagcggtacaatccggtaaaatagtccttgctgatagggttgccggcctcgtcgtacgtatacgcatacacgctcacttcaatgcggttggcgcccatggcggcaaactgctccatggttttggccttcataccctccatggtggaaacgatggtcataacggcggcaataccgatgaaaatagagagaatggtcaaggcgctgcggccttttttcccgcagatggaccgccaggccatcttaaatgcctgcccgatgttcaataccaatccacctcctgtgggtgatcctcgatgatctttccgtccgcgatccgcacgatgcgccgggccgtggcggcgatcccgttgtcatgggtgatgagaatgacggtgctgccctccttgttcaactgctggaggaagcccagcacctcgtggcccgtccgggaatccaatgcgccggtaggctcatccgccataatgatgggcggatgggtggaaatggcccgggcgatggccacacgctgctgctggccgccggacatctgggtaggcttatgctgcgcccggtcggcgagacccacgcgggtcagcgcctgtatcgccagctcccgccggtcaatgggatcgatgccctgatagatcagcggcagctccacgttttccagcaccgtcagattctggatcaggttgtactgctggaaaatgaacccgatctgcttgttgcggatgcgggagagctccttgtcggaaagctcccggacatccacgccgtccagacggtaagtgccccgggtggggatgtccagacagcccagcacgttcatcatggtggacttgccggagccggactggcccaccaccgccacgaactcgcccttttcaatatccagcgaaacgccgtccagggcccggacctcgctctcaaggccctcgccgtagatcttatagacgtcccgcagttcgatcagtttcgccatggcttaaccccacgcctgatcggttatcatctgggtaaagacggtgtcgccgtcatttacgccggacttgatctccacgttatatgtatcctgaataccgatctccacctgaacgggatagaagccgctgggaatctcctcgtcctgatagggcagctccagcgcgttgtccggccggctgtctgcctgcacatagaccacggtggcggaagaaccatcctccagccccacggtacgcaccgcctggatgggcaccatcaggcagttgtcattctggctggcctggatctgatagttcacatagctgttgacctggaggttgccgtccgtgttgtccgcggagatggtgatgggataggaggccacgccgttattcacagtgctggacaggctcaccgtctccaccgtgccgaaggcgctggtgccccactggtccaggttcacggacataccggtcttgatgtaactgatgttccgctcgtccacggtggcgctgacggtcacggtggaggtgtcggaaacggtcacaagggtgctgtttgcctgaagttcctgccccggcgtcacggacagaccgataacctgaccggaaatgggagccaccgcattgcagttgtccagattcttctgggcggcctccagcttcttctgggcctcttccagattctgctgtgcggtgaagatctccgtctcgctgtcctcgccgtcgatccgcaccagaacctggccgggcgttacggcgagatagtccaccagattactggagatcaccgtgccgctgacggtggagttcaaatctcccacccggtaatattgcagtttagcggcttcgtagggatacacggtatcgccgttcacaatcgtagtggcagtagccaccatatccttggccagcacaccctcattggggatcacgatctcggcggaaaacagcttagaaccctccggcgtgatgcggctgaccatgtggactgcctccacggtgccctccacggtggtcatcagggcagggatagagacctgcaccttctgccccgccttcagctccccggcgtaggcgtagctgtaatactgctccagccgcatccgggtatcgtccgcgaggacggcgaccttggtgcccttgctaatctcgtcgccggggttcagtgtcacaacatccatcagttttccggcgtaggacggagaaagattcagccccgcaatgtccttttgcagcgtgttgatctgcttctgatagccctcaacctcgtcccgggccttctggacctccgtggcagcattgggggaatcaatggtaaacagggggtccccctgctccactttctgtccctcctccacgaatacatccatcaccgtgcccgcagtggtcaggctgatagtctcgctgttcttggcctttaccagaccgctgccgtccacctcggagctgatagcgccgtaggacaccgtcgccatgcctacctcgctgctgccgtccttctttttgaagaatttcacgccgcctgcgatcagggcggccacgaccaccagcgcaacgatccgccggatcgtacgccgccgctttttcttgtctgccgtgcttttttccggctttttcgccggggtctccggtgacgccggagcggctgtctccgccggggtcagctcctttttctcttccatgatctctgccatgacatattctccttttacgattctccgggctgaggcccgcttgtttccgatccagtgctgtcagcgcccaaacagggctgccgacaggcatattcaccttcgctcactgatgttaatatagccaatagggtaaatcaacaacaaaacagtaacaaattccatcaaaaccgctttcatttgtaatagacggattcaaccgcgaaaaggtttccttttttgcaaaaactttttgataacagcagaccgcaccgcccgggatcatgggcagtgcggtcacttttgttgttttcaggagatcaggcagccagccgccgggcgctcatgcgctggatcagcacgatgccgccgaccatcacgaggccaaccacatccgatgcggtgccggggatcatcatgcacagaccgccggcagccatcgccagacggaacagcatggggatcttcttatagacgaagccgttcaaagccgcagccacaccaaacagaccgatgagggcgctgactacgatctgcaccacttcaaatgcgctgctcacattgtcaaacagcatagcggggctgtacgcaaaaatgtagggcacgataaaggccgcgacggccagcttggtagcgttgatgccggttttcatagggttggccttggcaatggcggcgccggcgtaggcagccagagccaccggaggcgtaatgtccgccacgatgccgaagtagaacacgaagaagtgagccgccaccagagggaagtccatctgcaccagaatgggggcgcaggtggaagccatgatgcagtagttggcggtggtaggaacgcccatgcccagaatgatgcagcagatcatcgtcagcagcaggccgatcatagtggcgtcgcctgccatctgcacgatggcattgataaggatggaagcaagaccggtgacggtaatgcagccggcgatcataccagccatggcacaggccacagccacggtgatggcgcccttggcgccggcctccagtgcctccacgattttaccgaaggtcagccgctcatccttgttcaggaagcccaccacgatggcggccagaatggacaccgccgcggagaactgcatggtgcggctgccggaggaaaccaggaagatcagcagggccagaggtatgatgagataggcacgcttggcgagctcaccccaggagaccatctcggacttgggcatacccttcagtcccagcttcttggcttccagatggacggcgatgaaaatgccggtgaagtacagcacggcgggaaggatggcctttacagccaccttcgcataggggatattcatgtactctgccatcaggaacgccgctgcgcccatgatggggggcatgatctgaccaccggtagaggcggcagcctccaccgcgccggcgaactccggcttgtagccggttttcttcatcatggggatggtgacggagccggtggtcacggtgttgcccacggaggagccggacaccatgccgcacagggcggaggaaatgaccgccaccttggcggggccgccggaggaccagcccgccagacggttggcgaagctgatgaagaagttggcgataccggtgcgctccagaaatgcgccaaagatgatgaacagcacgatgtaggtgtagcagacgctcaccggcgtaccgatgacgccgctggtggtgtagaacagcttatagacgatgttcttcagcgccttgtaaaagctggggtcccagctgagctggttataaaacgtgtagatcagcagcaggcccagcaccaccagaatgggcaggcccacgcaccggcggcacagctcgatcagtaccacaataccgatggcaccgacaatgatgtggacgggctggagcttggtggccagctgaatgatggagaaagcgttgatggcaaaatagaagaagctgccagcgcccagaaccatcaggatccagtcataccagggcacatggttcacccgggcagcaccttttctggcgggatacaccagatagccgatgatgatgataaagcccagaaacagggacagccgccgctccggaagtgccttgctgaacagggtcatcaggatacaatagattgagaaggccgacatcagcacccgcagggcgattttcggagccccctcccagatacgggtgttggattcccggtcatactttttcatgaccgcatccacgtccgcctggatatcatgctccatctcgtgcacctcgtggtcgagtgccttttccacttcaacaatggggtcttttttcttgaacaggcccatatggtctcctccttgatcgttttctcacatccgcagttgacaggggcagcggatctctgtccttctcaaccggggatcggggtaaattcttgtaaattggtccgcagcaagcgctctgttcttccgttccggagagctgtgcttctctttagaaccactcacggctgcggcggatttctccgccgcagctttccggcgcatcgcgccggaaaggctgattttaatggtgcaggaatcccctgatgggtttcccgcacacacccttcctttccgttccggagagctgtgcttcgctttagaaccactcacggctgcggcggatttctccgccgcagcctgaatgacatacttataggtatggaaatggcggtgatgctgtaaagatcccgttcagatctttacttggttgccacatcgaagcccttctcggcgaagtacttggcagcgccgggatgataaggcacagaggtgatagaagcgccaaactcggtggacagctcgccgtacttggcgtggctgctgatcagatcgggggcgttgtcgaagatgtcagccgtcagagcatagatagcatcctcagatacatcgtcacgggccaggatcacagcgcccacagccacggtggtcacatcctcgtcctgaccgttgtaggtaccggcggggatgacgtgcttggtgtagtaaggagaggcggccagcaactcgtcgatatgggcgtcatccagagacaccagataagcagccttggtggtggacagatccatgatggcagtggtgggggcgccggccacgatgaaggcggcgtcgatcttgccgtccttcagggagtcagcgctgtcgccgaagctctgataggtggcattgatcttggtgaacttgccgtcagcgtccagatcgcccagaccataagcgctcaggatgtccacagcgttgaagtacacaccggaaccggcagcgccgacagacacgttcttaccggccaggtcagccacggtcttgatgctgggatcggtggtgacgatctgcacatcttccatgtacagggcggccacggtggagaagcagtcgatggggttctcaaagaggttggtgccgttgtaggcataggccatcacgtcggactggcagaaggccagctctgcgttgccgtctgccagctcttccacgttggacttagagccgttgccaaccagaccggtgacagacacatcggtattgttggtggcgtgctgggcgataacggagccgaaggcatagtaggtgccggactcgccgccggtgacgaagcgcagcttcgcggtagaagcagcgggagcgctgtcgccagtctcattgccggaggcgttaccgccgccgcaggcagtcagagaagcgatgaggcccagagccagaatcagagaaaacacttttttcattccaaatccctctttcacagttgaattaggtggaaacgcccggtgcttttttcaagggtgtttccgtaagcatgtgcatagtatacatgtatatcattcattttgcaagggtcattttctctttttggtgattttttgcaatgttcaagtattcatcttgcattttcacgctattctctgcgtttttccgcaaatgtcttgcaaaacaaatgtccgtcttgcaaaaacacgccccgccaggaaaaccagcggggcgtgttttgtgcagtttaactaagagcaacttactgaatcaccttggagtctacaacttccttcagcttggcggtgaagtcctccaggctcatagcgcccagatcctcgccggcgcgggtacggacggagaccgtcttgttttccatatcccggtcacccacaacgatcatatagggcaccttctccagagtggcctcacggatcttcttgccgatcttctcgttgcggtcatccacctccacgcggaagccctggccgtccaatgcgtcagacagatccttggcataatccagcgcacggtcggtgacaggcaggatcttcacctgaacaggagccagccatgcggggaaggcgccggcaaagtgctcggtgatgatgccgatgaaccgctcgatggagccgaacacaacacggtggatcatcacgggcacgtccttgccgccgtcgctggtggtatactccagatcaaagcggccaggcagctgatagtccagctgaatggtgccgcactgccaggtacggcccagagagtcctgaatgtggaagtccagcttggggccgtagaacgcgccgtcgccggggttcaccacatactccttgccgatggaggtaatggcgtcggccagagcgttctctgccttctcccagtcctcccgggtgccgatgtggtcctcgggcatggtggacaattcgatcttgtagggcaggccaaacagagagtagacctcgtcgaacaggcgggcgatgcggatgacctcatccttgatctggtccttggccagcaggatgtgggcgtcgtcctgagtgaagcagcggacacggaacatgccgtggagcgcgccggagagctcatgacggtggaccaggcccagctcaccgtaccgcaggggcaggtctcggtaggaatggggttccagctcatagaccagaatactgccggggcagttcatgggcttgatggcaaagtcctcgccgtcaatgacggtggtatacatattatccttgtagtgatcccagtggccggaggtctcccacagagtccgcttcatgatctgaggagtggagatctccacatagttccacttcttgtggacctgacgccagtagtcgatcagggtgttcttcagcaccatgcccttgggcaggtagaaggggaagccgggggcctcatcccggaaagcaaacaggcccagttccttgcccagcttccggtgatcccggcgcttggcctcctcgatgcgctccagataagcgtccagctcctccttcttggggaaggcgatgccgtagatccgctgcagggtctcccggttggagtcaccccgccagtaggcggcgttgcaggccagcagcttgatggcgttgcccttcacccggccggtggagtccagatgggggccggcgcacaggtcggtgaactcgccctgcttgtagaaggagatgggagcatcctccggcagatcctgaatcagctccaccttgtaaggctcgcccttctcctccatgaacttgatagcttcctcgcggggcagctcaaagcgctccagcttcagcttctccttgcagatcttccgcatctcggcctcgatctcggtcatgtgctccggggtaaaggcaaagggtgcatccatatcgtaataccagccctccttgatagaggggccgatggccagcttcacctcgggccacaggcgcttgacggcctgcgccatgatgtgagagcaggtgtgccagtaggtctggcggtattcctcattttcaaagctgaattccttgatttcctcagacatagtaatgtctcctttcctgcggcggtctttccgcccttggggcaaaacaaaaacgcctcacccctgttttggtcaggggtgaggcgtaaagctccacggttccaccctgcttgcacagtaaaacaaaatttgtttcgctgtgcaagcagggtaaaaaactccttcggagtcttctaattgaaatcatgcaagacacctttcctaggtttcttgcacacattcttccttcccgccagcgaaagtccttttgcgcattgtgccgctcgtgtcctctgtaacgggaggtcccgtcccggcctacatatcggcgggcagctccaaggcggtgactgttccggttctgactgacgctgctttcagcccatgacagcgtctctctgaagttcttcccggacagcgtccttttccaagccttttttcagaatggaattatgatagcacggctcttttggattgtcaaggggcgcatcctgtcgattttcacaggaaattcgcgccatatccgggaagtttcgccgtttttttaggcgttgggatggggcagattccaccggtagtgggccgacagacaccggatggcaaacaccgccgccgcaccgaccagcatggccgtcatctcccctgccgactgccgcagcaccccgcagatcaccgcgccgacgagagaggcgcaggcgtaaatatgcttcacgaaaatatagggcatatctccggccatcacatcccgcagcagcccgccgcccacgccggtgagtacgccgacgaacaccagcaggtacagggacggcgcttccacgcagttccataccacgcggacgcccatgaccgtgaagatgcccaggcccgcgctgtccattagcagcataaatagatcataccgccgctggttgcccatcagcaggtgccgcacgccggagaggaacatggtcagcgaggtgaccaccgccaccgcagaggccgtcggattctgaaacgccgccgggggcgtgttgcccagcagcacatcccgcaccataccgccgccgcaggcggtggtcaggccaaggatacagacgccgaacacgtccagtcccttccggacccccagcaccgcgccggaggcggcgaaggcgatggtgcccagcatttcaaacagaaagagaaaggtctccatgtctcacatgtccctccgcaccatttccataaaggcggtagccgcggccgtggggggcacttccttcaaggtacacatatccacgctgcgctccgggatcgtgaagtccgttttcagcagacggatgtcgccgctttccaggtccttccggacgaattccagcgtcacgcccgccacgcccagaccgatccccgccagcgtcaccaaaagctgccgggaggacagctcgatctccggggtcaaggtaacgccggccttcaaaaactcctgctccagaaagacccgggagctggccttccgctccagcaggatcagggggaattccgccatctcctgccgggtgtagatcttgtcgaaatcgcagtggtaattcttccccgccacgaacacggaatgggtggcaaagcagggccaggtctccagcgtgctgtccttgggagaggaggcaaaggcgatgtccaccgccccggagcgaagcatgctcaccaccttggcgctgcggccggagacgatcttcagccggatgccggggtgctggtggtgaaattcgtccagatacggcgtcaggaactgccccgtcaccgtgtcgctggcgccgatggtcagggtacccaacagcagctgctgggcctgagaaagcttgtcctcgccggtagccagcagacccaaggcgttgcggacatactgatagagcatctggccctctcccgtcagcgtcacgccccggggggagcgggcaaacagccgggcctgtagggccgtttccagctgtttaatagattggctcaccgccgattgggaaatatacaaattctttgccgccgccgagatgttgccggtctccgcgacctccttgaacacccggtacaattccagttttactgccatacgcgcttcctccataatcagcgggtcttatcgctacaatcagcattataagcaaccgccgttggaattgcaaccgtaaactgatcgtctcttctgtaaaatttagactgtcaataaagtggttaattctccgcgacggtaaggaagggtgtgcgcgggaaacccaagaagggtgtcctgcgccattggaatcctaagttttcagaacttttataaaagttctgaaaaccagttcagcggggagaaaaggctttttcgacacgctgaaaatttttgatgtccgaagctccccgctttcggcggctttccataggcggtgggttgcaaacagccggagaatacgataaaataaagtgatttttgatttgatccctcatcctatatattcggaggtactccatgctctattccgttctggctgtgggcgatgtggtaggcgaggcaggtctcgcccatctggaacgccatctgcggcccctgcaaaagctgaaaaacatttcgttcaccgtggtcaacggggaaaacatctccggcgtgggtctgacctgcaagcaggcgtggcgggtctatgacgccggagccgacgccgtgacccttggcaaccacaccttcggcaaaatggagattggccgtatgctggatgagacgccgtggctcctgcggcccgccaacctctccggcagaatgccgggccatggctgcgaaatttttgacctcaatggcctgcggttccgcgtggtgaatctcattggccgctgcaccctccaatggaacgccgaaaacccctttaccatggcggaccggctgctgaagcagggcactgcggattttactctggtggatttccatgcggaggccaccagtgaaaagctggcgctgggctactatctggacggccgggtcagcgccctgtggggcacccacacccatgtccccaccgccgatgagcgggtctatcccaagggcaccggctatatcacggatctggggatgaccggccccatcgaatctgttctgggcgtagagcctgcgcagtcggtggaatcgtttttgggtggtctgccgggacgctaccgcaacccggagggtccctgtaagctgcagggggctattttcacactggacagcgccaccggcctctgcaccgccgtggagcgggtggacattcgataaggaggccgttgtatgacaagacctgagcattaccgttcctattccgctgtatttcccattttgctgcgggagggggccaacgggcaggaggtgctgctgcacctgcggcagaacaccggctatatggacggctgctgggactttgccggcagcggccatgtggacgaaaacgaaaccgcccgtcaggccgtggcccgggagtgtttggaggaactgggcattacagtgaaccccgccgacatggaatttgtccacctgtgccaccgggtcgccgggggcgatggccgcacctattacgatctctgtttcgtcattcggaaatacgacggcacacccgccgtcatggagccggagaaaaacgccggacttcgctggttccccacggaggcccttccggaaaataccagtactgccgtggaggtcatgctgcgcccctgtctgcggggccagccttacagtgaggtcattcatgaccttccggtcacatcaatctaaaaagaggaaatcactatgtctattcaaaaggtaagagagtatttcaagcagttcggcattgaggaccgcatccgggaattcgacgtttcctccgccacggtggagctggcggcggtggccgtaggcgtggagggcgcccggatcgccaagtctatgagcttcaaggtgggggaggaacccatcatcatcgtggtggcgggggacgccaaggtggacaacagccgctacaaagcccagttccacaccaaggccaaaatgctgacctttgaggaagcccataccatgatcggccacgaccccggcggcgtgtgctccttcgctttgccggataatgtaaaaacctatctggacatctccctgaagcggttcgagaccgtattccccgccgccggcagcagcaacagcgccattgaactgacctgcgaggaattggagaagtattcctccaacttcgtctcctgggtggatgtggcaaagggctggcgtccggaagaaaaggaagcttgaggggcttatgctgagatttattcacgcggcggacttccatctggacagcgccttcgccgccctgaccccccggcaggcggccgcccgccgccgggagagccgggagctaccggtgcggctggctaactacgtcaaccagaataacattgatctggtgctgctggcgggggacctctttgacagcgccgcctcttaccgggacacggcagaggaactctccgccgctctggggcagatggaggcacaggtctacatcgcccccggcaaccatgactggtacggccccggcagcccctacctgacggtgaagtggccggaaaatgtacacattttcactcagccccggccggaaacaatggaatggccggaaaaaaatctggtgctccacggtgcggcctttacccacggggaacaagccgacggcttcctcactggcttcaccgcccccgccgacgggaagctccatatcggcctgctccacggggagatcgacccctcggaggcccggtacaatcccatccgcaaagaggagatcgccgccagcggccttgcctatctggcgctgggacacatccacaagcggacggagcctttgacctatggcggcaccgtctgcgcatggccgggctgcccggagggacgggggttcgacgaattgggggaaaaaggcttttattccggcacgatcgacgattccggcaaggtcagccttaccttcgtccccttcgcccggcggcggtatgaaattttgacggtggacttcaccgatcaggatccccgcgccgccatcgaggcggctctgcccgccgacacggcacaggacctgtaccgtattctgctcaccggagagaccggtgagggcggcgtccatacggacgcgctgaaagcggcgttggcggaccggttctacgcattggaactacgggaccggacccggctggcggaggacctgtgggccaaagcggaggaggactccctccggggcctgtttctgagggatttaaagcagcagctggcgcaggctcagacggaggaggaccgccagcgcgtcaccatggccgcccggttcggactggcggcgctggaccacagggatttgggataaggcgagaatttatgaaaaaaatattattgatcggcaccggcggtaccattgcctctgatgtcacggaagacggcctggccccagagttgacctctgagcagttattgaaccatctccccgccatctccagtatctgcgatgtagaatgtatacaacttttgaatctggacagcactaacatgcgtccggagcattggttggatatggtgcggtgcatccgggaaaactatgaccgctatgatggctttgtcatcacccatggtacagacaccatggcttatacagccgcaggtctcagctatctgatccaaggcagtccaaaacctatgattctcaccggtgcacagaagcctatcggatttgattccacagattccaagatcaacatgacggacgcttttcgctgtgccgcctcggatctccccggcgtgtctatcgtgttcaacaatcacgtgattttgggcacacgggcccgcaagacccgcacaaagagttttcaggcattttccagcatcaactatccggatctggggattctgcgggatggagtactgctgcggtatatccgccaggactgtaccactgtacctactttttttgacactttggataataaagtggcccttttgaagctgacaccgggacaagaccgttctgctgccgacttttttctggaacgaaatgatgctctgatcatcgagagctttggagtcggcggtctgccggagcacggtgggttctacgattgtctacaaagctggatagaacaaggcaaatttgtggttcttactactcaggtccccagtgagggcagcgacgtaggcgtttaccatgttggacacagtctgaaagcaaccctccgcgttttggaagcctacgatatgaccacggaggctgtggtagccaagctcatgtggatcctgggacggacccatgaccgcactgaggtagaaaagctattctatacaccgatagcaaaggacattctcttccctgtccacgggtgggatttataggatttaccatcagcagcactacatagaagcctgccggaacagtccacggactgttccggcaggttttttccatataatacaaccttaatcgtaccgcagggcgtcgatggggttcagcttggccgccttgttggcgggcaggtagccgaacagaacgccgatgcctacgctgacgccgaagctgacggcaatgtcggaaagagtcggcaccgcgctgaaggtgatgccgttcatggaactggacatgatggcccccaccgcaatggtggcagctctggccagcagcaggccgaatacgatgcccagcaccccgcccacggcggaggtggtgcccgcttcaatgacgaactggccccggatatccttctgcttggcgcccagagattttcggatgccgatctccctcgtccgttccgtgacggacaccagcatgatgttcataatgccgataccgcccaccagcagggaaatggcggcgatggccaccagtacgatcatcatggtgttcatcatggtgttcatggcgtccatcatttccgcggaggtcatgaccatgtagtagtccgaggactgataggttttatacagtcgcttttccacaatgcccttggcagcggacgccgtatcccggctggtggaggtcagcaggaacatttcatcggtgcccatcatcatggtgccagtgcccatccgctgggcgttttcataggggatgtagatcacatcgtcggcgctgccctcgctgctgtcgccgctcttactcaacacgccgatgacggtgtaaggcacaccgctcagagagatggtcttacccagtgcgtcgccccgaaaggcggcctgcgccagataatcgccgatgacgcagacattctgatgccgatccacgtcgatgtagctgaggaagcgcccctccgcaagagtctccccttgcatggtgcccttggtgtcctccttgaaaaacgcctcgctgacgccgtagaccgaggtgcggtcatagtcatccgtctggtagcgcaccttggcagaagcggagacatagggggtcacgccggtgaggtactggggatatttgtccaccagttcatagagatcctccacatccacgtcacgggtgccgccggtaccccggccataggtcatgacctgaatcagattggagcccattttttcaaactggctgttcatcatattggtcatgccgttgccgagagacagaatcacgatcacggcgccaactccgatgataatacccagcatggtgagaaacgcccgcatcttgctggttttcagagatttcagcgccagcttgaaggattgggtaaagttcatacgcccacctccccgtccgcgccggtctcctccggctgtaccacggcggcaggatcggaggcgtctccgtcatagatgatgcggccgtcctgaaggcggacgatgcgcttggcttttacggcgatggagttatcgtgggtgatgagcaccacggtatccccctcctgattcagcttctggaggaaccccagcacctcccggcccgtccgggaatccagcgcgccggtgggctcatccgccagaatgacggagggattccccgccagcgctctcgcgatggacacccgctgctgctgaccgccggaaagctggctgggcagatttttctgcttttcggcaagacccacacggcccagagccgccacagcccgctccttccgctcctccgcgcccacaccggcatacagcaggggcagctccacgttttccagcacggtcagtttggggatcaggttatactgctggaagatgaaccccagcattttgttccggatctccgcctgctggtcatcatccatggtggatacgtccacgccccccagatgataggtgccgctggtgggaacatccagacatccgatgatgttcatggcagtggatttaccggaaccggactgtcccacaatggctacaaactcccccttgtcgatggtgaggctcacgccgtccagagcgtgaacgtcctcgtcgcccatgtggtagatcttgtagacgtcttttaattcaatgagatgctccatggcttacatccccatcatttcggccatcatgttagagctttggttggggattaggacagtgtccccctcttccagaccgccggtaacctcgatgaaatcaccgtcgctcttgcccagcgtcacttcccgtgtttccagcttggagacatccgccacggtggtattgtccgcgttcatggcgccgggaccggggaccgtcacagtgttgccccggttcacagcgtccacggggatgcacagggcattggggacccggtcgccctcgatggttgcggagacattcatgcccggcttgaggtcgccgtaatccttgatgaggatggtcacgggatagctggtggcgccgcctgccgtggtgccgttgatgctgacgttgtccaccactccggtgaaggtctgcccttccaccgcgtccgcagtgatggtgacggactggcccgcctccaccttgctgatatccagttcatccacggccatttccagcttcaagtagctcatgtcataaaccactgccagagagccggagttcatgccctccactttgtcaccggccttgaaattcttttcgatcacggtgccggtgatctgagaggtgatgttgtaatcatccagactgtccgctgccatagaagccgccagttccgcattctgcagactcagccgggcgttctccacccggttccgggcatcggcggactccacagtgcacaggggctccccctgcttgacggtgctgcccgccagcttattcaagccctgaatggtgccgctggcaccggcgtagacaatggtggctccgcccagattgatgggcgtctggccgtagctggcgtaattgccgatccgggcagaggccgtgaaggaatccgagacagcgccgggattcgccagcttcacccggacgctgacggcggacaggccgttgctggtaatgctggtggagttggacacggaatccaccgtgccgctcaccggggcgtcataattgccgatatacaccgtggccgcctgacccgcatagaagtccgtggggctggcgtaggggaacaggaagtcgatggacaggtccatgctggaggtgatcttggcgatctgagcacctgcgttcacactgtcaccgttatggacatacagttcctgaatcgtgccgctgatggaagccacggggttcagagcctccttggcctgctgataggctatttgagcctgcgccacagagagctctgcccggtccacattgttctgggcgtcgctgctgttcagggcaaacaacagatcccccttatccaccagatcgcccagctcaaagggtgcgttttcgatctcaccggagatcagagtggtgacgttataagaatctgcgggcttcagggtcgccgttccagtaacggacagcgtcagatcctgccgggtggcctgagccaccagatagctgccgccgagataggcgtttgcctttttggatgccctggccatgcagcctgccgccacagcggcgatcaccaccgcggcaatggcaattttcatccatttttttgctttcttgctcttgggcaggccgaatttctttttcggctccgtttcggacgcaggcgcagactgacccgccttcgttttcttcatcagttcttccatatagacaactcctttatgaacgctgtgcggggtgggtctttgcccccatgccccgccgcagaatttccaacgcgcgctccagcttttcccggtcctccgggtcggtctcaggccgaatgccgttatacatgatggggactatcaatacaataagcatcctcagaatgcagttcaggtcctccggctcccgcaggtccagcagatccgggttcacgcagccctccatccgcttcaaaatgtgatccgggtccagaaactccagcaggccgcccttctgcaagccgtcgttgcggttgacgatggcggacatcatacccatgccccccaaactgcggtccgctgaccggcggctctgaagatgatcgtacatggccggcagggctgcgaagatgtcgccaccctgactgcgaagcacctcctcaaacaccataagcatctcgttgatgctctcctccatcagatagtggaacaggtcctccttatcccggaaatacatgtaaaagctgccacggggaattcccgcctcccggacgattcggttgatggacgcctcgttatagggccgctccgtaaattcccggactgccgctgacagcagcttttcctgcttttccggtgccagattcaaaaatgtactgctaggcaagccgccagcctcctttcgatccgtaatgatctccctaatatctgggacagggtcccgcacaccccttcctcccatcgagaaagcctgtgcggaaccggatac

SEQ ID NO: 12265 - DNA, 8028 bp, Unknown
  gut microbiota DNA sequence
gtaatcccggcgctccattttttgcttttttgagaaatatggcctttttgtaggctgcacgggaagaaaatggatagaaatgaatgggtagctgatatgcgcatcagattctttatccaaaaaaatgaatagagcgctcagcgagaaaactggaggggaaataggaataactctcatgaaaagtgtccgtaatacgaaaaaaagtatcagttttttgtttctgctctgttgacaaatgcgaatgattcaggtatcatatatagcaactatttgcaggtctcttgtgaaatgcttgcaaaaaaacgaattggaggcatgtatgaaaagattgctgagcacactgcttgccatgaccatggccctgaccctggtttcctgcggcaagagcaaccccacccccaacactggcagcaacaaaaccgagactccttctgagaccgctgacacgaaaaccgagggtaacgtccacatcggcatcgtgaccggctccgtttctcagtccgaggacgaccgccgcggcgccgaggctttccaggccttgtacggtgaggatatggtcaagctggccatctatcccgataacttcaccgaggagttggagaccaccatccagaccatcgtgaacctggctgatgacgccgacatgaaggccatcatcgtcaaccagtccgtccccggcaccaccgaggcgttccgtaagatcaaggagatccgccccgacatcctgtgcatcgccggcgaggcccatgaggatctgctcgagatcggctccgctgccgatctggtgtgcaacaacgacttcgtggcccgcggctatctgatcatccgcaccgctcacgagctgggctgtgacaccttcgtgcacatctccttcccccgtcacctggcttatgagaccatgagccgtcgtatcgcggtcatgaaggccgcctgcgaggagttcggcatgaagttcgttatggagactgctcccgatcccacctctgacgtcggcgtggccggcgcgcaggcttacattctggagaaggtccccgagtggtccaagacctacggcgagaaggccgcttacttctgcaccaacgacgctcacactgagcctctgctcaagcagctgctgcagtacggcggttacttcatcgaggccgacctgccctctcctttgatgggctatcccggcgctctgggcatcgacttgaccgctgaggccggcgacttccagaagatcctggccaaggtcgaggacgcgatctgcgaggccggcggcgctggccgcttcggtacctgggcttactcctacggctacaccaccactgccggtctggcccagcacgctctgaatgtcatcaacggcgagagcgagctgtgcgacattgacgatatcgccaaggcttaccacgagttctctcccgaggcttcctggaacggctccaactacaccaacgccaccagcggcgtcaaggccgacaacaccttcttggtgtatcaggacacctacatcatgggtgatcccggctggttcatgggctccaccgaagttgaggttcccgagaagtatttcaccgtgaaataagcagcgttttttctcgctcattcaaaactggggaggaggggcgaccctcctcccctcttattaggtagggtatcatttatggaaagtaatacggctcccctgttggagatgcgcggcatcaaaaaagacttcttcggcaaccaggtcctgacggacatcaacttcactctgaaggccggcgaggttctgggcctggcaggcgaaaacggcgcgggtaaatccacgctgatgaagatcctgttcggtatggacgtcatccgggaaaccggcggctacggcggcgacgtcctcatcaatggtgaaaaagtcacctttaatacgccctttgacgcactggaggccggtatcggcatggtgcatcaggagttctctctgatccccggctttactgccacggaaaacattctgctcaatcgtgagccccaaaagaagaacgtcatttccgaggtgttcggtccccgactgaatacgctcgattataaaaaaatgaaaaccaaggccgcagaggccattgacaagatgggtgtggagatcgaccagaacatggtcatcagcgacatgcctgttggtcataagcagttcaccgagatcgctcgtgagctgagcaaggaccagctcaagctgctgatcctggacgagcctaccgccgttctgacggagaaggaggccgcggctctgctggactccatccggggcatggcgtcccgtggcatcgctgttatcttcatcacccaccggcttcaggaagtcctgaacgtatgtgacaaggtagtcatcatgcgggatggcaaggtagtgaaggacacgcctgcctccgagaccagcgtggatgagatcaccaggtgcatggtgggacgcagcgtggacctcagtgcggtccgggaggttctggattgttctgacgcccggacgatcatgtccatccgtaagctgtgggtggatatgcccggcgagatcgtccggaatgtgaatctggatgtcaaggagggcgagatcctcggtatcggcggtctggcaggtcagggcaagctgggtattcccaacggcgtcatgggcctgtatgaggccggcggcaccgtggaatttgacggcaagcccattcccctgaacaatccccggaagtgcctggacgcgcagcttgccttcgtgtctgaggaccgccgtggcgtgggcctgctgctggacgagacgctggaatggaacgttgccttcccggctatgcagatccagaacaagttcctgaaaaaatacggtcctatcacctggcgcgataccaaggcgatccatgatgtgacgcagaagtatatcgacgagctgaagatcaagtgcaccagctccaagcagaaggccagagagctttccggcggcaaccagcagaaggtgtgcctggccaaggcctttgccctgcagccccggttcctgttcgtttcggagcctacccgcggtatcgacgtgggcgcaaaggcactggtgctggacgcgctgaagaaatttaaccgtgaaaacggcgttaccgtggtgatgatctcctctgagctggaggagctgcgcaccacctgcgaccggatcgccattgtctctggcggcaggatcgtcggcatcctcccggccaccgaatcctccgagacgttcggcgcgctgatggtcagccaggtcaaataaggaggaagtatggataacacgacaaatacacttgcggagcagagcaagctgcggcggctcgtcaacagctatggcgtgccccgcctgatcatcaccggctttttgctgctgatgttcattctggcgccggtggccggcgtggactttgccacgcagatcaccaacgtcatcaaccgcttcagctggaacgccattatggtgctggccatggtccccatgatccactccggctgcggcctgaacttcggcctgcctctgggcatcatctccggcctgctgggtgcgactctttccattgaattcgggttcaccggcggcatgagcttcctgatggccattgtcatcgccacgccttttgcactggtgctgggcggcggctacggctggatgctcaataagatcaagggcggcgaaatgatggtcgctacctatgtgggcttttcctccgtgtcctttatgtgcatgatgtggctgctgctgccctacaagagcccaacgatggtttggggctttgccggtaagggtctgcgtaccaccatctctctggagggcttttacgatcagttcctggcaaagtttttgcagatcgacctgaaccggttcggcatcaatctggtaatccccaccggcagcctgctgttcttcgctctgctggcattcctgatgtgggtcttcctgcacactaagaccggtaccgccatgactgctgtgggctccaaccccaccttcgccaaggctgccggtatcagcgtggacaagacccgtctgctgtccgtggtgctttccacttggctgggcgctgtgggcatcctgctgtatgagcagggcttcggctttgtacagatctatatggcgcccctgaacatggcgttccccgccgtggcggctattctgatcggcggcgccagcgtgaacaaggccagcattaccaacgttatcatcggcacgatcctttatcagggccttgtcaccatgacacccaccgtgatgaacgccatcgtgcacctggacatcagcgaggtcatccggatcatcgtctctaacggtatgatcgtttacgctctgacccgtaagacggaaggagggaaatgagcatgaaaaagacgaatgtacccggtagccagagcttcgggcagaagcttttgcagttcatccgcaacaacaccgtccccattatgttcatcctgatctgcgcgtactgtattccgcaggcgggcttttcctggtcctacctcttgaatgaggtcatgacccgtctgggccgtaacgcattcttgatcctgagcctgctgatccctgttatggcaggcatgggtatgaactttggtatgacgctgggcgccatggccggcgagatcgggctgatcttcgccgctgactggcaggtttggggcatccccggcatgatcctggccgccatcgtttccatccccatttctgtggcattgggcgtgatgatcggcaagatcctgaaccgctccaaaggccgggagatgatcaccagctatatgatctcctttaccatgaacggcgtgtaccagtttgtggtgctgttcatgatgggccccatcattcccatcgttcatgattccctgaagcttccccgcggctacggcatccgcaacaccgtgagcctgctgagcatgcgtcagagcctggacaacctgctggctgttcaggtgggcggcgtgaagatccctgtactgaccctgctgatcatcggtctggcctgcctgttcatcgtctggttccgtaagaccaagctgggccaggatatgcgggctgtgggtcaggatatggaagtggcccgggatgccggtatcaatgtggagcgcacccgcgtgatctccatggtgatctccacggtgttcgccggcttcggcatgatcatctatctgcagaacgtaggtaacttccccacctatacagctcatacccagatcggtatgttcgccatcgcggctctgctggtgggcggtgcctctgtggatagggcgagcatcggcaacgtatttttgggcgtgatcctgttccacaccatgttcattgtggcacccaagaccggtgctgccattaccggcgactccatgatcggcgagtatttccgcgtgtttgtgtcctatgcggtcattacgctggctctggtcatgtatgagtccaagaagcgcaagaacaagagcctggcaggccagcagttggctgccgagcaggctgcggaagaggaggcatcgaaatgaaagcaaagcggagacttctctttcaaatcttagcggtggtcctgctggtggcgatcggctataccatgaccatcattggccgtgggcatacgatctatctggacagcaagaccctggaatatgacggccagacctataagcccgcctataagacggtggtgtatgtggatggtcagcaggtagccaagctctatgacaaggagcgcggcgttgctacctgcatcggccagacgctgaccgtgacgctggagatcacccagcagaagggcggaacggaagaggtttacgcctataacatccccgttccccggaagatggacaatgtgatcatcaacctgcccggtttcctggcgggactccccgaagaggcgtacctcagcgagtttatcccctctccggacgaggtggcggcagacgagaccgatgttccctccgacgatgatttcggcatggaggatatgggcatgggcgacgagtccgcagctcagtaaatcggctgagaacggccaaaccaaaatccaaaatagaacggcagccctcacgatgaatcgtgagggctgcgtttttgcatataatacccgcatatacggcaagaagcagccggtacggtggaaggaggggtgtgggcaatataatataggagagcctctgcactccggggagcgggaagcgaagcacctatgctgaccggtccgactatgccacgtttttgcatttccgacagcgctaagcccggtgtattcaaggggggattgggtgtagggtgcaatcaaacgtaggaagagatcgtaaaatccgtcccatcggctaaggccgatgggacggattgttatctgatatggaaaccgatcaggcgttgttaagctgcttctggagccaatccttgccttccacgaagcgggagacgatgtagctgaccacatagtcgccggcggagttgatcatggtagcgggagggtccaccagattgccgatagccaccagaatggggaaggccagttccatctgcgtggggaagaagatggagcagatgatgtactcgccgatgtagccgccgccgggaacgccgctcataccaacagaggacaggacggccaccagaacgatgaagggcagacgggaccaggagagctgctcgccgaacacgcccagcacgaaggcaatcttcagcacgcaggagaagcaggagccatccatgtgcatggtagcgcccaggggcagcaccataccggcgatatccttgctgacaccggtctctacggcttcctccatgttggtggggatggttgccacggaggagcaggtgcccagagaaacaacggcagggcgggcaatgtgcttgaacatgatgcccacggcacccttgccgccgccgaaccacgcgaacagggggaaggccgtgaagatatagatgaagcacaggggatagtagaccagcagggcgcggccgtagcccttggcgacctcagagccgtaggtggctaccagatcagcgaagatggcgaagaacgcgataggggcatagtaggtgatgatctggacgaacttcatcatcacgtcggaaaggccggccagccacttgccgatgctggaatccttgccgccggtcatctggacggagaagccgaacaggatagagaacacgatgagaggcagcatggcccggcggctcagcaggcccacaaagtcggaggaggtgaagaagttgacgatcatctccgtaaaggaagcgtgttcaccgatctcctcggccaccatatctgcccagggggtcagcaccggggggaacagcttcatcagcacgaacataagcacagcggcgatggcaccggtgatgacgaaagtgccaacggtgacgcccatgatcttgcccgcccgctggcggctttccatattggcaacggaaccggcgatggaggcaaagaccagaggcaccaccacgcagaacatcatattaataaatacggtgccgaggaaggcgatgctgtgtccccacttgggcctgaaccagcccagcaaagcaccggcgaccatgcagctcagcagaatcgccagaaagcggtagtttttcgcgacagatttcttatccataaaacacactccttttggtttggataacagatacttgggttggcaaactttatcaattcagcgaaagctcctcgtccgtgacctcgcccttgcagacaatattggtgggacctgtaagatagaggttttggacggcgtttccctggagatctacgtctacaatgagctggccgccggtcatattgacccggacctgttggccactgacttttcccatcagtggaagggcggtgacaacgcagccggttcccgtgccgcaggcataggtgaagtcctccacaccccgctcaaaggtgcgttcaaagacctcatcctcaccggtgagctcacagaagttgacgttagcgcccttggggaattccggatagaagcggatcttgcgccccaattcacgcagcgcgttttcgtcggcctgtgccagattgggatacgggaccacagcgtgggggagtccgggatctcctaatt

SEQ ID NO: 12266 - DNA, 635 bp, Unknown
  gut microbiota DNA sequence
gccgtcgatcaccacaggcgcgtccaaacggaccgtagagggatcattcagacgaattcgatagagacgctggtcgatgcggtggcctgtcaccagaccggcggtggtttctacacgctggatctcgccggccagaccattttcgtagccgtagcggcagatgcagcgggcaccgttgccgcacatttcaccgaggctgccgtcagaattgaaaaacagcatccgatagtcaccgccctgaagcggggcatctacgatcatcaaaccgtcggccccaatggacagatggcgttcgcacagagtgcgggccaaagtgggaaagcaggtttcggaaagatgctctaccatattatttataatgataaagtcattgccggcaccgttcattttccagaaccgcaagtaaatcacctcaaagcttggtatgatgttgtattatagtaaaggaaagctgaaaaaaacaccggatattgtgcgaaaaaccatgcaaaaagtgcttctgacaaaaaactcgaaaaaactcgaaaaaaatgcttgacatttcaggcatgttttggtatcctaataaagctgtttgacggcgatgaagtgaatgagtcgggtgcttgaagatctgaaaagatcggaaagaaaaa

SEQ ID NO: 12267 - DNA, 2647 bp, Unknown
  gut microbiota DNA sequence
cggtacctctcacggcgcttataagttcaagcccgagcagtgcacccgcaatgaaaagggcatcctggttccccctcccctgcgtttcgacgttctggaagaggtctccaagcgcctgcccggcttccccatcgtgctccacggctcttcttccgtgcctcaggagtatgtgaagatggtcaatgagttcggcggccagatgcccaacgccatcggcgtgcccgaggagcagctgcgtcaggctgccaagctgtccgtctgcaagatcaacatcgactccgacctgcgtctggccatgaccggcaccatccgtaagtttatggcggagcatcccgacaagttcgatccccgcgagtacctgaagcccgcccgtgccaacatcaaggagctggtccgtcacaagctggtggacgttctgggctgcgccggcaaggcctgatttggttttatcggattgattttaccccaaacgcaccgggagacagcgtctcccggtgcgtttttgtcaaatcgccagcttttgcggatgataacgctcttgcacattccggtaccctatattataatgtaagggcatttgcaataaacgaaaaggaatgtggctatgtttaagatcttgaaaacagaggggaaggcccggcggggcgaattctcctgcgcccacggcggcacggtgcagaccccggtgtttatgaatgtgggtacgcaggcggccatcaagggcggcgtttcggcgttggatttgaaaaatgtgggctgccagatcgagctgtccaacacctaccacctgcatctccgtcccggtgacaaggtggtgcggcagatgggcggcctccataaatttatgaattgggatgggccgatcctcacggactccggcggatttcaggtgttttcgctggcctctctgcggaagatcaaggaggagggcgtcaccttcgccagccatatcgacgggcaccggatctttatggggccggaggaatccatgcagatccagtccaatctgggcagcgacatcgccatggcctttgacgagtgcgtggagaacccggcccggtatgagtacgccaaggcgtcggtggagcggaccctccgctggctccagcgctgcaaggtggagcatgaccggctcaacagcctgccagacacggtgaacccccatcagatgctgttcggcatcaaccagggcgccaccttcgcggatcttcgggcctggcatatgcaggagatcgccaagatcgactgcgacggctacgccatcggcggtctggcggtgggggagcctgccgaggtgatgtacgagatgatcgatgtggtggagccctttgcccccaaggagaagccccggtatctcatgggcgtgggaacccccagcaacatcattgaggccgtggcccggggtgtggacttcttcgactgcgtgatgccctcccgcaacggccgacacggaaagctctttacctgggagggcaccgtgaacatcatgaacgagaagtatatcaccgatgaccggcccatcagcgaaagctgcaactgcccggtgtgccggagccattccagggcctacctgcgccacctgttcaaggcggacgaggtgctggccctgcggctggcggtgctgcacaacctctggttctacaatgagctgatggccaagatccgggaggcactggacaacggcacctttgccgacttccgggagaaatacagcggcaatctcgaaaaacgggcctgatttggaacggttttgtctgctgcggccggtaagaggacttgacaaaccggcggtttgcgcataaaataaatccgttatcgactgagatggggaaaaagccctggtatcccgccttcagagagccggcgtttgctgcaagccggtgggggagcctgggaggactggccccggagtctttcgcctgaacagcagtagggcggaacggctggcatcgttatctgccgcaccgagcgccgggaaaccggcggaaacagggtggtaccgcgttttcaacgcccctgagccgtaaggcttaggggcgttttctttattcggcggaaagcgtgaggtgttgcagaatgaaaagctgtgggattcccccgttccttttctggcctatggcgttccctatgcgtatctgggcctttggggacatggggaaacgggtggagtattggcaaatttcctgtctatcatcggcgtgattacgctgatgaaatgggcataccacagaaaaagtctgaaagccctgtttttgggaaacgccctgtccctgctaatatcctgtgcctgcctgtccgtgttcggaacggagaaatggggcgggacctttgaacccgcaacagcttttcagatgctgtgcgcggcagcgttgctcgcactggctgttcagctggtctggtggcgcgtcaagcagcggacacaaaagcggtcctgagatcaaatcaatcaaaatgcagaacatttcagataaaaggagtcaaccatgaagtacgattttacagccattgaaaagaaatggcaggagaagtggctggaggaaaagcccttcaccgctgtcaccggggacaagacccgggagaagttctacggcctcatcgagttcccctatccctccggtcagggcctccacgtgggccacgcccgtcc

SEQ ID NO: 12268 - DNA, 651 bp, Unknown
  gut microbiota DNA sequence
gagcagttttttccacgttgtcaaaatggccgtaccaaattctgcattgcctgttttcacggcaaaaaccgcccgggtcaagcccaaggcggtctttcgcgcgattcggaacgtttcctccgcaaaacagctcccagagggcatttgccggctgcggagtatttctcgacagagggaatctttcagcttgcaaggaaggtttccgcgatggtgggcagccgggcgccgaagccctcagccgcttccgccggataccgccacgaaacagcataggaatccgcgccgcccgcagccacaaagaaagaaaggtattcgcccttttcatttgtgcccgtcagcgggtcaccggggctaccgcccatcagatcctcaaactcatagccgctggactgagcaaaggcatcccgcgcctccgtgaccgtcatatccccatagcgggatacagacagcgccacatcgctgttgaaggcgctgacccaggtatccgtcggaacgtcgctctccgcggactgctccgggccgtcccagtcctcatcgggaatatagagggagtacccatccccgacatacagggtggcaggcagagcttcttcctcgccctcaacgaaaaaggtcaagtcgacctgttccgcacgggcaggcgtctccggc

SEQ ID NO: 12269 - DNA, 196 bp, Unknown
  gut microbiota DNA sequence
aggtaggggataaacaccagctgctccaccagcttgccgtggagcttgccgcggcccttggcgcagatatagccgagcatctgaccgaagatggtgccgaacacgccgttgacaagggtcagcttcagggagttcaccagagacatcataaaggtttcattcttgaagatgccggagacgccctccatgatgttgg

SEQ ID NO: 12270 - DNA, 4608 bp, Unknown
  gut microbiota DNA sequence
taggataatgatcggggttatcaggccgtcaagccggaacctcttgcagcgcaaggctttcgagagttttcacggtagtagtcaaatagtagtctgtgcgccccgcaggtcatgatatctgatggagccgctcccgctttcagcatacacgaaccgcatacttcatgcgattcctgtaccgcgtcgatttgagcagtcccagcttttcaaatttcaggacaaagctgcggatcgtcgcatagaatttttattcctaccagcgccctgtcccattcatcagaaccgtgcgtccagtgaagccgcagtgtgctcttttgatgaatgccgagcgtgtacttctctcgatgggaaaacaaattacgcaccctcgtgttcctccagcagatcggtcatgtttttcaaaccgatgcccaatgtggaggtattgtgcagcagcgcggatattgcgggcggcagtacccccgctacgcccaaggtgatcagcgacaggttgaaggccacgataaaccggtagctgccgtggatccgatccatcagcgcttcactgagcttacgcagcgtcaccagctcaaagagatcctccgaggcaacggtgatgtcggcgatctccctggcgatggccgcgccggtggagatggcgatgccggcgtccgcctcggagagggcgggagaatcgttgacgccgtcccccaccatgataacggtgtgtcccttttccttttcctgacggataaaggcggccttgtcctccggcaggacctctgcgtaaacggcgtccacgcccacctcggcggcaacggactccgctgtgcggcggttgtcgccggtcatcatcaccacattggtaaagccgctctcatgcagcgcttttaccgcgtccttggcctcccggcgcagaggatcgtggatgcagatgaccgccgccagttccccatcgatgcagagatacagatgggaatatgcggcgggcagcgcgtcatatttctcctgctctccctccgggatatggcagccctcgtcctcaaagacaaagtgggcactgccgatgatgacctttttattttccaccatactggaaatgccgtgggccaccacatactgcacctgcgaatggtattcctcatgggtaaggccccgccgcttcgcctcctccaccacggcgttggccatagagtggggatagtgttcctccagacaggcggcgaggcggagcatatccgcttcccggtgtccgccgaagggaacaatctgtgccaccttcggcgtggcgtaggtcagcgtaccggtcttgtcgaacacaatggtatccgccttggccacagcctccagaaaacgcccgcccttgacagaaatgtgatgcccgctgctttcccgcatggcagacagcaccgcgacagggatcgccagcttcagcgcgcaggagaagtccaccatcaaaacggccagcatcttggtcacatcgcgggtcagcagataggtcacagccgtgccgcccagcgtatagggaaccagcctgtccgccatgcgggacgccttgtcctcagcggtggatttcagcttttccgattcctcgatcatgcggaccacccggtcatagcgtccgctgccggataccttttccacgcagaccacacactcgccttcctcggccaccgtaccggcataaacagggctgccgggccacttggccaccggcatggattctccggtgagagaggactggttcaccatggcctcgccctccaccacccggccatccagcgggatcatgccgccggtgcggatcacgatgcgatcccccggcttcacgtcggtgaccttcgtcagcacctcggtgccgtctacctgctgccagacgttttctacccgtaggctcatggcggaggcaagatcggccacggacttcttgtgggtccactcctccagaatttcccccagccgcagcatgaacatgaccgaaccggcggtggcgaaatctccccgcaccatagacacagtgacggcggtagcatccagcacggcaacggacagcttccggtgccacagggccagaagcccttctttgatgtactttgcggagcggatcacagccagcgccgacgtcaccggcgccggcagaaacaggttggaagcgcagcggcgcataacagtgagggcgagcttatcctcaaattcccggttcaaggtgcgggaggtgtgctccggcgccagatccagcttctccgctttttcaaaggagaaccgggccagcgcacggatcatgcactcccgctccgcgtcatacaccaccacggcgtcccgcgtccggtcatagaccttgacggagcgcacaccgtctaccgccagcagatagtattccagcacgtccgcctgccgcagcgtcattcgcttgcagcaaagatggacccgcagccgcccggccgtatcatgtaggatcgtgcatttcatggatcactctgcctggctttcctcttctgcggaggtatcctccaccacattagcggtctcggcctccgtgcgctgggcgttgatggccttggcctccgcatagacgtcatccgccccctcacgcacagcggtcacagcggtcatcacgctgtcctttgcccgcagggcggcagcggtggtctgagcgtaggctcttttcgcgtccttgctgcccagcagcttcataccggcggtaccaaacagaacgcctgcggcaaacaaaccaattttcttcataacaattatcctcctatatggattttatttatttcaaaccgatggccggaaagccggaccacaggaatgagctcagtccttcttttttccgaaatgaaacagtccctttttttcatacgtttccgcatggatctcccccgccgtgtagccggtggcgtcaatagcagtgcggagggcgttttcgtccagcggctccttagagaggatcaccgtctcccccttggaatgggaggatgtgaccttctccaccgggaatgcgccgcgaacggcgtcgttgatatgggcttcgcacatggagcaggccatgccggaaactttaactgttgtctgaatcataaaaaacatcctttcctgtcattttttcttatagccgcagtcgcagtacggcccgccggaggcaagggtatactgccgcctaaaatccgccgtgccgcccgcttcgctcatggtgtagtccagatggcacagggccggagtcaaatcgtacagccccagctcccgcatcaaaacgcagataccgcacttggtaaaccgggcctcgtagccgctgccgtcggggtactcgtaaaagtccatattccacgaataggggttccggtcggcggccttcagcgctgccgccgcttgcagtccggcaacgctttggggggtgaactttttctcgccgcttttacggcagaaccagcgcataggctttgtcatcatggtcttggcgtaatactccgtcagtcgatccacattgggacgctccggcatggtaagaacgaagccccccagcatggcgcagcccacgagattgattttgaagcggtcccccttctcaaactccggcaggcggctgaggatctccttgtattttgcttttgccctccgtgtgatcgcctttgccgtttgctcgttataccccagcacatcggtcaactgtgctcgaaaggagcccgcaaacagcgtccacatcccccacggcattcccatgtatttcatagcgttaccccaccttttccttcaccgccggttttacacattccgcataggtcagccgaaaggacgctttcagcacggcgctcttccgcaccgtccagccgttttgccgcaggaagcacaggtattcctcgctcgtccacctgctgtggagggggaagcctgccagcttcatgaaaaatgccctgaccttgccggaaaatgagtttcccgcgtgggtgaaggtcggcgcaatcaacacaccgtcatccttcagcacccggcggatctctgcaagggccttctccggctgtgggacgacatgcagcgcgttggatacgatcaccacatcaaaggacttgtccgcatagggcaggcagaacatatcccgcaccgaaaagtgcaactttgcggagcggttgttccgcttcgcctcagcgatcatttcctcggaggcgtccgtcacctcgatatggcttgccgaacgcacgatatttttggcgatcagcccggtcccggcggcaagttccagcaccgttctggcttttacaaccggtcggatcagttcatacagcttttcgtatgccgcccggtcctttcgcataaagcgatcatagcgcttcgcgtttttgtcccagaaattctcatattccttcatagctgctgtcctttttgcagttagatgaattcaacctacatatatgcaaggtttttgttaaagttgactaactgccgtgctttgaaaaaccgcgtttccgcggttcttccgcctataagcttacttgcggtagctctgtttcgccgtgaagcctccggtatgaacgttctccgtttccgggatcgacctccacagcatcatcttttttgtcatatagtagcacagtacattcaaatgtcaagagctccggaactccgcaaggctat

SEQ ID NO: 12271 - DNA, 1544 bp, Unknown
  gut microbiota DNA sequence
tttccgctatccgctcccgttggggtcagcgtttgggtcagaaaaagtggcaagtaagatattggacgcaaaagtgcggaaaaagtcctgatttcgcaagaaatcaggactttctggttgcggagacaggactcgaacctgcgacctccgggttatgagcccgacgagctaccaactgctctactccgcgatatttatttttggtgccggtgaccggactcgaaccggtacagtattgctaccgggagattttaagtctcctgtgtctaccattccaccacaccggcagcttatcggcaaatattaggataccatactcccggggaacttgtcaagaggaaactttaaaataaggaaagaaaattgaaatgccgcgaaatgccacggcatttcaatctggagcggctgatgggagtcgaacccacctatgcagcttgggaagctgccgttctaccgatgaactacagccgcaggaacgtattgtattatagcagacctttctttattttgcaacacgaaaaatggcgggtcttctgaaaaagttagaaggatctccgggggtcaaatgacggcggcatgaacgcctttgcacactcatataatgcaccgatcagaaaggggaggtcatcatgaaaaaaatcctggcgctgatgggcgccgtattgctgctgagcgtcagcgcccgggctgtggaggtgtccgctccctcggcactgctgatggaaaaggagacagggaccgtgctgtttgccaaaaacgagcacgaaaagctggagccggccagcgtcaccaagattatgacgctgctgctgaccatggaggccattgacggcgggacactgcgctatgaggacaccgttaccgcctcacctcacgcctgctccatgggcggcagtcagatttggctgaaggagggggaacggctgaccgtggacgagatgctgaaggccgtgtgcgtggtatccgccaatgactgcgccgtggcactggcagagcatctggccggcagtgaggaatccttcgtggagcggatgaaccggcgggcagcggagctggggatgaatgacactactttcaaaaacgcctgcggtctgccggtggagggccacgtcacctctgcctacgacattgctttgatgagccgggagctgatgctgcgccatccggatatccgaagatacacaacggtctggatggacacccttcgagatggggcatcctcactggtcaataccaacaagttagtgcggttttatgacggcactaccggactgaaaaccggctccaccaacgctgccggatactgtatctctgccacagcggagcgggagggcatggagctgatcgccgtcatcctcaagggaaagacctctccggagcggtttgcggacgcgcagacgctgctgaattacggttttgcatcctacgccctgaaaaccgttatccccgacgaaccgctgccgccggtgccggtgaagttagggacgcaggctacggtccagccaattcttggggaagaaaatcagctgctgctggaaaaggcc

SEQ ID NO: 12272 - DNA, 9341 bp, Unknown
  gut microbiota DNA sequence
tcctctgtcacttttaaaaatatcacccgcaccgcccgctcatatcggtccggcgcgaaattttcctggataggcagccccggcaccgccgccgcgatgccgttcacccgcaggaccggaagccggtcccgctcctgtggggaaattccccgctctccgcacaggcgcttgacagtgcggccgttcagtcggtccttggagtcccaggccgtcacagtcaggtcggcggtctccgagatggaaatgagaacaccctcaccggccgactctgccagactaacctgccactgaccgaatgtgacggtctctcccacggaaacagcctgcaccgccggcgcagacgccgccttgaaaaagcgcagcgccgccggctcccggaggaccgtgacgccgtagggcatggaaagctggccccggtccaacgtcaaaaccgcccggatatgagcggcggtcaagtccttttcatggcctgccaccgccgccagcaccgccagcaccagccgtccccgcagggcctccggcgcgtcttgcagcatggcaagaggaactgtcccggaaacgtttgggggcacggcgcattgggccagcagttttcgacacgcagcgtccagagccgcttcatccgccgccagcagcgatgccgtgcggctcatgttctccacaactctgggattcagcttcttcaaaaccgggagcacctgatggcgcagcatgttccgggcggcatcgtccgtcccattggtggaatcctccacaaaagggatgcggtgttctgcggcgtaggccgccagctccgcccgggtcacactcagcagcggacgcaggatacagtcccgcttttccggaatgccagtcagccctttcaggcccgtgccccgcagcagatttaacagcatggtctctgcgctgtcatcggcgtggtgggcggtcagaatgcagccaaagccctcccgccgccgggtctcctccaaaaatttatagcgcaattgtcgggcggcttcctcaacggtgcgcccggtttcctccgcaaaggcccggacatcgccccggcccgcgaaaaaaggaatttcacgggcggcgcaccagtcccggacgaaggcctcgtcccggtccgcctccgccccccggagctggtgattgaaatgggcagcggctacccgccgtccctgcttctgcccctgccggaccgtcatttccagcaggcacatggagtccagtccgccggacacggcgcacagtgcgccgccctccggcagctccaccgccgtcagagaatcagtcatcctcatcatagcggttttccagcgtggcaaaggtggtgtactccggcatccaccgcagttccaccttgccagtctcgccgtgacggtttttcgctacgatacactcggcaatattccgcttttcggaatcctcgttatagtaatcgtcacggtacaggaacattacgatgtcggcatcctgctcgatggcaccggattcacggaggtccgacagcatgggccgtttgtcgtcccgcttctcgttagcacgggacaactggctcaggcagatcaccggcacattcagttccttggccatgaccttcagcatacgggacatttcgctgaccacctgctgacggttctcgccgctgcgtccaccggatgcggaggtcatcaactgcagatagtcgatgactaccaggcccaagctgtcgatccggcggcatttggcgttcatatccgccacactcagcatggggttatcgtcaatacggatatccactctattcaatacgccggcagcggcggcgatcttctcccagtccgtctcccgcagagagccggtaacaagccgggtgttctccacacaggcctcggagctgagaagccgggtcgccagctgctcccgggacatttccagcgaaaacatggccacggtctttttctcagacttcgccacattcagtgctacgttcagtgcaaaggaggtttttcccataccgggacgggccgccagcaggatcaggtccgatttattcaggccgctgatcttccggtccacagcggacaagccggtggacaggcccggaagtcggctttcgctctcgctcatctcgttgagccggtccagcacatccggcagcaccatccgcagaggcaccatatcctgcgcactctggccgcggcggacggcgtagatcttctgctcggcagcttccagaatggcagcggcttctccgatgccctcctgcaccagcaccgtgatctcccccgccgcctgagcaacgccccgcagcaacgccttatcccgaacgatggccacatactccatcacgttggcgctggtgggggtgatctccatgagctgcgccagataggagcgggtggtattttcgtcataagtcccggccttttgcatctcctcacagacggtgatgccgtcaataggccgggcgtaggtgaacatggtgtagatggtctcaaaaatctcccggttctgccgcaggtagaagtccgagggcaccagcttatccatcacgtccttgacgcagccctcgtcgatgagcatggaacctaaaacggcctgctcgccctccaacgaatggggcatctgccgcagcagaagatcttcgttagccatggaactctccttcccgcttctccggaagcgcaagttagacattcagacatgcaatcatttttgtcagggcgtcccccaggggagcctctcttgcccctgcggggcaattcaccttctgtacctgacaaaaacacattgactcagctgccttgggcagcgttcaccagtgagcggatctcactggtgcgggggctgctcaaggggaaaccgccgcagcgccgccagtggcggaataagcaaggctgtttcgaggatgcggcacgatttgcagtcttatcatagagactgcaaatcgtattgccgcgacggtgtatcctgatcccccttgaattagtcttacttctcctcgcagacggtgacgtacacggtaccgctgacctcaaagcccagcttggccttcacctgatagctgccgtaggccttgatcggctcatccagcacgatcttctgcttgggaatatccacgccgtactgggccttcaggccctcggagatctccttgttggtcacggcgccgaacagcttgccgccgttgccggccttggcgctgagctttacggggcagttctggagcttcccggcgatctcctgcgcctcagccttcagccgggcttcctcggccttgcgggccttctccttcaggttcatggtgttgatggcgtccgccgtggcaggcaccgccagctttctgggcagaaggaagttccggccgtagccctcggaaacctcgatcatctcgcccttcttgccctgacccttcacgtcctgctgtaaaatcactttcatgttatatatcctcactttccgaatgttctgaatgaatttgctttttcaattcctgaagctctgcttccagcgcttcgaccttttgcgccgtactgctccacgcgcagacagcgaccgccagaatcagcgcaatcacagcgcctgcccgatagatgccggtacctctgagatcaaacagcatccacccaccaaagaagataaatacctccatcaggatcaggcagaccgcatacgccttcaaaaacgccttcataggccacctcacttttcaaagtatgcgtccagaaccccaatcaactgctgacggacactctccgggtccgtgtcctcgatccgtgcgcctgcggtggtagagttgccgccgccgcccaaggcctccaggatcacctgcacgttgatctcgcccagagaccgggctgacatcagcacagctccctcggcggcgtagatcacgaaggaagcctgaacgcccttcagggtcagcagatcgtccgccgcctgagctgccgcaacgcggtccacgcccggctcctccaccacggagaccgcgatgttgctccggtacatctccgcgcggcggatgatgtcgtatttcgtgaccatatccttcaaatcgccctggaacagccgctggacctcagccgtatccgcgccggaacgccgcaggaaggccgccgcctcaaaggtgcggccgccggtccgctgagtgaagtgcttggtatccagcacgatacctgccagcagcgcccccgcttcctcccgcagaaggtcggtaggctccaccagatattgcagcagctccgtcaccagttcgctggcggacgaggcgtaaggctcgtggaagttgaaggcagcattttcgatataagtcgctgcccggcggtgatgatcaatgaccgccacccggttgcaggattccaaaagctggggattttccaccatgtccggacggttggtatccaccaccaccagaagcgtgtcggcccgcatctgcaaaaatgcctcagcaggggtaaggaacacaccgctgtactccggcagcgcatccagccgggcgatcagggtctcagccgcagtgtgctcccggtcaatgacgattcgggcctgctttccacgcttccgggcggcgcagcagatacccgcggcagcgcccacggcatccatatccgcaaaggaatggcccatgatgtagacctctcccgcgtctgcgatcagctcccggaaggcgttggccatcacgcgggatttcactttggtccgcttctccgtggccttggtacggccgccgtagaaggcgaagtccacctgattccgcaccaccgcctgatcgccgccccggctcaaagccatttccagcgagagcttggcgtttttgtacagctccgggatactgggagaatccttgccgatgccgatggacaaggttgggtggatattctccgccacccggatggcccggacagtgtccagaatggagaacttttcgtctacaaaatgctgaaaatactgttcttcaaacaggaacaggtaatggttccggtccgttttcagcaggatgccctggcctgcgttggcccaggtctgcaatttttcatcgatctgcgccagaaccgcgctgcgctgggtatcctcgcaggctttcatcaggtcctcgtagttgtccagcatcaggatcgccgccaccgggcggctggcctcgtagacctctctcagatgatcagcctccgtagtctccacccagtaggtggtggccaccaggctctgcacgccggtgcggttccgggagcgcaccaggctgccgtagacccggaaacggtgattgttcagctccacccgctccgggctttcctgctttccgctcagcagccactggacctgaaaatccggtacagcctcggaaagccgcatctcaaagagatgctcccggacgccggccagctgcaaaaagctctcgttgctccagatgatctccccggtatccggccggaacaccagcgtgggcagaggggagttgatgagggtggacttactggcggtgtccacgctgccggtgacagagtcgatgtactgcaaaacgccctgccgccgcttctgattgctctgtcggaaatagaagtacagcagaacggtcagcgttccctcagccaaggccagctgccagttgacagggatggccgccacggcaaagagcaacataacggcgaaataaaattttaaattcggctccaacaggcgggagagtttcttattgctcattccttacctcattctccgatggggacaggctggcctgtccctcagaaatcatgaaattcatccgataggtttttttattatatcagtttaccggcaaatacacaatggtatttctactgaaatcttacgaaaacaggcgacaggcggggcggatacgcccgatggcggaaacgccccgctgccccgtggggcagcaggacgtttttttaagtggattccttttcatggagtctgatccaaagggtatgggccacattttgcggcagcaccgccgccagtgccgtctcgtccgcctcccggatggccttcaccgtgccgaagcgcttccgcagctccgcctgccgcttgggtcccagaccgggaacgccgtccagtacggagcgcatggcgctcttggtatggtgctggtggtgataggtgatggcgaaacggtgggtctcctcctggatctggccgatgagtgaaaacaccgcctgatcgttcacaatgccgatctcccggccctctggggtgaccagcgcccgggtgcggtggcggtcatccttcaccatgccgaagatgggcaccgtgcagccgaattgttccgccacctcccggacggcgtcggcatgggtcacgccgccgtcgatcaaaaacacatccggcaagggcagaaacttttcgtccccgtccgccgccctttgcagccgccgccgcagcacctcccgcatggaggcgtagtcatccgggtgcccgccggtcagttccttgatctggaaccggcggtaggcggatttcaagggctttgtcccctgatagaccaccatggaggccacaatgtcgctgctgccggtgttggaaatatcgaaggactccatccgcttcggcggatggggcaggttcagcattttttgcagggcttccagcgtatacgccgttttttcctcggcggtggtggcccgccggacctcctcctgtgcgttgcggaccgccatatccgccagtgtggacttctcgccccgctggggcacatggacccagaccttatgccccgcccgctgggtcagggcctcggacagttcctcgcagtcccccgtgtccacgcagagcaagatctcatggggcagaatggcccgcggcagataatactgggccgtgaccgccgccagcagctccgccgccgattcctccataggcgcggtcagcagttccgtctcccggcccaccagatcgccgttttccatgtgaagaacggcatagccgctcttgcccgccccccggaacacgccccacacgtccgtatcggcgcacagtcccgcgatgacggtctgctttttgctcagggcgctgatggcttggatacggtctctcagctgggccgcctgctcaaaccgcagggcctccgcctccgcttccatctcggcggtcatgtcccggaggagctgcttggagcgtccctccaacaactgggccgcctgctccatccggcggtcatattccgcctccggcatctccgggcggcagaacccgtcgcaccggcccatgtggaaattcaggcagggccgctccgcgccgatgtcccgcggaaactgtcggcggcaggtgggcaggcgcaaagcctgacataccgcatccactgcctgacgggtctcgtaccgcccgccaaagggaccgaagtacttcgcgccgtcattggcgggtcgattcaccagagtgaatttaggataccgcccccggctgaggcgcaccagcggatagcccttgtcatccttcagcaggatgttgtaccggggcatatgccgcttgatgagggagttttccagcaccagcgcctcaaattcgctggtaacgaagatcgtatcgaaatgatctacctgactgaccatctgccgggtcttgacactgtgggccgcgctgtcctgaaaatactggctcacccggtttttcagttttttcgccttgcccacatagatgaccttcccggtcttgtccatcatcagatagacgccgggctgtaagggcagatcgttggccttttcccgcagctcgtcctttgtcatgatttcgcctcctatccggcctaagaacaaaagagcatcactttacagtgatgctcttgtttggtgcgcgaggcgggacttgaacccgcacgtccgtaacggacactagaacctgaatctagcgagtctgccaattccaccactcgcgcgcataagcaatctttccggagagaaaactggtgcggctgacgggacttgaacccacacgtcgaatcgacaccagcacctcaagctggcctgtctaccagttccagcacagccgcaaacaaataccgcctaaaaaagactgcttgattattatagccattcgtatccataatgtcaaccagaatttgcggtttttctaaaaaaattttccgggcggcaaagccgcccggaaaacagggcctcaaagctgggacaaaacctcgccgatggggtccgtaatgaccagccccgccgccaaatcccgcgccaccggggatttgttgatgagggccagccggtccccacggaaatagttgataagtcccgccgcaggccacacattcagggaggtgccgcccacgatcagcagatccgcctgcgcgatagcgttcaccgcgccgtcgatgacccggtcattcagggcctcctcatagagcaccacgtccggcttgatgatgccgccgcaatcgcaccggggaacccctgtggtgtggaggatgtgatccagatcgtagaattttccacatttttcgcagtaattcctgtgtacgctgccgtgcagctcatagacctgtttgctgccagcggcctgatgaagtccgtcgatgttctgggtcaccactgccagcagcttcccctcccgctcccattctgccagctttttgtgggcggcgttgggctttgcgtcagggcaaagcattttcgcccggtaaaagcggaaaaattcttcgggattgcttttataaaacgtatggcttaaaatagtctccggagggtatttccactcctgatggtacaatccgccggtgctgcggaaatccgggatcccggactccgtggacactccggctccgccgaaaaagacgattttccgggccgcgtcggtccattcctttaatgttctgaccgcatccgtcataaaaatacccctccagtctgtataataaggaagttatctatgaacattcagattttcggctcctccaaatccttcgatacgaagaaggcggagcgctggttcaaggagcgccgcatcaagtatcagtatatcgacgttccctcaaagggattatccccccgggagtaccaatccgtcaagcagaaagttggctttgaggcactggtgaatacaaaatgccgggcgtacgaggagcttcacatggcctatatcaccccggacgctcaagaggaaaagctgctggaatatccggagctgttcaacacccccatcgtccgcaatggcaaggaggccactgtgggctactgcccggacgtctgggccaaatgggagtaaaatcttcccggagggagacactgctatgtgggacaacaccctgccgaaaaaccgatttctccgcttctgtatactgatggcccatcgctgcgggcggcataacgtggccatgcagagtgcggcgctggccttttacctgctgttcatgatctttc

SEQ ID NO: 12273 - DNA, 2481 bp, Unknown
  gut microbiota DNA sequence
cttacgtcaccgacaatcccagcccccaactcatggtattcggtctggtcttttccatctacttccccatgcgggccaccaactctctgatggccgccgtgcggacagcctaccatttaggcccgcccaagggctttatcactcaatggatcaaggtgctgctctataccgtgaccctcattgtcaccatcgccctgaccttgtctctgatgaccttcggagagcgggcgctgtggtacaccgtggagcattttcacctgccggaatttctggcgaagctgtgggtaacgctgcggttccccgtagccggggccgtcagctttctggcactgttcctgctctacgccctggcccaggataccatccaacccctgaaaaatatctgtcccggcgttctgttctctctggcagcgtggatggcgttcagctggctctattcctactacgccaaccacttctcccactactctgtgctctatggctccatcggtgccgtcattgtggtgctgatctggctgaacctctcggcattcacattgattctgggtgcggagatgaacggtgtgctcatcagtatgcggaaggaccgtctggagcagaacgtcaacgcaccaaagacatgaatcgtctgtcaaatctcagccgcggcctcgctgcgggaaaggaagctgttttatggatacaaaactgcaggaatatgcaaaattactgatcgaagtaggcctgaatgttcaaaagggccagactctcatcatttcatcgccggtggagtgcgcctccttcgcccggctgtgtgctgacgcggcctataacgcaggctgccgggaggtcatcatgaactggagtgacgactatctcagccgacagaagttcctccgggcggatgcctccgttttcgatgacacgccggagtggcgcgaaaagtttttcaccagctatgcggaaatgggagccgcctatcttgccattgccgccagcgatccggaaactttgaagggcgtggaccccgaccggctggtccggtctcagaaatccggttccgtgctccgcaagacctttgaccggctccagatgagcaacggcttcccctggtgcatcgcctcggtgcccattccctcctgggccgccaccgtgtttccggagctgccggaggatcgggccatagaaaagctgtgggatgccattctccgctccgtccgcattcagggagacggcaccgccgtttccgcatggcgccagcatctggacaccctgggccgccggaaaaagctgctgaacgagtaccatttcaaatacctgcactacaccaattctctgggcactgacctcaccatccagctgccggaggaccatctctgggccgccggcaactccgtgatgaaaaacggggtggagttcgtggccaacatgcccacggaggagattttcaccgcccctttgaaaaccggcattaacggcgtggtctattccgccatgcctctggtggacagcggcaacatcatcgacaagttctacttcatcatccgggacggcaagattgttgaggctcacgccgaaaagggtgaggaattcctgaaagccgccatcagtgtggacgaaggcgccagctacttcggagaagtggctctggtcccctatgacagccccatttccaatcagaagatcctgttctacaacaccctgtttgacgaaaacgcttcctgccatctggccttcggcgaggcatatcccgagtgcattgaaggcggcgagtccatgacccgggaggaggtacaggcccacggcctgaactattcgctgacccatgtggacttcatggttggcaccgccgacctctccatcgtgggcaccacccatgacggccgggagatccccgtctttatcaacggaaactttgccatctgatgcggcagacctaacaagaaagagagaattatatgatcacaaacccgaaatttgacgaatccgtttttgtctgtcccggtgccgccatcgtgggagacgtgaccctgggaaagaatgtcaacgtgtggtacaatgccgtcctccgcggagatgacggtgccatcaaagtgggcgacaacaccaacgttcaggactgcgcagtgctgcacgaggaaaccacggtcggttccggctgcaccatcggccacggggccattgtccacggctgcaccgtgggcgacaacgtgctcatcggcatgggcgccaccattctcaacggcgcaaagatcggcgataactgcatcgtaggcgccggggcactggtcaccggcaaaatggacgctcccgccggctccatgatcctgggcagccccgccaaggtggtccgtcccctgacggaggccgagatcgagagcaaccgggaatccgcccgggaatactgtcatcaggcagaccggtaccgcgaggactgatttgcgccaaaaatagggaaaacgctgaaagaagcccggaatttcacacttctttcggcgcttt

SEQ ID NO: 12274 - DNA, 2213 bp, Unknown
  gut microbiota DNA sequence
agacccgacgggtctttcacctctcgctgcccatcttcgcggagcttctcttacagcttctggtgggcaatatggaccaattcatgatctcccacttcggctccgccgccgtggccgccatcggcaacggcaatcaggtgatgaacgtggtcatcatcgtgctcaccaccatgagcaccgccgccaccattctcctgacccagcacatcggcgcaggccgggtcggtgaggaatgcagcgagatcgtcaccgtggccgttacggtcagcgccgtattcagctttctggtgggcctgtttttgcttttagagccggaattggtctttcagctcctgcggacgccggaggacgcctttgacggtgcctgcctttacacccgcatcgtaggcggtacggtactgcttcaggggctgtatatccagctctgcgccgttctgcggagctacaccctgctgaaagaggtggtggtgctctccgtttccatgaaccttctgaatgtggtaggcaacgccattctgatcaacggcttcttcggcttcccgcaaatgggcgtggctggcgccgccgtatccaccgtgatctccaaagctgtgggcctgacgctggcctgcatcaccctgaaacgcaaatgcaccgtccgtttttccctgcaatatctgcaccccttccccgcaaagaccttccgcgccctgctgggcatcgccctgccctccggtacggaggccctgtcctacaacgtatcccagaccttcatcctccgtttcatcaatctgatgggtgcggcggtggtcagcgccaaggtctatggcagtatgctggccaacgtggcctatgtgtactccatcgccgtggggcaggccacccagatcattctgggctacatgatcggcggccggaagctggacgaggtcagcggccgtgtctggtccaccatccgcatcgcgctggcggcctccgagctgctgacactgttgatcctcattttctgcgatcccatttacagcatcttcaccgatgatcctgtgatccacgcgctgggccggcagatcctttatgtggagttcggtcttgagatcgggcggtccatcaatatcgtcatgacccgctgcctcaccaccgccggcgacgtctggtaccctgtgggcgtgggcattttcagcatgtggattgtggccgtaggcggaagctggctgctgggacacgcgctgaactggggtcttgtgggcatctggatcgccatggcctgcgacgaatgtctccggggcgcgctgtttacgatccgtttccggagcggcaagtggaaggaaacccgactggtgtctgattcaacgaaaggaacctgacttatggaattcaacaagcagaccgtaaaggccctgttgggcgttgtctgcggcggcatcgccttcgccgcggcgctgctgcatctggatgtggtagcgggcgccgccgggtggctgctgggcattctgtccccgctgctgctgggctgcgccatcgcctttatcctcaatgtccccatgcgggcgctggagcactgcctgtttccccacgtcaaaaaggccaataagctccgccgcccgctggcgctgctgctcaccgttgcggcagtatccgcagtgctggcgctggcgggaatggtgatcgtccccggcgtgcgggacgctgtcacctccatcgcggcgcaggtaccggaagcctttgagcgcttgcaggaaagcgccgcccgccttcaggaatacctgccccttctggcaaaccagatcgaagggctgtctatcgactgggccggtctttctcagaaggccgtggggctggtccagaactggggcaagggccttctgatctccggtggtggactggtcagcggcatcgtcagcggcgtcactacctttttcatcggcctgatcttttctctgtacatcctactgcaaaaggaaaagctggcccggcagggccgtcagctttgctacgcctttctaccggaagccgccgcggatcagcttctgaatattctgcggctcagtgaacggaccttttccagctttctctccggtcaatgtctggaggccgtgatcctgggcaccatgttttttgtgtccatgaccctgctccatttcccctatgcgctgctggtgggcgttctgatcgcactgaccgccctgatccccattgtaggggcgttcatcggctgcgccgtgggtgcgcttttg

SEQ ID NO: 12275 - DNA, 1145 bp, Unknown
  gut microbiota DNA sequence
atagctaccttgatatgctgcttcaaacgcttgcggtgtcttgtatttcagcgtctgatgtgggcgaatctcattgtaaaaacggatatattcatccacgctctttcgaaagtgccgttcagaagtatattcgcgccggtaggcttcctcttttttgaatgtggcaaagaatgtctctgcgaccgcattatcgagaggcgtgccgcttgcggaaaaggattgcttaacgccatattgctgcaaaagtttactaaatgctgcggaaatatactgcccgcccctatcactgtgaaaggtcagactttgcggatagcctcgttctgcataagctctacggaaagtggttgtgacaagacgggtactggctgtgcgggatactcgatacccgacgactttgcgggagaagaggtcaatgatagcacaaagatagacccatgcatttttgattttgaagtaagtaatatcgctcacccatacttggtttggatgatccgcggtaaatttccggcggagcagattttgcttctttcgcatttgattcttgtagaccttttttgcgtcggtacgaatactgtgcaagccaagttcctgcataatggacgagattcgttttgtgctgatgcgcagaccgctttcggccaaaacagcacggatcttatcagcgccataccgctgttcgctatcatcgaagatctgttttactttcagtatgagctgagccttctcggattcatatttgctacgatctgcacgacggaaaatatgattatagaatgtaccgcgggatacatccaaggcttcgcataattcgtgaacgctgtacaaatcagacatttcgttgtgaaaatgctccagagtggccaacttgtcctgtagaggcactttggacaggtaaccggataactgaatgattgagagcttgtgctccgctttttgaagccgcctgataagagcatcgaactcagcaggcgtataggtatgggcagatgtctgaatagaacggtactggtttcgccagtgatagaaagtgctttgcgatatatgcagttcttgacagagaactggaatggactcacctttttcatagcgacgaatcgcttgctttttgaactcgagcgggtatttcttcggcattacgataactc

SEQ ID NO: 12276 - DNA, 653 bp, Unknown
  gut microbiota DNA sequence
aggacgtgaccaacgtattcctgctggtgagtcgcgacgtgacgcctcccgtgctgaccctctccgacccggtgttcttcgccaatcgggacaccggcgagtacaccattaccggcacggcggacgctggcagcgagatcctttacggcggaacggaaacgatctatgccgacagcaagggccgctttgccgtccccggtacgctgaatacaaactccggcattctctccctcagcgcgaaggacagcgcgggcaacgaatccgcgcagcagctggcgctgatcacccggcagacccagtatgccgtcactgtgaacggcagctatgcgcagagctccggcgcggggaattacgcggcgggcagagttgtcaccgtccgcgcgggcagccgcgacggctacaccttcaacggctggacgtccggcagcaatgttgcctttgatgatcccaacgccgccgaaaccaccttcaccatgccggacggcagcgtgaccgtcacggcgaactggtcgagggacggcggatcgtcctcgtccgaccgggatgactccgatcccagctatgccgtcggaattccggacaagacggaaaacggtagcgtgagcgtcagcccgaagaacgccagccaaggcgaccgtgtgaccgtcacggtg

SEQ ID NO: 12277 - DNA, 979 bp, Unknown
  gut microbiota DNA sequence
gtcccgctgcgcgagctggaacgtggtggagagcatgtctaccaggggaagaacgatcaaataagtcaacaaaacaatggcaaccagcacgatcacgttataggggttggttacgactgccttgacctgattcttcaggcgtttgaattttatctgtcgactgtttttttgttccatagacacagttcctcctttatggttactttttctatatgcgaaggcactcaataacttttcgattctcatcccatatcttttcaatctcgtcttgtcgctgaatggttgcgttgatgcagatgcagtcgatgatggtgttttgaacaatgcgggcggacatcaatattgttgtaggacagtaatgaacaatctgtacatcgcagtatttcttgataggtgtatattcaaaacccgtcatacaggcagtcatagctccgtgggacttagcaatttcaaacgcatggaccagcggaatgtttcgcccgctttttgtaatagcgataaatagcgtgcgttcattcgcggcccgagcaatcagctgcatcaactcactgtctgttgcagcctccgctgtaataccaatccgtagaagatgtgcggcaaagctttccgccacacttgcagaagcaccaacgccacagattacgacgcgttccgccttgctcaatagatccgcggtttctttaatagtactaaaatcaagttgttctgctgcaatttgaagggtttcaatgctaagcgaaaaaacatctcgagaagtcgcctccggagagccgtccttcaaattctcaaaaataattttagagctttgacggccatattttgccaacatgatttttaactcgctgaagcctgaatatccaagagccttacagaaccgaacgatactggattccgcaatatcgagatctcggcccagtttatggatattcgttttcagcacttcgtccgaatgattcagaatatagtctgcaatcacacg

SEQ ID NO: 12278 - DNA, 217 bp, Unknown
  gut microbiota DNA sequence
aggacgtgtgcgaccatgtgggcatcatggaccacggccatgtgctgctggagcggagcctggcccagctgcaggacaacatggtgaaattgcaggtggtgtttcctgacggcatggaggacgttccggcggagctgccggtgcttcacgcctcgaagctcggccgggtgcataccctcatcatgcggatgaacgcgcaggaggccacggagcggct

SEQ ID NO: 12279 - DNA, 57841 bp, Unknown
  gut microbiota DNA sequence
tttgtggccggcttcatcggcatgcctcagatgaacttctacgatgctgagctggtgctggaggacggacagtatgccgtggtgctggacggcgccaaggtgaccctgccggaggagaagcaggccaagctgaaggccaacggcgcggcagccggtcccatcacgctgggcgtccggccggagcacctgatcctcagcggcgacgagggctccatgatccacggcaccgtggacgtcagcgagatgatgggcagcgccgtccatctccacgtcagcgcctgcggcagcgataccattatgatcgttcccaccacggagctggaaagcacctctgcattcaccatcggcagccccatcgcctttaccttcaacggcgctatggcccatcttttcgaccggaatacccagaaaaatctggaagcataaaaagaattgagactgtcgataaagtggtaaattctccgcgacggtaaggaagggtgtgtgcgggaaacccaagaagggtgtcctgtgcctttgaaatccttagttttcaaaacttttataaagttctgaaaacttgcccagcggcgcgaaaaaactttttcgacacgctgtgaattacttgaaaggatcatacagcgcatccgctcgccccaggtgttgtctggggcgagcggacctgttggtttcatgagactatgatggattactttcgtgaactgaattttgtgtctgttgctctgcggctgctgctctctgcgctcatcggcttctctctgggattggagcggggacgcaagcgccgtcctgccgggtgccggacctatatgctggtgtgtatgggagcgaccctgacactgctgctcagtcaatacgaatacatcatggtcaccaccaagtgggcgtctattgcatctgaaatcggactccggacggatgtctcccgttttggcgcacaggtcatcaacggcgtcggcttcctgggtgccggtacgatccttgtcaccggccggcgggaggtcaagggccttaccaccgcggcgggcctctgggcctccgcctgtatgggcctggccatcggtgccggtttctatgaatgtgttttcctgggaacggtgctgatcttcctttccatgcgctatctccccatcgtggaaaacatgatggtggaacatgccccgtttttgaacatctatgtggagtttgaatcgctggatcacatcggtgatgtgatcggccgcatcaaagagcagaacgcacaggttctggatgtggaagttgaccacggcaggggtccagactccagcaatcccagcgcggtcttttccctgcggctggccaaacgccatagccattccgacgtgctggtctccatatctgaactggattgcgtctataccgtggaagaattttaaaggagggagaagatctgatgctgcctatttttgatggactgcgtgacgtgacgcttgcctccgtcaccacacgaatgctgctggctgtcctctgcggcggtctcatcggcatcgagcgggcttacaagcgccgccctgccggcttccgcacccacattcttatttgcctgggtgcggcgatcaccacacttaccagccaattcctctatcttaatctgcattactacacggatatggcccgtctgggcgcgcaggtggtggcaggtatcggcttcatcggcgccggtaccatcgttgtcacccggcagcatcgggtcaagggccttaccactgcggcgggtctctgggcctccgccattatcggcctggcactgggcggcggcttctatgaaggcgctctgctgacaacggttcttgtgttagtggcagaatccttcctctcccgactggaatatcggattctggaccatgtgccggagatcaatctctacatggagtacaccggaaagccctgcctggaagaagtcctgcgtttcctgcgggaaaataaggtctcccttcaggatatggagatcacccgcaactccgacagcgagagccacaacgcctgcgcgatcttctccctgcgtttcagcaagggcgtttccgtagatgagctgctgacccatgtatctcagatcgaaggcgttatcaccgttcaggaattgtgatccctttggaaccgtgttatactgatccagcggcggagcttgccgctgaatagcctgtttttgttactttaactgatgaggagcggaatatgaaagaatacgatatcatggtagtgggtcctgtctctctggaccacaacatcgattatttgggcaacgagcgcaaagaggtgggcggcgctgttgtggcttccggctttgccgccgccggcagcggcgcaaagaccgccatcttctgcaagtccaacgcggcggacgccgatgtgaaggagcgcttcgccggagtcaacgcggacctctactgggctgcgtccaaggccacttgctccatccgcaaccagtacttcaccgccgacaaggaaaagcgggcctgcacctctatgggcgtgtgcgaccccttccgttttgaggagctgcctcaggtgaagaccaaggtctatcactttgccggtctggtctacggcgattttgacggcgctctgctggcggaggccgccaagcacggcaaggtgggtctggacgtgcagtgcatgctgcgccatgtggagccggataagtccatggccttccatgactgggcggagaagaaggaactgctgcccctgatggattacttcaagaccgacgccgccgaggcggaggtcctcactggcctgacggaccgcgtagaggctgcgaaaatgctccatgactggggcgccaaggaagtggtcatcacccacaacaccgaggtgttggcttatgacggcaacaaggtctacacctgccccatcaaggcccggaacctctccggccgtaccggtcggggcgataccactttcgccggatatatcgccgagcgtcagcggggcagcgtggaggaagcgctgaacttctgcaccgctctcgtctccctgaaaatggagacccccggtcccttcaagggcacccgggaggacgttctggcctacatgaaggaattttattgatcgatcgaatacaaccagcccgtccggaatattccggacgggctggtttcttctatctttgtttggtggcgcggcttaccgggtcagcgggtccacggaaatatccatgtcgatctcaaaggcccggttccacgggaagcggtaattggagaggcagacctttccccaatgggctgtgacggtatccacatggggctttaggccgatgagcaagctgctgcgctctaaatttttcagtaccggggcggtggccttatccatccccgctgtcagccgggcgacaatggcgggacggtccagctccggcaggcagaagttgttggcgtcaccgccaagatcattccgcacataggacaaaatatcctcccgtaccacgtttttatagcagaaatccttcaaaatgctgtcggcaagggtcttacagaaggcagtttcctccgatcgcgaggtctgcccctgaacaagatgggcgtagcgggctacaccgtgactcagggccgtgccggtgacgatggccatatccaaaaatccggcgtagctcaacagcttgcccagctccgcttttttcgtcagggcgtcatggaaggcagtgccgtactgaccgttgcttgcatcgatgaggatcaccggcagatcggccttcaggcgttcattcagtgtagcggtcagctcctggatgtactgctgcttctgggctgcgtcctccggctgggtcaacaccagcacatagaggtccgcaaaggcgggggtgtcctccactgtcaggccgaagtagtccagatgctccgccacgatctctgttagaggcttgtaatcatagtcgcaggcgggccgatcctccgtgccgccgaaatattgcacattgacctgtgcgccgttccagccaatctcgctgagatacagcttggtcacggccttaaaggccagatcatctacaccggaaaggatgacatcgcctgcccgcaaacgggcctgtaaataggcaatctcgtttttctggatgcagtcctcggaggaggaatcgtcaatgccaatgagcacatggaaccggtcgccgccgatccggctgacggtttccaacagttctccgctgagggtcagcttgttgatccggtgctccgtgtagcggagggcggcatcgtgcatcacgttgtcctcaaagcacagcagatcgtggccgtcaacgtccgtatcgtaggtggcgcgaatattttccagcgtcaattcgtccccagtgagggttttccggggtgctgcgccgatggtccgcatggcgttgtagtattccagcgtgccgtcggcgtagcccacggtgggggccagccgcataacgctgtccagcagccagacctcgttgttggggtcctccgccaaagcggacagcaggctttccagcaaatctgtcagaggccacggctcgccgtcacgctctgtggtggtttccgccagacgggaggccaccagtccaccatagagcatctggtccacggaaagaaggtagcggtcacagcctgatgcctcctgttccagcacccaatcgtacaggaggccgggatagccgctttgcccggtccaggattgtgtttccagaccgttttcggcgtaatagtcctccatctgcccatccagcagtgttttgaacatccattcctctggcatattcaggacataccccagactttccgccagatattccacccggcccacgttgtcaggccggtcatccagcggaacgtaagcgatcacggcccggtctgactctgcatccggcagatccagcggagggcgggcaccgcagccggacagaagagtcagacataaggctgctgccaagattcgttttttcatgggtcctccttttggggttttaaatgggcgtattccaaaaagagcggagcattcgctccgctcttttgtgatctcccttacaggccgaagctgctgaggtccagaccgccggtgacgccgttcatgctattctccatggcgtcattggcctgacgcagcgcctcattgacggcggagaccagcagatcctgcagcatctccacatcctcggggtccacggcctccggcttgatggtgacggagaggacctccttcttgccgttgaccttggcctccacaacaccgccgcctacgctggcggtgaactcctgcgcctcaacggcgtcctgtgcttcagtcattttctcctgcatagcggcgatcttctgctgaagctccgcctgacgggcggctccggaaattttgccgttggtgaagccgcggcgtgcactgtaacccatagtaaatttctccttttatttgatttcaatattgtcaaactgactgccgaattgcagcagctgcttcagattttcctccggggacggctttggcggctctccctcccggagcagtaaccgcaccggttggccggagaccttttccgcctcggcggacaaaacgccccgtacccggtcattgtccaaacggttcagggtgatctcatcgggtgcaaacactgttagctgatcgccctccaaaacgccgccgcacaggtccagaaacgcccggtacatgggagggatctgacccttgcagttttcggacagagccttccaccagtcaccgctgacgggcgcagcactgtgaacggccgtctggggcttcggtgctgaaggaatggaggctgccggcttggccgggacggccttgggctgtgcgggccggacaggaatggcgtcctcgggaatgtcaaagacccgttcaccgggttcctcccgcatgggcggctcctccggcagcggcggctcgtcccaagggggcggatcctccgcaggcggtggttccacaggcttggacgcgggctttgcaggggcctgagacaccggtgctgccccgatcgcctttgcggcagagacgctttggttcacggcggcggagatcacagcgccgcgggccgctgcgtcctctaaccgggtgatccggttttccaaggcggtgagatcgccgcagagactttcgtcgcacagccgcaggagacaaagctccgcatcggtgcggcggtcggcgctgtaataaagatcagccgcagccttttgcaaggtggaggccagatagagaaaacggttggagggaacatccttgcccagctggtccagcgtggcgctgtcaaatccgccggacagcagcgctgcaccgccctccggggcggtttttcgcagcagcagatcccgggtcagggtagaaagctcacccaatacagcccccacgtccttgccgccggcgtaaagctcgttcagcagcagcagcgctgactgggcgttccggtccagaatgtgccgcatgagctgggcagtttgcagattgcctgccagacccagcacctctaaaacagcgcggctgtccactgtgccgcctgcggcggcgcactgatccagaaggctcaggccgtcccgcagagcgccgtctgccagacggctcagcaactcggcgccgtccgctgtcaggtcaatgtgctcctgaccggccacataggtcagccgatgggcgatgtccttggggagaatgcgtttaaaagagtagcgctggcaccgggagagaatggtggcgggcaccttgtgcagctccgtggtggccagaatgaacatgaggtgggccggcggctcctctaaaattttcagcagtgcgttgaaggccgctgtggacagcatgtggacctcgtccacgatgtagacccgttttttcacgttggccggggcgtagatggcctcgtcccgcagggcccggacctgatccacgccgttgttggaggcggcgtccagctccagaacgtccagaaagctgccgctttccagccccagacagctgggacactgacagcaggggtcgccgtttaccgggtgctcacagttgactgccttggccaggattttggcgcaggtggtcttgccggtgccccgggtaccggtgaacagataggcgtgggaggtacggccctccgccacctgttttttcagggtctcagtgatgtgttcctgaccgatgacgtcggaaaacaccttgggccgccatttgcggtacagcgcctgatacatggaacacacctcctgaaaaatcgaatccgcgggaaggaagggcacgcgggcagctccaaagggtgccctgcgcatatgaaaacatcctccgtttgcagacacggaaccggcgtcctcgcggcacatggaacatcccgcttaatgctgctcggttccccgcctgacatggttcacggggctccattgcgcgagaccggctccgcgtctgcaagcggaggatgaattgcggaatctattatacgatattttttctgaattatcaactggaaatttcgtttttaccggcagttgtgtcggtgtttccggggaatacttgccttgacagaaggaatggagtataatggcaccataattttaaactgggattgtttacccgaaaggaggggccatggagaccgttgggcgtttcgcgccgtcccccagcgggcggctgcatctgggaaatcttctgtgcgccctgctggtgtggctctccgccagacaaaaggacggccgggtcctgcttcgggtggaggatctggataccgcccgctgtccccggaggtacagcgagcagatggagcgggatctccaatggctggggctggattgggacatcggccccggaagggacaacggcaccggcccctattaccagagccagcggacggagatctaccaagcggcactggaaacgctgcgggaaaagggccttgtttatccctgcttctgtacccgggcggagattcacgctgcctccgctcctcaccgggaggacgggcaggtggtctatgccgggacctgccgccgtctcaccgcggcggagatcgcggaaaaaagcagaaatcgcgccccggccctccggctgataacgccggaggagcgttggggctttacagacggccacatgggccgatacgaggaaaatctggcggcagactgcggggattttctgctgcggcggtccgacgggatgttcgcctaccagttggctgtggtggtggatgatgccgccatgggcgtgacggaggtggtgcggggcgctgacctgctggactctaccccccgccagctgtatctctatcatctgttgggcctgacgccgccggttttttaccatttccccctgctgctgacggcggaggggcgccgcctttccaagcgggacggcgccgtgggactggacagcttgcaggacaggctgcccccggaggaaattttgggacggttggcgttcttagcagggttcaatccatctgccgcgccgaaaacggcggcggagctgctggcggacttcgcgtgggagaaggtaccgcgtcaggatatccggatcccggcaggacttttctgttaaggtttttcaaaacggcttgttttggcggcggagccgcgatagaatcatgtggaaccagtgggacggcgcaatgcgccggaaaggagcactatgcggatcattgttgtgggcgcgggtaaggtaggcaccagcctgaccgcccagcttatccgggagcaccgggttacggtcatcgaccaggaacccaagctcatagaaaatatcatcaatgtctatgacgttatgggcgtctgcggcaacggagccagctatgaggtccagaaggaggcggaggtaggcaaggcggatctgctgatcgctaccacctccagcgacgagatcaatattctggcctgtctggtggcgaaaaagctgggcgtggcccacaccattgcccgcattcgcaacccggagtatgagacgcagctccgcttcatgcggggcgagctgggcctcaccatgtccatcaatccagagaaggcagcggcccacgagatcgcccgtgtgctgcggttcccggcggccatgaagctggaatccttctccaagggccgcttagagctggtggaataccgcctgccggaggggtctgctctggacggcgtgcggctgctggacatttatcggaacgcccgggccagagttctgatctgcgccgtgtcccggaagggacagaccaccattccctccggtgattttgagctcaagactggagacaagatctatgtcaccgccgcaccggagcatctgtccgcattcttccagtatctgggcgttttcagaaagaaggcgtctacggtaatgatcgtgggtgccagtaaaatgtgctactatctggcggacgagctgctgcacatgggcatgagcgtgaagatcgtcgatcagagcgaggcccgctgcgcccagatgagcgagcagctgccccgggcgctggtcattatgggagacggcaccgacagcgagctgctggcggaagagggcatcgaccatacagacgcctttgtagccctgacggggcttgacgaagccaatattctcatggccatgtgtgcctcacggcagacggagcagtgcaaggtggtggcgaagatcaaccgccggtccctgatggatctggtcagcagtgaagggatcattgacagcgtggtgtctgcccgggatgtgaccacggaactgatcgtgcagtatgtccgggccatggagggcgccgccggttctcagatcaagacccttcaccggctggtggagggcgcggtggaggccttggaattccatgtggaccgagaccccgatctggtgaacgtgccgctgcgggagctgaagctgcgaagcggggttctgatcgcgggcatcgtccggcgggacggcgagatcgtcattcccggcggcaacgataccattcgggccggggacgatgtgatcgtggtcacccaggacacggccttgcaggagctgcgggatattctgcggcaaggataagagggtaggctatgaacacacgaatgatcggctttttgctggggcggatcttgatggtggaggcgggactgctggcccttccgctgctgacggcactgctgtacggggaacccctgatgccgtggctggccaccatgctggttttggcggccatcggcggagcactgagcctgcggaagccggaacgcaccgcactctatgccaaggacggctttgccgccgtggcgctggtgtggctgctgatgtccgcttttggtgcattgccctttgtgctctccggggacattcccaactatatagatgccttttttgaaacggtctccggctttaccaccaccggcgcttccatcctgacggcggtggaacccctcagccggggcggcctgttttggcgcagctttacccactgggtcggcggcatgggcgtgctggtgttcgtcatggcgatcctgcctatgagcgacggtcacaccatgcatatcctccgggcagagatgccggggcctacggcgggcaagctggtcagccgcatgagcgataccgccaagatcctctatggtatgtattttgtcatgacgctggtgatgatcggactgctgcttctgggcggcatggaccttttcgatgccagcgtccacgccttcggtgctgccggtaccggcggcttttccagccggaacgccagcgtgggagcctacaacagcgcatatatcgacgttgttacaggtatcgggatgctggccttcggcatcaacttcaatctgtattacttcctgctgatgcgccgcttccgggacgtggccaagtccgaggagctatgggcgtatctgggcatcgtggccttttccaccgttaccatcgcggccaatatccgccatctgtacggcgcggtggggacttctctgcgccacgcctttttccaggtgtcctccatcatcaccaccacaggctatgccacggtggattttgaccagtggcctggctatgccaagacggtgcttgtgctgctgatgttcgtgggcggctgcgccgggtccaccggcggcggtctgaaggtcacccgtgtggtgacattggtgaaggctgcctttatggatatgcggaaaatgatccaccccaacgccgttgtcaacgtgcggatggagggccgggccatgccggagaagcaggtccggggcgtacaggcctatttctctgtatatatgctgctgtacgcggtgtcctggctgctgctgagtctgaacggctttgacctgctgtccaccttcacggcgctgagcgcctgtatcaacaacatcggtcccggcttaggcatggtaggccccacggggaacttctccgcctttgcaccgtgggccaagctgctgctgagctttgatatgctggcgggccggttggagatcttccccatgctgctgctgttcgtgccctccacctggcgggggaaccgtctgcggcgctgggaacggcgaaactgaatatcgtaaaccaaccgggagcggcgctgccactcccggttgagattgtcgataaagtagtaaattctccgtgacggtaaggaagggtgtgcgcgggaaacccaagaggggtgtcctgcgtcattaaaattctaagttttcagaacttttataaagttctgaaaacttgctcagcggggcgaaaagaccttttcgacacgctaaaccgggagaggacaacagtcctctcccagttggctttttcgatgaaatttttaaaggggtgcgagggctcacaccacgccctgtgcgatcatggcctcggagaccttcttgaagcccgccaggttggcaccggccaccagattgccttccatgccgtattccttggcggcgttgttgatattgtggaagatgttcaccatgatgccctgaagcttggcgtccacttcctcaaaggtccaggagtagcgcatggagttctgactcatctccagcgcactgactgccacgccgccggcattggctgccttggccggagcgaacagcagaccggccttctggaagatggcgatggcctcgggagtggagggcatattggcgccttcggccaccgccatggcgccgcccttgacgatctcctccgcctcagcggcggtgatctcattctgagtggcgcagggcagggcgatgtcgcaggggatggtccagatgccgcggaagccctcggtataggtgctgccggggacctgagcggcgtattccttgatgcggccccgcttcaccagcttgatgtccttgatgatatccagcttgatgccgtcgggatcgtggatatagccgttggaatcgctcatggccaccactttggcacccagctccgtggccttctcacaagcgaagatagccacgttgccgctgccggagattaccacggtcttgccggaaaagctgtcatttttcagggtcttgagcatttcggcggtgaggtagcacaggccgtagccggtggcctcggtccgggtgagagaaccgccgaaggtcaggcccttgccggtgagcacagcggcctcgctggcgtttttcagccgcttgtactggccgaagagatagccgatctcccgggcacccacgccgatatcaccggcgggcacatcggtaaactggccgatgtggcggtacagctccgacataaagctctggcagaagcgcatgacctcggcgtcagatttgcccttggggtcaaagtcgctgccgcccttgccgccgccgatgggtaggccggtgaggctgttcttcaggatctgctcaaagcccagaaatttcaggatggacaggttcaccgtggggtggaaccgcaggccgcccttgtaggggccgatggcggagttgaactgtacccggtaaccccggttcacatggacctgaccggcatcgtcggtccagggcacccggaaggtgacaacacgctccggctccacgaaccgttccagaatgccgttcttctccaactcggggcggcgttccaccatgggctccagaccctccagaacttcatagaccgcctgatgaaactccttctgatccgggtcacgggccaggatctgctcatagacgcgcttgcagtattcattgttcagcatgggataggctcctttcaaattctctgtgccggaggaaattttatgctttatcttatcaaatcacagttcagccgtccagtgtatttttaaacaaatatgaaagttttacgggctgttcctgcaaaaaatgacgagagaagatcctctgctgttccgggaagaacagcagaggatcaaatcgtttttctgtcaaaaacacggaagcggcttaccggcccatggcatcccgcagacggtcggtgatggccccctcgaatacccgggaggagtgaccgtggagggtttccagcgcggcggcggccagaccgcaggcggtgttgccgcccatggagaggtccatgtcgaaaatgaacttcacctccgggtcctgaggcgcgtggggaatgttggtcttcaagcggccgataccggcgtggatcttggcggtgcagctggaatccagcttgaactgcgtgtcgcagccgcagttgacgacccggtcctccgccagatcttcctctgccatggggcctaaataggccggagtgaacagctcccgccaggagacatcctccagatcaagggcggtgcgggagacgatgttgagataccgcagacccaccctctgaaaataggcgggcttgtagaactggatgaacgccgccagaggcttatccagcatccgggcaaattcctcccagccggggtaggacagcgtggacagagcgatgaagtccttggtgagattcagcttccatctgccgtcctgagagaggaagtggtagttggtgacgggaggctgaggctctggcttaccgttgacgatctggggaggcagaacgtcctgcttccgggcgtactggggaaaatcctcccggatacgctcctgaaaatcggcaggctccacattgttgatggagagaatggtgggaaagcgcagctggcagatgacctcgtgggccagcgttttttcatagtgggtgcggggacggtcggaaaacagcataaaaacagctcctttgcatgaactatttgatggtccttattgtagccccgccggggagaaaagtcaacgttcggcggcggtggaaacacagtcctgcgtacccggttggaattctctgccgtagtttccagatattgagggttgtttcctgttggtgggttccgctacaataaagttacaaaacggttacaaaaaggaaaggacggaacaaccatgaaacgacgagcctgcaagcgcctgctgaccgctgcggtcctctgcgcagcactgacggtccctgccaaagctgcccggcggagcgtaccggtgcagatcgacgggaatcctatcgccgtgtccacctatgtggagcggggcgtgacctatgtgcccctccgggccttgctgaatacgatgggagcgtgggacgtctggtgggacgaagccacgggccgggccgcagctgcctctgatgacacccacctttgggcggacccggcggcggataccgtcaccgtcgacgaaaaaactgtccggggccgggtcacggtggaaaacggcgccacctatgtccctctgcggctggtgggggaggcccttgactgtcaggtggagtgggatccctatctggggggcgcggcagtgacctctcccggcgcggcctacgatgccggggaattgtactggctgtcccggatcatctgcgccgaaagcggcgcggagtcaatgtccgggcagatcgccgtgggcaacgtgatcctgaaccgggtcaggagtggcagctttcccaataccgtggagggcgtcattttcgaccggaaggacgcagtgcagtttgagccagtgagcaacgggcgggtctatctgccgcctacctcacagtcggtggaggccgccaagcgggcgctggacggggaaaatgttgtcggctccgccctgtatttctacgccccggctctatcgcaggggacgtggatcaacgccaaccgaccctatcagcagaccatcggctgccatcggttctaccggtgatacgggacaggagggtgcttcatatacataaaaaccggcttccgttttacggaagccggtttttatatgactatttaaacgtagctctgggtggtcacatcgaacacgccccgggtggtgatgcggagggagggaatcaccggcagggccatgaagctcagagtcatgaagggatcgatgccggggttcacgcccagcttgtgggcggcatccttggcggtttccagcttttcgttcaccgtgaccagcggctcgtcgctcatgatgccggcgatggccagaggcacctccgccacgggctgaccaccgtcccacaccacgatgccgccgttcagctccactacccggttgacggcggcggccatatccgtctcgttggtgcccaccacgatgatgttgtgggaatcgtgggagatggaggtggctaccgcgccggatttcaggccgtagccctgaatgtagccgatgccgatgtgatgggtgttcttgtgccgttccacaacggcaatcttcagcacatcatattccacatcgatacggtcagagtacccggcgtccaccgtggtgatctcgccgtccaccataccgatgatgccccggggacgcttctcgacgaagtcctcggcggtgagggccgccacatggaaggtcttgtgagcccgctccaccagatacggctcgatctccggggatgggaaatcctggatctcgccgtgatccaccatgagaacgcccttcttgtagacctgctcgatgttgaagttctggaaattgtcaatgatgacgaagtctgccagatagccgggggaaatgccgccccgattgttcagcaggaagtaccgggcggcgttgtggcaggccaccttgactgcggtgatggggtcggcacccagagagatggctttctttacaatgtagtcgatgtggcccttttccagcaggtcattggggtgcttatcgtcggtgcagaacatacagcggtcggcgtacttgccagtaagcaggggcatcaatgcctccagattccgggcggcggtaccctcccggatcatgatgaactggccccgctccagcttggcgatggcgtccttcacatcatggcactcgtggtcggagtagacgccggcggcgatgtaggcgttgaggtcgttgccctgaaggtccggggcgtggccgtcgatctttttgtggtgggcctgtgccgccacgatcttctccacggtctgctcgtcgccgttgatggcgcccacgaaattcatcatctccgcaaggccctgcacccggggatggtcatagaagctgtcgatggcccgatagtccagaatggccccggactcgtccagcggcgtggcggggacgcaggagggcagcatgaaccgcacgtccaccggcaggtcctctgtggcctgcagcatatactcgatgccatcggtgcccatgacgttagcgatctcgtggggatccgttaccaccgtggtggttccgtgaggcaggacggccttcacgaactccgtggggctgactaaagagctttccagatgaatgtgggcatccaggaaaccggggagaacgatcttgccggtgcagtccacctcagaccggccttgatagcttcccatgcccacgatcagaccttccgccacggcaatgtccatggtggacagttcattggagaacacgttgacaaaggtggcgtttttcagcaccagatccgcaggctcccgtccggcggcggccgcgatgatccgctgctttttcagcagctttcggttgatctttccagcatagctttccggcatagtaccactccttctataaatttaacagaaatcggaattgcttatagcagacataacgaaatgtaatatctgttgttcttgggagcagtatacttgaaaaaaactgatttgtccatagaagagacggcggtttcccgccgaaattttatccggattttcggcagaatttgacaggcgggggaaaccgggcgtctcaaccggattttcgcgggaaatccattgcgaaacagcggaaaagaggctataataaacttaactatgtcaaaaaaatccggaggtttttccatgaagtgcatggtcattgacggcaactccatcatcaaccgggcctattacggcatccgccccctgactaaccgggaagggctgtacacccacgccgtgttcggctttctcaccacgttgctgcgcctgaaagaggaagaacggccggatgccctgtgcgtcaccttcgacctccacgcccctaccttccgtcacaaggcggacgaggcgtacaaggccacccggaagcccatgccggaggaattgcggatgcaggtgccggtgctgaaagaggtgctggataccctgaacatcccccgctatgaaatggaggggtgggaggccgatgacctcatcggcaccatttcccggaaatgcgaggcggcgggctgggactgcgtggtggtgacaggagacaaggattcccttcagctcatcaccgatcgcaccaaggtgaagctggtgtccacccgcatgggccagaccaccaccaaggatatgaccccggagactttccgggagcagtacggctttgaacctatccacatgatcgacctgaaggccctcatgggagacacctccgacaatatccccggcgtaccgggggtgggtgaaaagaccgctatggatcttattcaaaaatatggcagcgtggacgccatttatgaaaagcttccggatatcgacgccaagcccgccgccatcaaaaagctgacggcgggagaggacgcagcccgccattcctactggctggccaccattgtcactgatgcgccgctgtccttcgacccggcggaaaaccgggtgcaggagccgacaccggcggcgtatcccctgtttttgaagctggaattttccaagctgattgaaaaaatgggcctgcgtccagaggaaacggctccggcggatgccgcgccggacgtcaccgtgacggcggagcggatcacggaggaatcccgtgcccgggaggtgctggaactgttccgtaaggcggatcatgtgacggtgctggccctgccggacctctccggggtcattgcggactgcgataccggggcggataccgccctgtcggcggaatttttcttcgagcgctacaccggtgactggaacgcgctgctgaacgccctgttcgccgccgacattaaaaaagtgagccataacgtcaaggacctcatgcggacgctgctggaaaacggcctgaacgcagagggcttcatgttcgacaccgctctggccgcctatctggtggacgccaccagcggcaaatatgaaatcggtcagctgttcgctgggtatttccaaacggaactggtgaagccggtccatctggaaccggatgccttctccttgctgggggatgtgacggcggcggaggctgccttccacagctacaccagcgccgtggacgccctgtacggagtgctggcccccaagttgaaggagctggacctctgggatctgtacgccacggtggagctgccgctgtgccgggtgctggcggaaatggaactggctggctgccgggtggacaagggggcgctggtgtccttcggggagatgctctccgaaaaggccgccgctctggaacaggacatttacaacatggccggggaggaattcaacatcaactcccccaagcagctgggagaaattttattcggcaagctgggcctgccccacggcaagaaaacgaaaaccggctggtccaccaatgccgatgtgctggaaaagttgcgctacgaggcccccatcgtgggggcggtgctggaataccggcagtacgcaaagctgaagtccacctacgccgagggccttttgaaggccatggacccggatgggcgcatccgtacccggttccagatgaccgttaccgccaccgggcggctcagctccacggagccgaatttgcagaatatccccacccggacggaccttggcagcgaaattcgccggatgtttattccggcggagggctgcgtcttagtggacgcggactactctcagatcgagctgcggctgctggcccacatctccggggacgaggccatgcgggcggcgtttaccaccggagcggacatccacaccgccacggcggcccaggtgttccatgtggcccccggcgatgtgacccacgagatgcgccgccgggcgaaggccgtgaacttcggcattgtctacggcatttccgccttttccctcagtcaggacatcggcgtgacgatggcggaggccaaggcgtatatggaggcctatttcgccaccttccccggtgtgcggaagtatatggatgatgtggtggcaaaggccaaggagcaggggtatgtggaaacactgttccaccggcggcgggagctgccggagatccgctcctccaatttcaatatgcgctccttcggggagcgggtggcgctgaatatgcccattcagggcacggcggcggacattatgaagctggctatggtggctgtggagaaacggctgaaaaaggaactgccggaggcaaagctggttttgcaggtccacgatgaactgatcgtggagtgcccggaggaccaggcggcagcagcggcgaagctgctggaggaggaaatggagcaggtggcccacctgtccgtccccctgacggcggaggcccactggggccgcaactggctggaagccaagggataaaaaggagttttgacatatggaagaaaagggactgcacgtccgcatcgtgcccatgacggcggaccatctggatgaagtggcggagctggaacggatctgcttttctacgccatggagccggaatatgctggcggaggaactggacaactacctgtccgcattccttgtggcgctggatgacaacgataaggtagcgggctacgccggtttgcaggcggtgctggacgagggttatatcaccaacgtggccgttcgaccggactgccggaagcagggggttgccggaaagctgctgcaagtgtttcttgactttgctcaggccaaccatctggcgtttctgacgctggaagtccgggcttccaactaccccgccatcgccctgtacggcagccggggcttccggggcgtgggccggcgcaagaattactatgagcatccccgggaggatgccatcattatgacaagggagtttgaacagcatggaactgagaatcccgtcagttgaacaactgaggacgatttatgaccgggacctgaaggaagcgtttcccacagcggaattaaaacccctgcggaatattgagaagagttgggcggagggctggtacaagccctactgcctgtttgacggagacaatatcgtaggcgaagcattcctctggctgggacatcccggctgggcactgctggattacctgtgcgtttccagtatccgccgcaacggcggcgtcggtgcatccatcctggagaagctgcgggagcgggaggcggacacggtgatcttcggtgagtcggaagctccggaggacgcgccggacccggagatggcccggcggcggttggggttctatgcccggtgcggtctgcggaccgccgggtatgatacggagatgttcggcgtccactacaagaccctgtatctcgccggcggcccggtggatgacgccgccctgatgaaagaacaccggttcgtttacgagaatacattttctgcggacaagtaccacaagtatgtccgcatcccctttgatcccaaggcggcgccggggccaaaggtgccctggcagcagtaaggcggagaacgccgatcttttggagaaagaagcattgctatgaagattttagcctttgaatcctcctgcgacgagaccgccgtggcagtggtggaggacggacggcgggtgttgtccgatgccattgcctctcaggcggacctccacgccctgtacggcggcgtggtaccggagctggcctcccgcaagcatgttgaagtgatcgcggccctgacagaaaaagccttggcggacgccggctgcacccggcaagacattgacgccgtggccgtcacctacgcccccggtctcatcggggccgtactggtgggcttgagctttgccaaatccgtggcctacggccttggggtgcctctgatcccggtgcaccatgtccggggccatatcgccgccaactatctggccttcccggagctggagccacccttcctggcgctggccatctccgggggcaacaccatgatcgtggacgtccgggattatacggatctggaaattttgggcgcgacccgggacgatgcggcgggggaatgctttgacaaggcggcccgagtgttgggacttccctaccccggcggcgcgcccatggacaagctggcccagcagtccaggggcggtgtctacaccctgccccattcccatgtggagggtgccccgctggatatgagcttttccggcctgaaaacggctgtggtgaatctggcccatcacgccgagcaggtgggtgagccgctggatgccccggcgctggcccgggacttcgcccaggctgtcagcgatacgctggtcccccgcgtcgtggaagccgcaaagcagtctggccgcaccgccatcgtcgccgccggcggcgtggcggccaactccgtcatccgggcggacctggagcgggcctgcgaaaaagtcggctgccggttgtatctgccgccgctgcggtggtgcggcgacaacggtgccatgatcggtgcacaggggtattacgaatatctggcgggccatacggcgggcatggacctgaacgcctatgccacccgcgacatcagcgaataaacgataccggcggtcatcgaaccgccggtattttttgccgatatatagataagcgccgcggctcagccgcggcgcttatccattatttaagagagaggatcagagaagaaaaaggaaaagagaagaaaaatcaatcctgaaacagcggagtggagagatagcggtcgccggtatctggcagaagaacggcaatggtcttgccttcaaattccggccgtttggccagttgtacagcagcccatacagcggcgccggaggagatgcccaccagcacgccctcccgtttgccgatcagcttgccggtggcgaaagcgtcctcattttccacggggatgatctcgtcatacaccttggtgtccagtacgtcggggacaaagcctgcgccgataccctggatcttgtgagcgccgccgtggccctcgctgaggacgggggagctcttaggctccacggccaccacctttacggcgggatttttgcttttaaggaactgccccacgccggtaagggtgccgccagtgcctacgccggctacgaacgcatccacctgaccgtccgtatccgcccagatctccgggccggtggtctcaaaatgggccttggggttggcgggatttacgaactgaccgggaatgaagctgtttgggatctctcttgccagctcatcggccttggcaatggcgcccttcatgccctgagagccttcggagagaaccagctccgcgccgtaggctttcatgatctgacggcgctccacgctcatggtttccggcatgacgatgatgatccggtagccccgggcggcggctacggaggccagaccgatgccagtgttgccgctggtgggctcaatgatgacagaaccgggcttcaaaaggcccttggcctcagcgtcatcgatcatagccttggcaatgcggtccttcacgctgccggcgggattgaaatattccaccttggccacgattctggccttcagaccaaattcttgttccagatgggtcagctccagcaagggggtatggccgatcaactgatcggcggcggtatagatacgagacataagatgatctcctttttatgttgtagaatgatttattgagaaatggaaaacggatcattcctgacaacatcggaagcctggtgtcatacggttcatggaaatcctcttttctgagcgaataaatataaccaatcaagtaggttaatgggattatacggcggcgcatttccattgtcaagaggaaatttaaaaaaatccgggtttccagcagaaaaacccggcggacacagagtgtgtccgccagggatcggatggagttgtctgcaaatggagatcacgtcttgtaaatgccgccgcctacaaattcccgcatcagggaggtctggggtacgtcatctgccgggactggcaggaagtagtccaggaatttcaggagccgcttggcttccagatattcgtcgctgccccgggggacgccgaacagcagcggctgcacatagggcttcagcagggcagtttcgtaaatgagggaggagttgaacaccgtatcggcgctgtcctgataggggaagatgttctgttcctcgccccggcggacggagggccacattttgatggtggcctgagcaccgtagccccgggtccgggcgtcccgttcaatgcggcggagcagccgggcgtcggtggtgggaatgcggttgtgatcgtcgatattcagggtggtcaggcagctgatgtaaattttgtacttgctctccttaggcagagagtgggaaaattcgtcgttcaggcagtggatgccctcaatcaccagtacgtcgccgtctcccagcgtcagcttttcaccgttgtattcccggacgccctttttgaagttgaaggtgggcatatccaccgtttcgcccttcagcagacggctcatatcgctgttgaactgctccacgtccatagcgcccagtccctcaaaatcgtactggccgttggcatctctgggggtgtcctcccggttgcggaagtagttgtctgtggcgatgggatggggccgcaggccgcaggccatcagttgagtggacagccggtgagagaaggtggttttgccagaggaggagggaccggcgatcatcacgaagcggacgtccttccgccgggcgatctcctcggcaatgtcacccactcgcttttccatcagggcttcgtgggccaaaatcaactgggtggcgttgccttcagcaatcatgtcatccatctcccctacgttggagatatacatggcggcggagcgatcctcggcgtcatgcatggcctgaaacaccttcatagagggcgtgaacttacctacctgctccggttcctccagcgacggcaggcggaggatgaagccatcctcaaacagctccagagcaaaccactgaagataaccggtgtccggtaccatgtagccgtagaaatagtcagtgaagccgtccaacgtgtaaagattgacccgggagctgatgcggtatttcaggagccgggccttatcctccatgccgttttctgtcaaaaaggccgcggcgtcttcgatatccacagactgcttttcgatgggcagaacctgacggaccagctcccgcatccggtcctcgatccggtgcagcagggtgttatccaacgtgaagctgcctctggcccggcagaacagagcattgctcagggaaaattccacccggacgtgctccacctgctcccggcctaccacgtcataaaatgccttgagcatcagaagaatggcgctgcgctcataggtctggcggcccggcttgtcggcggcagtgaccatggagagggagcagtcccgcttcacggtcttttgcagctcccggagcttgccgtcccggttcaccagcaggatctggtggggatagttctcctgaaattccgcggcgatggcgcggtaagtggttccgtagggatactggtgtatcgtgccgttcacggtgacgttcagcatggtttccatagaattctcctttcaaatatggctgcgggagggttctcccggtgatcgttcgtttttctctattatacggtgcggaaccgccgggttcaatgggtaaagtgtaaacatctgcccaaaagcggaccgttccggccccggcccttgctttttgccgggtttcattgtaaaattttcacagctacattgcagggaggacaacgccatggcaaaacgaaacagccgcaatacccggggacggatcatctccgccgcttggaagctcttttatgagcagggatatgacggcaccacggtagaggatatcgtttttgaatccggcacctccaaaggctccttctaccattattttgacggcaaggacgccctgatgggcaccttggcctatgtgttcgacgaaaaatacgaggacctgatgcccacgctgaacccggagaagggtgccatcgagacgctggcctatatcaaccatgagctgtatgtgatgatcgagtccagcgtgtccatcgacctgctgacccgtctgctgtccacccagctgctggcccggggagaaaagcacctgctggaccggagccgggtctacttccgcttgctgaaaaagatcgtccgtcagggtgcggagcggggcgaattccgccctggtctggctcaggaggagattgtccgggccttcgccatgtgggaacgggcacagctttacgactggtgcctgtgcggcggggactactctctggtggcctacgcggagaagatgacgcccctgtttttggagagtttccgagtcagagaataaatcttattttttgtttttcaagtattccatctttctgtacagtataaaactgttgaaatacaaagagaaacatgatatcacaagaaacgccgtatagaattaattctatacggcgttctgtatttcattcttgtttgcgttgtggtatgataccaagcattgaagtgttaaaggagagagtattgtatgacatccgcacagatcgcgatcatgacaacgatcattttgtatctctgtctggtgattttcaccggcgtgatgatcggtaaacgaagcaagaagagcgctgaaggcttttatctcggcggccggggcatgggccccctggtcacggccatgagcgcggaagccagcgatatgagcagctatctgcttatgggtatccccggcctcgcctatctcagcggcgtggcggacgccagctggaccgccatcggccttgccatcggcacctacctgaatttcctgctggtggcccgccgcctgcggcgttacagcgtggagttggacgccatcaccatccccagctttatctccaagcgctacggggagaaaaagcccatcattatgggtatcgcctctctcatcatcctggtgttcttcgtgccctatgtggcctccggtctggcggcgatcggcaagctgttcaacagcctgttcggctggaattacatgctttctgtgatcgtgggcgccattgtcatcatcagctatacttccgtgggcggcttcagcgccgtcgccactatggacctgatccagtctgtgattatgaccgtcgccctgtgcatcatcgtggtgttcggcattgtgcaggccggcggtatggatgctgttctggctcatgccagcagccttcccggttttctgagctttggtcagacctataacgccgcctccggacaggcggagccttacggtttgatccgcattgtttccatgctggcgtggggccttggctacttcggtatgccccatattctggtgcgctttatggccatccggcacgaggatgagctgaagctctcccgccggatcgcttccatctgggtggtgatctccatggccgtggccgtgtttatcggcatcgtgggccatgccgtgtccaatgtggggcgcatccccatgctggagggcagcgccacggagacggtcattgtccggctgtctgacctgctttcctcttacggtttgctgcctgccattgtggctggctgcattctggcgggcattctggcggctaccatgtccacggcggactctcagcttttggcggcagcctccgcgttttctgaaaacgtattgcaggatgtgttcggcgtcaagctgacttccaagcagaatatgctggccgcccgtctgacggtggtggtgatcgcgtttatcgccatcttcctggcggcggaccccaacagcaacgtgttcaagatcgtctccttcgcatgggccggcttcggcgcaacctttggccccgctgtgctgttcgcccttttctggagacgcagcaaccgtcagggtgtgctggcaggtctggtggccggcggtctgatgatcttcgcatggaagttctgcgtccggcctctgggcggcatctgggacatctatgagctgatgcctgctttcatcgtcaactgcatcgtgctggtggtggtctctctggctacccccgcgcctgacaagagcattacggacgtgttcgacaaggtccgggactaaaaagcttattaaaaagcggtgggctcagcccaccgcttttttaactgattcggccggaaacagcgtaaacaataaagcaacccgccgtatggattccatacggcgggttgcttttggcgggggcatatgaggatcgaactcatccaggcggctgttcgccgtccgcaccggttttgaagaccgggaggcacaccagcacctatctgctcccatgttttcttcgatgctgaccaccgccgaagcggagcaacgctccggcggtatgtcagtcatgaaatttgagcttcaggcggcggcagtcgccctctcgaaccgtgatctgccgtcggtcgcaggcttctaaaaacagcaaagcgtatttccgggtggtgtctaaagcgtcccggacctctgccagcgtgacagcgccgtggtcagcacacagcgtccgcaagatatccagccccttttggaacacctcccggtgccagcacagctccggtgacagccgtaccagctctccgccggtgagcaggctttccagcacctgacgagcctcctcccggcgctccggaggaatactgtccagcaccgcttcgacggtgtccggctccgggccaccccggaggaaacgctccaacagcgcgtcccggagggcggtctgccgcttggtgagccgaatggaaaactctgccagcgcccaatggttttcggcgcgtttcatccgcccctccgcccgaaaaacctccaaaagcgcatcgccctcagcgggagtgatctgccggaacagcttttgccgcagctcagcggcgggcatcccggcgtgaagggggtgcttttggtggtaggcggacagcaattcccggcagcggtcccagagggtgtccagcgccgaggccgccgcgtagcggcctgacagcggctccgccagcattccctgattcagcaggtctgccagcaaggatacagcagtaccagtgtccagaccggaacgctccgccaactggctgctatccggcagtgaaacgccgaattcctccgcagcttgcagcagccgttgactgccggagccctgttcccggagaattaggttgtccagcaccaccgggtcatgccgtttgtggcgaaggggccgggggtccagcaccttgccgccgccgatggtctccactggagagtaaaatcgaatgacaaaccgatccccctgtttgacggccatcggctccgtcagccgcagctgggcaaggcagctttctccggggcgcagctcgtcccggtccagcaacaccgcctttgccaaatgaacggaggtcccgtggtacagatggatctgggagccgttcaaaaccgtgcgtttggcgtttctcagacaccggagccgcacatccagcatccgggaaggccggacgctgccgggtcttaccgccgcatccccccggtggacctctgttttttgcagatttgtcaagttgagggccgcccgctgaccggcgtaggcggcgtccacgctttcgctgtggacctgcaaggtccgcacccggctttgcagcccggagggaaccagctccactgcgtcccccacccggacagccccttcagtaagggtgccggtgactacggtgccgaagccgtccacggaaaagacccggtcaatgggaagccggaagggtgccagcgcgcttttttcccgcgcctcctgtaccaagcggtacagggcgtcccgcagttccgggattccctgaccggtgacggcggagactgacagaatgggcgcaccctctaaaaaggtgccctcggtcagctccaacgcctgtctccgaacaaattccaaccagtcatcatctaccaattccgccttggtcaacaccaccaagccgccttggacacccaagagagacagaatatccagatgctctacggtctggggcataacgccttcgtccgcggcgatgaccagcatggcaagatcaatgccccccgccccggccagcatatttttgatgaatttttcgtggcccggcacatccacgatccctgcttgcgtgccgtccggccagtccagtctggcaaaccccggctcgatggtaatgccccggcacttttcctccgccagacggtccgtatcggtaccggtgagcgccttgaccagaacggttttgccgtgatctacatggcccgccgtgccgatgatgacgtgtttcatgaagcggtctcccgaaaagcctgaaggatctcgtcaagatccgctgggaacaaagtccgcatatccagcagacaccggtcatgggcaatgcggacgatgatgggtacaggccgctgccgcagctgtgcttccagtgcggcggcgctgtcccttggggcgacagccacggcgaaggagggcagcgtctgggtggggactgccccgccccccaccgggttttccgtggaaaccacctcgacggtcacgccaatccctcccatgcggcggcagagcgactctgcctgctggcgcaactcctccggcgtttgggccagcatggagagcaccgggatctcctgaagggcggtgccgtccgcatacgcttgcagagttgcttccaaggcggccagcgtcagcttgtccacccgcagggcgcgggccagagggtgacgcttcaaaaggtcaatacagtgccgcttgcccacgatgatccccgcttggggaccacccagcagcttgtccccggagaaggataatacatccactccggcctttacggacgcttgaaccgtcggctcatcccggaggcccaagggtgccagatctacaagacagccgctgcccaagtcctcaatgaccgggatgctgcgggagcggccaagctccgctaaggcggcgggggacacgctctccgtaaagcccacgatgcggtaattgctggtgtggactttcaaaagggcgcgggtctgctcgctgatggcgttggcgtagtcggaaaggcgggtcttgttggtggaaccaacctcccggagcaccgcgccgcaggcggccatcacatccggcatccggaaggagccgccgatctccaccagctctccacgggaggtaatgacttctcctccggcggtgagggcggagaggatcagcagcactgccgctgcattgttgtttaccaccatggcggcctccgccccggtgaggcggcacaaaagcggctctacatgggcgtaccgctgcccccgctcccccgctgtcaggtcatattccaaggtagaatagccctgagagacccctctcgctgccgctaacgcgcggtcactcaggcaggcccggcccagattggtgtgcagaacgatcccggtggcattgataacgccccggagggagggcaggcgggatgcccggcacgacgcgctgatttgagcgcagagggcctccgtggagggcagctctgtgacggtccccaccagaatatcggcgcggagccggtccagcgtccggcgaaccgcctccgtcacggcggaggtccccgcctccgccgtcagcatttttagggcgggcaggcggagcaggtcgtccacctttggaatttgacgcagcagtgtatccatgagaacctcccttggtgatttacggcttttccttatcatactggatttccaacgggttgtaaagcaccccggaaagcagaaaaacgcgcctcccgaaaggaggcgcgcttgctcacttgctgagatagtctttcaaaaatttcacagcctccacataaccttgaaaccccaagcctttataggtcttgacgcaggccatgccggcgtaggagacctgacgaaacggttcccggctgtccacatcggagatgtggacctccacggcgggaatggccacggccttcagcgcgtccagaatggctatgctggtgtgagtgtaggcggcggggttgatgatgatgccgtcatagacgccgtaggccgcctggatggcgtccacaatggtcccctcgtggttggactggacgaaaccgacctcgatgccctcggcatcgcaagcggtgcggatgagggccaacagggactcataattctggctgccgtagatggcaggctcccgcaggcccagcagattcagattgggcccgttgatgaccagaagcttcatagcagcgcctccttaatggtttgtaccgtgacctccagcgccccgtcattggacaccgtcacgtcggcaaagcggcggtacagcggctcccggcgggcgcaaagctgagcgaggtctgtggtttgggaaatgggccggccctccgttggcagcttggcaaggtcgcgggtcagacggaaaatggtgccgttttgatgcagcagcgggtagttttccggccgggtgacgcagccgccgccggtggagaggatgatgccggagcgcttgccctgttccgccagaacctctgtttccagtttccggaatgtttcctccccggactgggcgaagatctccgggatggacatcccagtcctttgggcgatcaattcgtcagcctccactacctcccggtccagcgctttgcccagagcggcggccacggcggatttgccgctgccgggcattccgatgaggatgatattccgcagccgctggttcacagcgcgttccacccgcgccaaggcttcatcgccgatggccgtgccggtgaactgctcgctggagcgcttggcctgagccaccagcatggaaagtcccccagcgtggggaatccccaactcttctgcctgtaatagcagagcggtccgtgccgggttataaacgatgtccagcaccccctcgcagcgggaaaaacgccgcagatccaccgccgccgcgccgttatggggatacatccccaccggggtggtgttggcgatgatctgggcatcggcgtggcggtccagatgatcgtaatcgtccggaccgctgcgggaaatgacggtaacgtcagcgcccagctgctccagcgcagccttcaccgtgacggaggccccgccgctgcccagcaccagcgcctttttcccggcggggtcgatgccgctgctgcgaaccatgtagagaaagccgaacaggtctgtgttgtcgccgtacagcgtaccgtcaggccgacggacgagggtattgacgctttgcagttttgctgccgcctcggacagctccacgcagtagggcaccaccgccttcttgtaggggatggtgacgttcaggccgtcccagcggtcggagcacagaaaggcatccaagtcctccttggagacctcaaagagccggtagtcatactcccccaacgcgtgatggatcatgggggaatagctgtggcccagcgtttcccccagcagtccgcaccgcagcatcagaccacctcgctgtaactgcccagataggaaaattcctcgcacagagagggcagctcacccatgagctgtaaaaattccggggcgtataccggcgtttccagatcaaagtagaacatgaattcaaaattccgctccggcatggggcggctttccagcttgttcaggttcaggcccaaggcgtagaaccgggagagcacccggcacagggagccgggctcgtgaggcagcaccgccatgaggctggtgcggtccgcaccggggtagatctccagattcttggagatgcagatgaaccgggtgaagttgctgccctgatcctgcaccccggcctctaagcattccagcccgtacagcttcatgcaggagcgggaggacagggcggcggcgtggccatctccctccgccaccttctgggcggccacggcggtattttcacaggggatgatcttcacaccggggaaggcctgcagatactgctcgcactggctcaaggcctgctggtgggagtagatctccgtgatgtcgctccgcttggtgccgggcttcaccagcagattgtggtccaccttcagccgcacactgcggacgatgcggaaatcgtgcttcatcatcagatcgtaaatggcattgacgctgccggcggtgctgttttccagcggcagcacaccgtagcggcacaatcccctttcgatagcggcaaacaccgcctcaaaggaagcgaagtacatgatgtgaggcagcttgaacagcttgtcgcaggccagctgggaataggcccccgccacaccctgacaggcaacggacacgttggagggaaacaggtttggcgtctggtcaatggcggtctgaatttccgtggtcagcggggatgtgctccccagcagccgtccctgatagcagcggctcagttcaaacagcatggtgtagagagagacggtgtaatcccgcatatcctccggggcctgcgccgctacatccagcagcttttcccgctcccggacagggtccagcaccggcaggccgtgctccttcttgcaggcggcgatgccggcggcggtgttcatccgctgggcaaacaactctaccagttggcggtcgatctggtcgatccgggcacgataatcactgagttccatagagattcctcccttttaagactggcccaacagggcgtcgtatacggcgatggccgccgcggcttcgatacagggaacggcccttggcacgatgcaagggtcatgacggccccggacccggagaatttccggggtcagggtgttcaaattcacgctttgctgctccttggcaatggacggcgtaggcttgaacgctgcccggaaggtcaggggcatctcgttggtgatgccgcccaaaatgccgccgcagtgattggttgtggttctgaccgtgccgttttccaccacaaaggggtcattattttcgctgccacggagccgcgcggccccgaagccgatgccgaactcgatgcccttcacagcggggatgccgaagacgatggaggaaatacggccctccatgccgtcaaacagcggtccgcccagtcccgcgggcaaacccagcacagcacattccacgatgccgccaacggagtcatcctccgccttggcggcggcgatctctgcccgcatggtctcccctacggcgtcatctaccaccgggaatggcttgtctgccgtggaaacggtcagaggagtgacatcttccaccgagccgatggaggcgatgcggctgatgacttcaatgccctgctttttcagcaattgcaggcagatgccaccggcgatgcacaggggggctgtcagccgcccggaaaacgcgccgcccccggcgaaatctgcgtgaccgccgtacttcactccggcggtatagtccgcgtggccggggcggggcaccacggaaaggccgtcatagtccccggagcgggtgttggtgttgcggatgatggcggtaagcggcgcgccgcaggtgacgttccccaccagaccggaaagaaattccggctggtccgcctccttccgaggggtggaccaatcgttgcggccgggagcacggcggtccaaaaacgtctgaagggccgccatgtcgatggtctccccggcaggcagaccctccaaggtcatgccgatggccggggcatgggactggccgaagatggtcagatgcagaaattctccgtaccggctcacaggccccctcctttcaacgcgtcaaaatcttcccagaaatgggggtaggacttggaaacgcaggccatgccctgcacagtgaccgggctttcgcacagacaggctgccacggcggcggacatggcgatccgatgatcgccgcaggaatcggcaatgccaccccgcagacggcccgtgccgtggatcaaaaggccgttgggctgttcctccacactgccgcccagagctgtcagcaattgagccgtggtgcggagccggtcggattccttcaaacggagccgtccagcgttgaagatctgggtgtccccctccgccccggcagcagtgacgcacagcaccgggatcaggtcggggatggggccggcgtcgatggccacgcccttcaattctccccggcgaaccgtcacggagccgttctccgtggaaacacgcgcacccatggcggccagaatgttcaaaacggcccgatccccctgcgaggaggccagatccagtccgtgaacagtgacgccctccggggacaaggcgcccatacacaggaagaaggcggcattggaccagtctccctcggcggtgagacggtccgggaaacgaaggcgctgtccgccgggaatgtgccacgtcccaccggttttccgcagagagacgccgccccggcggagggtgtcctccgtcatagtgacataagcggcggattccagtccgccggtaacggtgagggcgctgccctcattcaacagtggcagagccatcagtaaaccggaaatgtattgggaggacacatcccccggcagagaaaactcgccggggcggagccgtcccccgcagtagagcaggtcgtggttctggcggatggtcatgccgtgatccgtcaggacctgatccagcggatgcaaggggcgctgcggcagccgcccttccatgtggaacacggcgtctgcttccaaaacgccggtcagcggcagaagaaaccgtagggtggaaccgctttcctgacagtgcagatgacgggtcccctggggcttctgggtgatgggccgcaccgtcaggtcctcgccccgaagccagatctcagcacccaaggcgttgagacagtccgcagtggcggcaatgtctctggaaatgccccggcagcggatcaccgtctcattctggctcagagcggcgcagatcagcagccggtgagcctgagatttggaggcggggatgtgaacggctccggtacggaagccgggctgaagaatttcgatcatcgcagacctcccgccttcagccacccggccacctcgtcggccgggaccggctccacacggcaatggcccacccgctccggtacgatgaacttggtcacatcgtccgtgcgctttttgtcggcctctgccgccgccagaatatcagtcaggggatagtcggtctctgtggggaggccataccgctccaaaacggccagcagccggggcagcgtctccggggtgcaaagccctttttccacggcggcccgggtgatgatggccataccgatggcgaccccctccccgtggagcagggtgaagccgctgcaagattctacggcgtggcctacggtgtggcccagattcagcagtgcccgctggccccggtcaaattcatcaccacggaccacgtcccgcttcatgccaacacacacggagatcacccgctcgaactgctcccgcaccggggtttcctccagctcccggagaaaatcctcgctgtaaagcatggcgtatttgatgatctcggcgcacccggcccggtattcccgctccggcagcgtattcagcagggatgggtcgcacagcaccagagagggctgatagaagcagcccgcctgatttttgccgtgatccagatctacggcggtcttgccccccacagaggaatccaccatggacagcagcgtggtgggtacctgaatatagggaattccccgctgataggtggcggcggcgaagcctgccagatcccccaccacgccgccgcccagcgccacgaggaaatcgctgcgggtgaagcggcggtcgcagaggaaattcaaaatctgtccgtaggtggaaagatttttctgctgttccccgtgcgggaacaggaaatgatcaacttgaaatccggcatccgtcagagctttttcggcggcagcgccgtaaagggcgaacaccgcgtcatcagagatcacggcggcccggcggccaaggcccagttccgctgccatagtccccagccgggtcagcagacccggctcaatgacaacgtcatactcgcgggaggccgcgatatggatggtggtcaacggccatccacctcctcttttcgtttccggccctcgtccagcaggcggacaaggccggggagatcgttatgtaccatggcatcctgatactggcgcaggtttgccatcagggtatccagttccgccatgagaaagtccttgttttccagaaacagttccgcccacatttccggggccagccacgctacacgggtcatatccttgtaactgccagcggagaagcccttgtgcagttccgccgtggggcttttgatataggcgttggacaccacatgggccagctgggaggtaaaggcgatcatctcgtcatgctgttccgccgtggtaatggaaaaccggccaaagcccgcaggagccagcagctccttgacccgactcagcaggtcgatgtcattgtgatccgccgggaccagcaccataggagcgttgtggaacatggtgggcgtggcatacttgaagccggaattgtgggtgcccgccatggggtgcccacccagataggtgaagccgtattccttcgccagcgggaagcaggcgtcgcagaccagccgctttgtgccgcagcagtcgatgaccaccggcttcgggccgatatgcgcgccgtgctgccgcagatagtctacagcggcggagggatagacggcgatcaggatcaggtcgcaggaggaaagactttcctccgataagagaccgtccaccgcgccggaaagaacggcaaagtcgaaaacggactgatccgtgtcaaaggccaggaccctatggcctgcctcgtggtaggccttggcaaaggagccgccgatcagccccaggcccacgatcccgacggtcatgccgtcacgaccttccggatctcgcggatcttgcccatcagaacgtcaaactgctcaggccgcagagactgcgcaccgtcgcacagggcgtggatgggatcgttgtggacctcaatgatgaggccgtcggcattgcaggcggtggcggacatagccatgggggccaccagccggttgatgccggtggcgtggctggggtccacgatgaccggcaggtgggtcagctcgtggagcatggggaccgccgccaggtccagggtattgcgggtgtaatcgtcaaaggtgcggatgccccgctcgcagaggatgacctgctcgttgccgctggccatgatgtactcagcactcatcagcagctccttcagggtgttggcaaggccgcgcttgaggaggatgggcttgcggagcttgcccaattcccgcaaaaggtcgaaattctgcatattccgcgcgcctacctgcaatacatccacatcctcaaagaggggcaggtccaccacgctcatgatctcggtgacgatgggcagaccggtctcctgccgggcgatcttcagcagttccagaccctcggccttcaaaccggcgaagtcataaggagaagtgcggggcttgaaggcgccgccccggagcatattggccccggaggccttcaccgccttggccaccgccacgatctgttcctcagattccacggagcagggaccggccatgacgcagaagtttccgccgccgatcttcacatcgccgacctctaccacggtatcctccgggtgaaatttgcggttgcagcacttgaacggctccgtgacccgctttacggaatccacaatgtcgagactggctaccaggtccatatccaccttggtggtgtcgcccaccagtcccagaatggtctggtactcgccctcggacacatggatgtgcaggcccagattctggagccaatccatcagctgttcacggctttcctgggtaacacccggcttcaacgcaacgatcataacggtttcctcctataaattgtttttgatgataagtgatgaatgaaaaaacgccccacaggcgtaacctgtgcggcgcaaaaatcggcttggggggcccttttgattgcaacacaaattacccttactatgcgtgcatagtaaagtagtaataggtgaagaacataacagaagtcatagtaggtatctctcctgatctcataaggctttccaagatggttacaatgtaacacacccgcagacccctgtcaacaaagggcgacgaaaaaagtacacaattttatcggtttaaagcgacttcgattcccggcgaaatcacagaaggcagaaaatcaaagctccctccggccctccaaggcccgggccagggtcgcatcatcggcaaattccagatggccgcccacggggatgccataggccaaccgggtcaccttgacctcaaagggcttcaaaagccgggcgatatacatggcggtagcctccccctccgtgtccgggttggtggccatgatgacctcctccacaccgccctgagccacccgctccagcagtggcttgatggcgatgtcatcgggaccgacgtggttcatgggactgatgacgccgtggagcacatggtatttgccgttgaactcccggccccgctccatggccgccacgtcccgtgggtccgccaccacgcagatcacagagttatccctcttgggagaggaacagatggggcacagccccccggcggtaaaattgcggcatacggggcagtaggtgacggtgcgcttggcggtaacgatggcgtccgcaaacgcctgagcgtcctcctccggcaggctcagtacatgaaaggccagccgctgggcggtctttccaccgatccccggcagacgggcaaattgttcgaccagcgcctccagcggcgcgggaaaatactccatgggtcatgctccttcacgatccgcagggcagaatcttccaccctgccccgcagcggttgtgttatgcggtatttgaatcactttgcccctgcggggcaatcaccctctgcgcctggcaaaaataccacgacctacgcgccatgggcggcagaaaatcatttaaatccatccttcgtcaggacatgtgcctgacgaaggatactctgcaccccgcaagtgtgcgagcatcccacgcaagcgagatagcgaatacctggcaacattagatttaaatcatttttaccgcgacatgcgcgtggcaaaaatacattgacctaagcgccttgggcgcgtttaccagtccacggactggtggggaatctaaagggaggatgaaattccctctttaacctaactccatggcgaacagcgccgccgcgccgccggtgtggacgaaggcgatgtgctcctgcccgtcgaagtagccctccttcaccagcatcaggaatttggcccaagccttgccggtgtaaacggggtccagcaggatcccctcctgccgggccagttcctcgatgtagggggtgtcctcggcgttggggatggcgtagccggcgcccacatggtagatcatccggaaacggctgtccatgtctgtggggacgggctggcccaccagcccggcggcttctttcaccaattcggatacgatctcctcaaaggggtcggtatccacgcccagacctgtggccttggcctgcgggagaaacagggaggtacccagcaccagaccggcggtggtgccgccggagccagtggcggaggccacatggctgatctcgatcccggcctccttggcctgctccgccagttcccggacgcactcggcgtagccgatggagcccagtgccgtggagccgcccacggggatgatatagcccttgtgtccctggttggccaacacctcgcagcgctcacgcatctcggcgtagatgtcctcatagctgtcggtgtccataaattccacctgcgcgccgaaaatatcgtccagcaccagattgcccttgcggtccgtgacaccccgctttttcaggatcaggacacagcgcatccccagacgggcggcgcaggcggcggtgagcatggcatggttggactgggccccgccggtggtgaacacggtgtcgcagccctgcttctgggcgtccgccagcagatattccagcttgcggaccttgttgccgcccaaagcgacgccgcacaggtcatcccgtttgatccagatgctcttgttgtagatccggctgatattttccagccggtaaaagggcgtaggatacacgcccagcctgagctgaggcagattattccaatgactcatacgctcatttcccccggagttccttgatacgggcagggatgtcctccgccttgtagacggcgctgcccgccaccagcacgttggcaccagcgtcgatgcaggtctgacaggtgtcgggggccacgccgccgtccacctccagttcgcaggcggggttccgctcattgatgagcttgcggatggcggccaccttgggcatctggtccgccatgaatttctgaccgccgaagccgggctccacggtcatgaccagaatcagctccacctgatcgatatagggcaggactgcctcccaggtggtcttgggcttcagaacgatgcccgccttcttgcccttggcgtggatcttgtcgatggcggcctgaatgttttccgggaaatccgcctccacatggaccgttaccagatcggcgccggcgtcgcagaattcctccacataccgcacaggctttgtgatcatcagatgcacgtccaggaacatatccgtgactttccggatggatttcagcaccgggatgccgatggagatattgggtacgaatacgccgtccatcacatccacatggacgtagtcggcgtcagcaatgcgatgaatgtctcgttccagattcgcaaaatcggcggagaggatagacggagaaattttaatcatggagatgacctcttttctctaaatttccggcagatgggccggagatgtgggacatgcttcgtggcagacggcggcgggaacgcataggatagcgcaagcggcgtgagcgtccccatcgatacgccccgcagcgtccgccctcgggtctgacgccgccgcttttcagataggaggccggcggcagcgccggcctccattagggcgcaaaacaactgtaatttcgatgactgttttcagccatagtgtagcagacatggacggcaaaagcaacgccgggagaaaaatttgtgccccgctccttttattgaccaacgatggtgcctatgctataatcaccctgtatgaaggaaaggaggtggcttatgcccgctatttctgtgatcgtaccggtctatcaggcggaagcgctgctgccccagtgtgtagagagcgttttggcccagaccttttccgattgggagctgctgctcatcgacgatggcagccgggacggttctccgaccctgtgcgacggctacgccgcaagagacccccgcattcgcgtgttccacaagccaaacggcggcgtgtccaccgcccgaaatctggggctggagcaggccacgggaccgtatatcgcttttttggacgccgacgacacctttgagccggcggcgttggagaccttgtggtatctgcgggaaaaggccggggcagacagcgccggctgtgcccactacaacgtgacgcctgacggggaacagcggacagagctgttgctgccggcaggaatctatgaagagaccggcatccgggaaaagatcctctggcctctggcgggggaccggcttcaaccgccggtgttcaacggcttcatctggcgtttcctctttgacgccgccatcctccgggacaatgccattacctttgagggggcctatctggaggacgagctgttcctgatggaatatttcgccaatgtgcaccgtctcgcggtgacggacaagcccctgtaccgctatctggaaaaccccgcctccgccacccaccgctatatgcgggactatccggcggtattcgcccggtttttggagcgaaaggcggagaccgtggagaaatacggccttgacgccgcccggcctcagtggcgggccaacacagtgtgggcagggctgctgatcgccgtgggcaacgagtatgtgaagagcaatccgaagcccgtccgggaaaagcggaaggccgtggaagccctctgcgcccagccggagtttgcgaaagccatccgggaactacgccccaagggcttgggccgcaataagcagatcgtggcggatctcatcggcggcggccggttcggtacgctgacggcgctgtaccgcctgaaaaatcgtatgtaaggagcaactatgacactttggcaaaccagcctgacctatcagatatgggtctggctttgcgatgtctatgaggacagtaccctccaccgttttctggcggcggcgggccgttggtgcaacgggcagatcgaggagagccgcatcctgcggccgctgtgccgggaagggattgcggcccggtcttggcgggacagcttcctgtgccgggtgctcagcgctctggtgaacctgccggggacgctgcttcacgcctggtacaaggcgtggaacctgacctttgaggacagctttttcgcacgactggcctttgacatgggagacagtgcctccattgcccagtcctggtgcatcgcggcgctgtggtgcatcccctacgagcgctggaacaacgcatacagctttatgaccggcgttttgctgctgctgctgttttacgccggggctatgcggacgggccgccgtctggatgtggcccggatcggcttctatccggcgttgatactggctgcggtgacgctggccgtgaccttctcctatgcgccggggctgtccgcccgttttttgatctaccatgtgtcggcggcgctgctggtggtcatcaccgtcagtgccgtgcggaatggggaggatctgaagcggctgtgcgccgggacggctgtctgcgtgggcgcaacaggcgcttacggcatcgtccagcgaattcagggtgtgaaggtaaatccctcctatgtggatctgaaggtcaacgccggtatgccggggcgggtcttttccattttcgacaatccaaacaccttcgcacaggtgcttttgctgctgctgccgctggtgctggccctgttccttacggcgaagcactggcaatggaaggccatctgcgccggtatcttctgcgtgggcggcatggccatggccatgacctattcccgggcaagctgggtggggctggctgtcgctatggcggtattcgtgttcctctggaaaccgaagctgatcccagcctttatcctgctgtgcgtactggcggtgcccttcctgcccaccacggtgctgaaccgcatcctcaccattaccaatacggcggactcctccacctccagccgggtgtctctttacaaggcggccattgaggtcatccgccgttcccccctcaccggagcgggcctcggcaccgccgccacccagacatacatccgggaattcaacctgtatcacgacaaggccccctttgtccactcccacaatttctatttggaggtctggattcagatgggcctgctgggcgtcaccggttttgtgggttccatgctgtggaacatcaaaaacgccgcccgggcggtccggcataacggcccctccgtggggaggacggtagcagccgccgctgcgtctgccatgtgcggcgcgatggtctgcggtctggcggatttcttgtggaactatccccgcgtgctggtcattttctggttcaccttcgccatggccatcgccggcgtcaaggtctgcacggaagaagcaaagtaaatgataaaaacgttcgccgtatggacctccatacggcgaacgtttttatagggtgcttccctgaatcagattgtctctcagaaatgcctgatgaatggcgttcagtacccgctttttatctccgctccacaggggagccagcaggtcccgcttcgcgccgtccccggtgaggcggtgaacgaccatttccggcggcaggttttgcaggcacaattccagaagggagatgtactcctccagttccagtgtccgcacccggcctgcctgccactccgccgccaggtccgtgttccggaggacgtggagcagatggagtttcacgccctccgccccgctttgaccgatatagcgggcggtctccgccatcatttccggtgtttcgccgggaagccccaagatctgatggacaatgaccgtcacgccgatggctttcagatccttcaccgcccggtcgaataccggcaggtcatagccccggcggagataccgggcgctttccgggtggatcgtctgcaagcccagctccacccacaccggcttgatgcgattcagctcctccaataggcccagaatatccggccccagacagtccggcctggtggcgatagataagatcaccacatcctccggtgccatggccgcctgatacaaggcccgcaggcgatccgcgtccccgtatgtgttggtaaaggactggaagtaggcgatgtatttcgcatcggtcccggccttggcggctacccgtagtctggcggcggccagctgatccgggatggctccggcctccgcgaaggcccccgcgccgtcgcagaaaatgcagccgcgcgtgtccagcgtcccgtcccggttggggcaggaacacccggaggacagggccagcttgtagaccttgcagccgtattccgcctttagccgggagttcaggtcattccagtacatatcattccgctttgggggcggggtaggggatggaatagggctggctgccccgttccgccaacttttcctccagccacgccttcacctgctccacgccctcctccgtccacgggaaggtctgggattccacatccttggccagctcgaaactggtgttctcgtagacccagacagtgagagtgccctttccgtccgtccagccctcccgctgaaaacggtagcggaaggtgccgatgctgccggggtaaatagcggcttttgtgaagaaggccacattcagatgatcgaaatgtcccatgattacctcgttttcccgctctgcggcgtcctgattttttcctcagcagtatagcatacttcaccggattccgcaacggcccttgcaccggcgaaaaaaacagggtatactgtttatggttataaatatgccacataaaaggagactgccatgaacattctggtgctttcggattcccacggaaatatatccaatatggaggaggcggttgaacgggaaaagcccgacatgatcctccatctgggggactgctggcgggatgcggaacggctggcggaacggtatccggacattcccatggagcacgttcccggaaattgtgactgccgtccggaagagccggcggaaaaactgctgtttttaggggactgctgtgtgttgatctgccacggccacacctgcggcgtgaaaacctccctgctgacggcgggcttgaaggcagagcaggaccatttagatgcctttctgtttggccatacccacaagcctttggtggacaagcggggcagaacgctgttcctgaatccgggagctgtgggcaagggcctgcggcctacctacggtatattaacggtagagggcgaccggatcgacggccgaaccgtgtttttggatagcgaatcataaaaccaacagatacgataggtaaaaatataagcagaattgatatctgaaagtgcattttttaattttacaaaggtcaacctatctgttaaaatgaataagctggggcaaaaggtcctgtgcttgaagctaaaatcatgtgtgccgccatgtggcggcggaatggagttttttatgagccgtatggtcggtactgtctcccggggtgtccgggctcccatcatccgcagcggcgacgatctggtggagatcgtcaccaagtccgttttggaggctgccgcccagccggaggatggctttgccatccgggaccgggatgtagtggccatgaccgaggccatcgtggcccgcgctcagggcaactacgcttccgtggacgatattgccgccgacgtgaaggaaaagctgggcggtgaaacggtgggcgttattttccccattctcagccgcaaccgtttcgccgtctgcctgcggggcattgccaagggtgcgaagaagatcgtcctcatgctgagctatccctccgacgaagtgggcaaccacctgatcgacccggatgtgatggacgaaaagggcgtggacccctaccgggacgtgctgaccctggaaaaataccgggagctgttcggctacaccgtgcaccccttcactggcgtggactatgtggcctactacatggacctgatccgggactgcggcgcggaggcggaggtcatcttcgccaatgacgccaaggccatcctgccctataccaagaatgtcatcaactgcgacatccacacccgcaagcgcaccaagcgccgcctgatcgccgccggtgcggaaaaggtgttctctctggacgagatcctcaccgcccctgtcaacggcagcggctataacgagaactacggcctgctgggcaccaacaaggccaccgaggatacggtgaagctgttcccccgcgactgccagagcatggtggaggccattcagaagaagctgtatgacgccaccggcaagcatgtggaggttatggtctacggtgacggcgccttcaaggatcccgttggtaagatctgggagctggcagaccccgtggtgtcccccgcctacaccgccggtctggagggtacgcccaacgaactgaagctgaagtacctggcggacaacgatttcgccggtctggacggcgaggagctgcggcaggccatcaagggccgcatcgccgctaaggacggcagctctctggtgggcaacatggtctccgagggcactaccccccgccgcctgacggacctgatcggctccctgtgcgacctgacctccggctctggcgacaagggtacccccatcgtctacattcagggctatttcgacaactacaccaacgactgagaaaacagcgaaaaacagacgccgcttctgcatgaagcggcgtctgttttttatggttcgtcctccggggacagcagccgcatgacggatacctcgtaagctgtccgctcctccgggccggtttccgtcacctttcgatatatccggctctggacccgcccctcaagggacaagggcgctcccgcctccaaggtacacacctgtgacgccacctgtccccacgcgatcaccggcaggtaatccgcccggccgtagctccggggcacggctaagatcagatcgctgatgctgcggcccagcggcgtccgccggtagataggcggcttgcacaatgtcccggccagcaggatgcggttgaccggctctcccagccccggctgaagggaccgggcgtacaccgtcaacacgagacgccgtccgggaccggaacggttgttaaaagagcggagctgtccctctacccggaggggaacgccctctttcagcagcggcagttgtgtctgccgcaccagcaggggcagacggtccgccgtgccggacagccgggggacctccaggatttgacggtaaaaaagctggccgtgattttcatgggatggctccggagcacccacggggatcccctccaaaagcacgtcatttcgggtctgatttgtcatctcgtccacctctcggttgtgatgcttcatcctatgaggggacggcgggccttagaacgaaatttacaaatatcgccttgtaagtcgcagtgcaagcggatataataccctcatcaaaacgaaacggagggacggctatggcgaatattctggattatctggactggcggggggatctgacgctggcgcaggatccgtttaacgaagtggataacctgatcttggcggagctgtccttcgtggacttcggcggcatcgtccccggccccggcgaggggagggccgtgcccctgtggaaggcggcggaggcgtattttgccaaaacggaaggtcggcccatcgacatgggcgttctggtgcccaatcagatcccggagctgctgcgccggacggcagcctcgccccggttccgggacatgaagctcaacggctttgtggaccatctggacacggtgaaggcggagcagttcgcggcgctggcggcagagtgcggggatggcaccgtctacctctccttccggggcaccgacgatacgctggcagggtggaaagaggatttctatctgagttgtatgcgggaggtccctgctcagaaaatggcagtggcatacacggaggccatggcccatcagtaccctcgaatcaagctgcggctgggcggccattccaagggcggcaatctggcagtgtgggcgggggtgttctgtcccacggcggtgcagcggcggatcgccgccgtctggtccaatgacggccccggcttccatgacgatattctgtctctgccccggcatatccggctggcggagcgtatccacaccattgtgccgaaatcctccgtggtagggatgctgctggagcacgaggaggactacaccgtggtagacagcagccagcagggcctcatgcagcatgacggcttttcctgggcggtgctggggaaccgatttgtccggcttcacagtgtcacccggcaggcccgcctgacggatcaggagctgcggggctgggtccaggggctgaccgttgagcagagggaaaaatttgtggacagcgcctttcaggtgctggaggcctccggtgcccagaccctgacggacctgaaggcggacagcttcaaagcggtgcggcctatggtccgggccttgaaggatctggacaaggagacccgggaggctctgctgaaatttatgagcatcctctttatgagcaacctgcggatgacgctggagggcattcaggaagaaacggagaagagccttctgcggaacgggaaaaaggcggagagatccgccgggaagaagggataaacaaccgcagatgttccaagcggaacgtccgcttatgccgacagcggaaaaagcaaccggcttcagacataaaaagcatccacccgttatgacgggtggatgcttttatgcttggccggaatcctggcagctccgttccagagcacggcggatattgccgtccagcaagtgccccagatggtcaatgtaggcatcggtgtcatatttcatgccgttttgcagccatagggcggtcagcccggacagagcggcggcatagaattccgacaggacacggatatcctcgtcatccgccgggaggccctcagcctgatcccggatataggaggtcatggcagctaatgtcaccttatggtagtagcgccgaagcgtttcctgattgcccgaattgtagagatgatacacggcccgcttgttctgggaggcaaaggccgtagcgtcccggaatgcttcctgccagctgtcataccggcgcagcttggactggaaatcctgaatttccagctgaagaatgtcctctaccagtgcgtagatatccgcataatagtaatagaaggtgttgcggttcacagcgcccttttccgcaatgtctttaatggaaattttatccagagggcgttcgttcagcagttggataaaggcccgccggatggcattttttgtctgttgcgccatagcccgctccttttgaaacaaatttcctttttcatatccattatacacggaaaccggaccagtctcaagtgcgagtttttaacgaaatctttagggctttaggcacggaggcaattttgcctgaacttttgcggggcattttcccataccattaggcacagacggcagatatgcccatagtggcgccggaggaaacatgttacactttcagtatggagaaaaagggcgcattgggcgctttgagggagaagaggtgcaatatgaggcacgttctgacatcggaagctgtgaccagaggtcactcggataagctgtgtgatcaggtggccgatggggtgctggatgccttgctgacggaggacccggaggcaagagctgcctgcgaggcggctgtgtgggaaaaccacctgctcttgttcggagagatcagcgcccggcaggaaccggattacgaggctgtggcccgggaggtgctgcgggacatcggctatgaccgccccggactgggcttgaatgcggatcactgtgacattcaggtccgctttcatccgcagtcgccggatattgctcagggcgtcagccaccgctcggcggaggataccggcgccggggatcaggggatcatgaccggctacgcctgccgggagaccccggaactgatgcccttgccggtcactttggcaggggcgctggtgaagcggctggatcacatgcggcgctccgggggaatgccctggctgctgccggacggcaaagctcaggtcagcgtggcctatgaagatggatggcccgcccagatcaccacagtggtcctttccgcccagcatacgcccaacgttcgcacggatgccttgcgggaggcgctgcggcgggaggtgatcctaccggtgctgcctccggcgctgacggacgaggagcctctgctttatatcaaccccacgggccggttcgtcatcggcggccccgctggggacgccggcctcaccgggcggaaagccgtgtcggacgcttatggcggcgcagcccaccatgggggtggttctctggcaggaaaggaccccacaaaaatggaccgcactggggcttatctggcccggtatctggcgaaaaacgtggtggcggcaggcttggcggatcgctgcgaggtgcagctggcctacgccatcggccttgcggaccccgtcagcgtgtcggtgaacaccttcggcacaggtatgatccgcgatgagacgctggcaatctggctggaggaccatgtggatatgcggcccggcgtggtgatccgccggttcgggctgacccggccgatttaccggggactggccgcttacggtcccttcggcgaaaacggccgggggatgccgtgggagcggacggatctgcgcttcccggcgcagttttgacctgtattctgcaaaatttaaatagaaggaagaaagtaagatgcgaaatccagtgaaaaccgcgaaaagacagcttctgcgtgtgggaagctgcgcactgtccgccctgatggtgctgggctccatcccggcggccgccatcggggacggtgtgaccgccacctatgacgaggcatactacgccatgacggactactacggcaatctcaccgacggcagtgtggtgaagagctaccgcaccaacggcatcgctaccttgacggactacggcgattacgatgagatcatcaacctgaccgacggcacgatgcctgcccggaacggcggcatgaccaccttccggctggacgaaaaggccctgcccgggaccttctactttgagggcaaaaccacaaagcccttccagcagcttccctggacgatctccatgagctataccctcaacggcgtgcccaccaaggcggaggatctggcgggacaggccggtgtggtggagatccggctggacatcgtgcccaatggacgggccagcgagtatgccagaaacaattacaccctggaagccatggcgatcttcaatcaggatgacatcctgtctctggaagcccccggcgcccaggtgcagctgatcggcaacctgcgggcggtgctgttcctcggtttgcccggtgaggaatgccactatacgatccgggtaggcagcgaggacttcgcctttggcggcatgaccttcctgatggtgccggctactctgagccagctggaggagatcgccaagctgtctgaacggaaggacgatctggaggacaattataacaagctctccggcagcattgattccctgctggacgccatgacggccatgaccggcagcctgaacgcctctgccaacggtctggagcagctgaataaggcccgaggtattttctccgacggcaagggcgtgatctattccggaacggacgctctgcgggaggatctctccaatctggcggatgtgctggagccggtggaggggcagatcgaagccctcagcaagacgatttctgattccaagtccaccctgcgcagcatgaccaacacagtctccgacctgaagggtgatctgaaggatgtggagagtgccctgagagatctggaagacggcaccggcgatgcgcgcaaggtattcagtgcgctgggcagtctgcgcgagagtttgaaaaaactgcaaaaggctttgggcggcaccgtaaaggacaccaccgacaaaattggcgagagtattggcaagaatcaaaatatcggctccgtgactgtggcccaggtgaaggaggctcacagcgcctacgttgccgaccggcagacctactatgtgattgccctgaaaaagcagggtaagagtgatgcggaagccacggccacggcttctgcggctgtcacggcactgaatacttacggcggtaccctggagggtgtcaaaaccgcccgggacggccttgtgacgcaaaagaaggaatgtgaggccaaactggcggcgctgaaaactgccggtgtggatgataacgaccccaacgttgtggccttgacccagggcattgcccggctggaaaccggcattaccagcctggaaggcgtaattgctctggaaaccgcctatcaggcaaagtctcagatgaccttccagcagttctgccagcaggttctgggacagagtgccgccacagccaagcagatgaacgatctgtggctggtgtatgccagcggcaaggtggagtatgataaggattctcccaccggtgcggaaactcccgaccagggaggggctctctccggtgagctgctgcacaacgatcccgaggacagttctgggaaggacacctctggcggagacagtgcgtcctccgacaatcattccgacagttcgtccgaaaagacacccggcggcagcggttctgaaagcacggacgccggaagcggaactggtgaccaagtaagcagcggcgcacagaatccgcctgattcctccaacacagatgaaaacggttctgaaaataccggcagcggtgagaacaacggagagaacaacggcggcggatcccaaaaggatcccacaaacgccccaaatccgcctgaccctgaaaacccgggaactgaaacggaaccggatgcgccgctgccccccagtgagagtgtcggcggtgcggtggtggacctgatctccggcggtctggacagcgccatggcggagatcgccaagcttcagaagtcactggcaggtgtgatgaatcgattgaaggatcccaccagtcaggtgatcagcgacctcagcgctctgtgtggccggatcgaaaacctgtcctctttgctcaacagtgccgaggacctgtctgccgccatccgccattcctctgcggacctccgggatatcttggatgatgtggaggatctgcaggacattttggatgattacgagccggttttgcaggatactctgaaaactgtcagcagcctcagcaccagtgccatcaagaccatccgggatacgcagggccttatcagcgacacagaggctctcatgaaatccaccggcgctacgctggatgacggcaccaagcagactctggagggtctggcggccgtcctgcggagcactgccaagaccatgggtaccgccggacagatcaaggatgcgaaaaccagcatctgcgacatcatcgaggacacctgggatgagtataccggcgacgtgaacaacctcctgctgatggatgccaccgccgaggccgtgtctctcaccgacagccgcaacccctctcctgagagcattcagatcttgatccgcactcaggagatcaccatgccggacgaggatgaaagggaggctgaggccgctgcggaggtgcagactaccttctgggggcgtgtcgcgcagatgttcaaggacttctgggcggccattaccggcctgttcggcggaaaggattgatcggccatgctggaaaaaatcgcaaaatggttgacccgcaagccgaagctggtggccatgatggcggtactgatgctgattcccgccgccatcggctatatttccacccgcatcaactacgacattctgtcctacctgccggaggacctggaatcctctcatggcgaaaagctgctggaggagccctttaaaatggcggccaccagcatgctggtggtggagagtatgcccgcaggctataccaacagcctgctcaatgacatcaaggccattgacggtgtttccaatgccatctggatcagcaaccttatgggcatccagatccccacggacatgatccccgccaacttccgggatatgttcttcgccggagacgctaccatgatgatcattcagtacagccaccccggcgcctcggacgagaccatggaggccatcgagcaggtccggcgggcctgtaatgaaaagtgcttcctggcgggcttctccgtggtcatcaaggacacccgggacctgatggacagcgagctgcccatcttcgtgggtctggcggtgctgctggccctggttgccatgatggtgacgctggaatccacggtgctgccctttatcttcctggccagcatcggcctggccgtcatctacaatatgggcaccaacatattcctgggggagatttcctacatcaccaaggctatcgccgcggttttgcagctgggcgttaccatggactactccatcttcctctaccaccggtatgaggaggagcgccccaactacgatgacgagcgggacgccatggcgcaggcggtggttgctgccttccgctctctgtcctcctccagcctcaccacggtagcgggctttctggccctgtgcgtcatgcggctgacgctggggcgggacatcggcatcgtcatggccaagggcgttgtgctgggcgtggccactgttattctggtgttgccctccctggtactgatcttcgacaagcagatcaccaagcacaagcacaaaagcctgatgcccagctttgacaaggtgaacagctttatcctgcggcataacaaggccattatggtgatttttgtgctcctgttcatcccggcctactacgcccagtcccacgccggaatctactacaagctggacgagtccctcccccgggacctgccctccatcgtctccaacgaaaagctgaaaaacgacttcgatatggctacctctcacttcatcgtcctgcgggacgatttgaatccggcggagatgagcgacatcgaaaaccgcatggaggaggtcaagggcgttacctccgtggtgtcctaccataagatgctgggtaccggcattcctgacttcttcattccaaatgaggtaaaggatatgctcaagcaggggggctatcagctgatgatggtgaactccagctattctccggccaccgacgcagtgtcggcccagctggacgagatgaccgccattttgaagcagtatgatgaaaacgccatgatcaccggcgagggcgccatgtaccgggatctgatcgacaccaccgccgtggacttcgtggtggcaaactacctgtccattgcctgtattttcatcatcgtggcgtgggcgttcaagtccatcaccgttccggcggtgctggtggccaccattgagctggcgatcttcctgaatcagggcttctcctacttctccggcgcttccacgcctttcatcgcacctaccatcatcagctgcgtgcaactgggcgctacggtggactacgccattttgatgacctctcggttccaggaagaactgcaaagcggcaagaaccggaaggaggctatccgcatcgcagcggattcggcggacgcttccatcatcaccagcgcgctggtgatgttctgcgccaccctgggtgtgtcttttgtgtcctcgatcgacctcatcggcgccatctgcatcatgctggcccggggtgctctgatctccgcctgcatctgcctgttcgtgatgcctgccgtgctgtatgtctgcgagccgatgttcaataagactaccctccactggcggaccgagcagcctaagaaggagtccaaagccgccaaggctttgaaagcagcttctgaaaagctgcctgcccgcaaagaaaaagcggcgctgccggaaaagggaacggagcagaccgagaccacggagcctgcggaggcagccgattcgacaaagcctgccgcggaatcggaaactgaagcagacgcggcgcgggagactgccaacgtctgagtttacagaacacccgaaagcgtccgccgaacggcggacgcttcatcggggtgaaaagtcttttcaccccgatgagcaagttttcagaactttataaaagttctgaaaactaaggatttcaatggcgcagggaaataggcgaagcgccgccggtggcggatcaagcgagcttgtttcgaggaaggctcccaaacagcggatacgcagtatccgctgtttggtctgagccgacggtgtatcccctcttgggttatctccgcgctaagagccgccttgcggcggttgcgctccgaaacacgcctgcgggcgtagtcccgcgcacactcttcacccgcaaggggtatgcagcatccgtaaagcggcggagccgctaacggctgccctaccttaccgt

SEQ ID NO: 12280 - DNA, 17539 bp, Unknown
  gut microbiota DNA sequence
ttcttgggtttcccgcgcacacccttcacccgcaaggggtatgcagcatccgtaaagcggcacagccgctaacggctgccctaccttaccgtcgcggagaatttaccactttatcgacagtcttaagcgtcctccgttcggaggacgctttcctatacgcggaaagccgcagcgctttaagtgccgaaccaaattgcggcgaaaaacgcaaacacagcttcaaagaatctggaaagacctgcgaattgcggagaataccttagaaaacgcaaaaaagtgcccggaaactatgtttccgggcaccggcttaattaagtttgtgtaattgatcaaggcttcagagcggccacccaccggccgtacttttccagattggcgttggacgcggcagcatcggctccctgagtcaggatgtagaccttgatcttcggctccgtgccggagggacgcaccagaatgacggtgccgtcttccaactcataccgcagcacgttggagccggacagctccatgcggctcttagcgccggtgacgcagtcgatcacgctgccgtcggtataatccttccggacaatgaccttgacgctgctgatctccgccgggggattttcccggaggtccttcatcagctttgccatgtcccggaggccgtccagaccgggcatcaccagattgtgggtcttttccgcgtaccagccgtacttttcatacagggcgttcagcgcgtcaaagagggtcatgccctgggcgtcgtaccatgcggccatctccgtcagcagcatggaggcggtgacagcgtccttatcccggacgtagtcccccagcatgtagccgtaggattcctcataggagaaaatgaccttcccctcaccggattcctccagggcgttctttttttccgccatgaacttgaagccggtgaaggtatcaaagcactttacgccgttgctctccgccaccttccgggccatttctgtggtgacgatggttttgagggccacggggttggcgggcatcttcccggagcgcttcatggcgccgatcagataatccagcagcagcacgccggtctggttgccggtgacaggctggaactcgccctcgtggttccgcaccatgatgcccacccggtcgctgtccgggtcggtgcccagaatgaagtctacgtcattctttttggccagatcgatggccagatagaacccctccgggttttccgggttgggagagaccaccgtggggaaattgccgtcgatgaccatctgctccggcacggggatcaggtgcttgatgcccagtgcggtcagcgcctccggcaccagcttgtagccgcagccgtggaagggggtgtagaccagcttgaaggtgtccgctactttggcaacggtctcacggtcgttgatcatggcggtgacattggccatgaacttccggtccgtttcgtcacccatggtctcaatgagaccgctctttacggcttcctcaaagtccatccgcttcacaccgtcaaaaatgtcgatttcctccaaccgcttggcgatggcgtcggcgtggtgggggggaagctgcgcgccgtcggaccagtagaccttgtagccgttgtactccttggggttgtggctggcggtgacgttgatgcccgcctgacagccgtattcccggacggcgaagctcagttccggggtgggccgcagggagtcgaaaatgcggacgtggatgccattggcggcgcagacctcggcggcggcctgggcgaactccatagagtgattgcggcagtccatacagatggccacgccccggcgcttgccctcctcgccctcggcagcgatgacgtcggcaaagccctgagtggcccagcggatcacatgaatgttcatgttatgtaaaccggtgcacatagtgccccggagaccggcggtgccgaactccagcgggccgaagaatcggctttcgatctccttgggatcgtccttaatagactccagctcggcgtgttcctccggagagagggcggggctgtggagccacttctcgtattcctgcatgaaatccatttgcaagtacctccttatatcgtatcaacagtgttctgtgtgttcgcctgaaaaattacttatggtatctgcttccggcgttgatctggtaggcccggtagatctgttccaaaagcatcacccgcagcaggtggtggggaaaggtcatgggggacatggacagccgcagagcggcttgccgcttcaaggattcgtgcattccgaaggagctgccgatgagaaagacgatgtggctggcgccttgggcggcgctgtccgccagatagcgggccagctcctcgctggagcgctcccgcccctccacacacatggcgatcaccagacagccgttgggcagcttggcccggacagcgtcggcctccttggagagggccgcctcgatctgggcgggggagggatcctccggcagccgttcctccggcagctcgatgatctctaatttacagaaccggctcagccgcttgacgtattccgcaacagcgtccagatagaatttttccttcagcttgccggtgcagagaatggtcaccttttgcataaggccctccttctgacgatgtgacacgggccgacggtgtcccggggcgctacggacagttccggagccagtccggcaccgtccagcgcggcggctacggcgttcagcgccatagtgggggtgttgttatcacggctcaggtgggccaaaacgatatcactggcgccgttttccgccagcgtgacggcgaactgggcggcgtcctcgttgcacaggtgaccctgcaaacctaaaatacgctgcttcaggtaatagggataggggccggagcaaagagactctacatcatggttggactctaaaatgacaaagtccacgccgggcagcagatccagcgcctcgtcggtgacgtagccggtgtcggtgagaaaacccacactgccgctctctgtgtccagccgccagccgcaggagccgggggcgtcatgggaggtggggatgggctgcatatcgatctctcccaaggtgatggggctgtccagtcccatgagccgggggtcgatcccctctacccggcagctgagctcccggcaggtccggggggtggcaagaagcgggcaggctgtctttttcagaagggtgttcagcccggagatatggtcggaatgggtgtgggtgatcagaatagccgtcaggtctgccggggtcagtcccagttctttcagagctgcggtgatccggcggcaggagatcccggcgtcgatcagcagatgggtgtctccgcaggagagcacagcggcgtttccggaggagccgctggcaagcgtatgtacggtggtcaagaaaatacctctcttttgaaaaacgtccgccggggaacgggccggtcaaggccgacacactccctgacggacgtgaagttcagctgatttgcgcagtggaaaggacatcctcgtccggctcctccacggcgcggatgtccgcgcccagagcccggagcttgccgatgatgtcctcatagccccgctcgatatactgcacgttggagatctcgctctcgccctctgccgccaaagcggcgatgaccagagccgcgccggcccgcaggtcataagcctggatcggtgcaccggtgagcttttccacgccctctaccacggcggtcttgtcatccacctgaatacgggcacccatgcgtttgagttcatccacatagcggtagcggctgctccagacaccctcggtcaccagactggtcccttgagcaagggtgaggacggtggtcatctggggctgcatatccgtaggaaagccgggatagggcagggttttgacgttggcctttttcaggcgggcggtacggcgtaccagcagggtatcatcctgctcctccacctctacgccgcactcctggagcttggcggtgatgcagtccatgtgcttgggaatgatgtttttcaccaggatctgaccgccggtggcggccacggcagccatataggtaccggcttcgatctgatcgggaatgatggcataagagccgccggacagccgctccacgccccggatcttgatggtatccgtaccggcgccccggatgtcggcgcccatggagttcaggaagttggccagatccacgatgtgaggttccttggcgcaattttcgatcaccgtgtccccctgagccagcgcggcggccatcatgatgttcatggtagcgcctacggacaccacatccagatagatgttggctccggtgagacggccggactccacgatggcgttgatatagccgccctccgtggtgacaccggcacccagagcggaaaagccctttacatgctggtcgatggggcggacgccgccgaaattgcagccgccgggcatggcaacctctgcccggccgaaacggcccagcagagcgccgatgagatagtaggaagcccggagcttccgggaaagttcataagaggttctggtggtgtggatgtgacggctgtcgatctccaccgtgtggcggttgatggagcggatggacgcgccaagctgctccaaaatcttcaaaatcgcggtaacgtcggagatctgggggatgttttcaatgcggcagacgccgtccaccagaatggcggcgggaataatggcaacggcggcgttcttcgcaccgctgatctccacctcgccgaacagaggcttgcctccgtgtacgatgtattttgtcaacgttctgacctcgtttcaggtattcttttgcggggagaaagccttgcgccgggattagtttgtccgtcgggccggcacttcatgcaccctgagaaaaaagtggacagtaccactcattatgatcggcgtcagtatagcatactttgcctgaaaaagcaaacgattcctgacaaaatatgaaattcaaacaattttatgcccggcggacggtaccggaaatgcagtttacataaaaagttgccgtatccgtgacgatccgccaggagggaaccagcgccatgggggcggcggtggtgctttgcagttcgtagcagaggctgacctccgtgatggaggacaccacggagctggaggcgtggcgcatctgctgaaaggcagtcagggcggcgaaggcggagaggggcttctgcccggaggaggtctccgcgccggtctccggcagcagagcgccgctggcggacaggacgcggccctgatcgatggtaaaggtgacggcggcgttgaacaccggcgtaccgttccacaggcggacggccgttgcagtgccgctgcccgtttcatccagtgtaaatatcggcgtatcgtaggaaaacgccttgcagaaatcccgacaaaatgcttccgcgttctcctgtgacagagaaccggcggcgtcaaagctgccggtatcccggaaggcagcggcgccctgctggctggtgtaggtgtaaatgccgccgccctgagtggtgcgctccagattatctcccagaagaaaggcggcggcctttcgctccgctgtctcatcccggatcaacgcataggtggaaacggcggtgtccgtggggatcagagcggggtccagcgtcatgccgtccgccgcgaacagagagaccagttcctgctgctgggtgcggcgggccacccgctcctcattgccccgaatggccagagacgtcagtaaaaaggcgttgagcagcgccagaatcagaatgataatgtttttcaggcgatagcgttccgtagccgctcaactcctttcagaaagtgtgatgtcaatccgtcagccagacggcagagagcggatagacgccggtatcggcatagccgatggaaagctcggccccctctgtcctcccggcgatggccatagcctgccgcagcggcagcagaggcgaggcggagctggcagcgctgtattgccggggacgcagggacagagcggagatcgtattgccggaaagcgtcacctcagcggcagcggagccgtccgcgaagcggatgggaacgccgccggactggtagccgaaggtcaagaaagtctcggtttctgactgctgccacttctgcagatacagccgggcatcgccctccgggatcaactgatccaacagctccagaacaccggagacggcttcccgaggcgtgggaaggcccccggcactttctacggagaggaccgtttcgccgccgctggtgtaggaaaaggtgccgctgccactgatgcggatgacccggtctccctccaccactacctccgcaccgccggcgtcggtatagcgggaattggtgtgggggttgaagcccagaacggagagcagcgtctctgtggaaacggtgctttccgtcaccgtcagttggggcagctcagggagagggtccggaaacagggagagaggggccagatgctggccgtatccgctgagatcctcaaaagcaaaggcggtaacgcccagctcaaagtgatccagtacctccgtcagggtagagggctgcacggcagtgacgcactggtaatagcgggatccgccgtcccacagcagcaggaccacctgaccgttctgctccgctgcggccagagcgcggacggaaagctcactttctgcggtgatacccatgaggtccgccagataggacaccggcaggggctctaaaaagtcacagtagactgacggctttcccaaagccgaccggaaggcggcagcactggaatccatccggctgcgggcagacccaagaacctcccgcagcagtgttttgatgggggtgaagctctcgctgtccgtggtgagggagatgctgccataccggccgtattctccggtgacggccgcccgcaccggggcggacagggtatcggaggagggggcatcggagatctggtcgctgacaggagcggtgagccgctgccaggtgccgctgccggcggcagcgcccaactggaaaaactgcgttctggaaaagaggaacagggacagcagcgccagaaacgtgatggtgatattttggataaaatcccggtagcgcatggccgatccctcctttctgataaaagctgaaattactgctgagccgacgtgttttctgccgtatcctccggtgcgccgggggcgggctgggtgatgggcagctccagacggaccgtggtgcccggtccctcatgggggaccagggaaatggtgccgtggtgccgctggacgatctctctggcgatggatagtccaaggcctgtgccgccggattcccgggaacgggccttatccacccggtagaagcggtcgaaaatacgctccctgtccttttccgggatgccgatgccgtcatcccggacctccatccaggcggtgtcggggctggctcctgcggtgacgcgaatgtgtccgccgtccggagtgtacttgatggcgttgccgagaatgttcatcatcacctgttccagacggctccggtcaccggtgatgaggggcagctctccctccggcacataggtcagctcatggccccgctgcttggcgttgaggctgttggagcggaccacgctttcaatggcgtcgtggaaggggaaccgggtgaacaccatttcggtgctgccggcgtccagtcggctgagggtcagcagatcctgaacgatgtgggtcatgcggtccgtttccgtaatgatgatgtccaggaaattgttctccatatcccggggaatgtcatctccggcatcccggatggtttcggcgtagctgcggacgttggtcaggggggtccgcagctcgtgagacacgttggccacgaattctttgcgccgttcctcattccggtgctgttccgtcacgtcatggagcaggatcagaacgccgccctgggccttgtcggagaagggcgtgaggtagagggccagggtccggtctcccaccaccaactcatcttcaatgtagttgggtttctggagggccagcacgttctggaagggatgcaggtcgcccagcaattcctcgtaggtgcagctgggatcgatggatcgccgcaaaagctccgtggcggcggggttgcagtggatgaggtgcccctcccggtcaaaggccaccacgccgtcggtcatgtggaggaacagggtatccagcttgttgcgctcgttttccacggcagccagtgtggactgcaggacctcggccatctcattgaaggttccggtgagaataccgatctcgtcggtggattccaccggcagctcgctgtcaaaatcaccggcggccacccgctctgcgccgatggtcagcttttcaatggggcccaccatggtcttggagagcaggaagctcagcagcacggagatcagcaagccgatgatgagggcctgcatgatgatctggaaaagctggttattcagatcggataccgtgtccttgttatccagaatgtagatgatgaaggcgttgtcaccgccgaagatggggatggccacatccatgtagtcggcggagatatcgctttcgtcgcctacggtggaggcgtccttccgtgcaaccgcgttccgggcggtcagaaggttggcggactgctcccggggcaggtcggaggactcggcgctgccggccagaaagctgcctgcggtgccgtccagcacatagtagttccgagtgcggtagtcgatgcccagcataccggcattgacctccatgatctcctgaatacgctcagcgccgtccggctgagcggcggcgctgcggaggtctgccacaaactcccggcggtccgcgccgaaggcactgctcatctgctgataaaagctgtcgatatagaaactggtgacgctggtggtcaggaacgcgcctaccaccgccatcagggatgtgatcagcagcaggaggatcagcgtcagcttcatatgtaagctgcggaacaaaaaatcaccgcctttatggtgttcaaaggatctgaaaactgtacggcccgccgtgtgcgggggcgggcgcgtcccggagaagatccctgtgtcctcttcaaaacatgagaagaacgcgaggaacgtcaccggagccggtggggattacaccgcgaaatagtaccccacgcctcggcgggtgaggatgtatttggggctggcggggttttcctcgatcttttcccgcagacgccggacggtcacgtccaccgtccgctgatcgtcgcccacgtagccgtagttccagacctgctccatcaggtcgatgcgggagtagaccttattgggatgactggccaggaaggtcagcagctcatattcccgcgtggtcagttccagaggcttgccgtcccggaagacctgatggctgtccgtgtcgatggagaggtcccctgccaccggcatggctgtggccgcagcggtggctgcggcggcggtgttcatagccgtgcggcggatgttggctcccacccgggcgatcagctcccgcatggagaagggcttggtgatgtaatcatcggcgccgatctcaagaccggacaccttgtcggcctcctcctcacgggcggtgaggatgataacgggcacgttgttgccctcctcccggagggtgcggcacacgtcaaaaccgatcatcttcggcagcatcacgtccagcaggatcaggtcggggttttccttccgggccttttccaggccgtcggctccgtcataggcctccacggtgcggtagccctcccgctgaaggttgaagcgcagaatgtctacgatatttttttcgtcctccacaataaggatggttttctgggcgtccgttttctgttccaaggaaacgtacctcctattatttttctattacaggtttagcaggaccttggcccgcaggactgcggccacggtcttggcgtcatcgatctcaccgttgacgcagcggtgcaccatttcatcaaagggtacccgctccacattgagaaattcatcggggtccagctgctgctggctgaatttcagccccttggccaaaaacaggtgcagtgtttccccgtagcagccgggggcgggcaggagcttgccgaggggcaggaaggtctccggctccgcgccggtctcctccttcaattcccgcagagcgcccgtcaccgggtcctcgccggggtccagcttgcctgcgggcagctcatccagcaccttgccaaatacataccggtactggcggaccaccagcacccggttggcttcatccagggccaggaccgccgcgccgtccacatgatccaccacttcccgagtggcttcctcgccgttgggcaggcgcacatcatccacgtgcaccgtcatgattttaccctcaaatacgtccttgcggcggagcttgacctccgtcagatccatgggcattttcattctatccacctcgtttaaagggcagagaccctgcctatactgtattcagtttattatagcataggcgtgttgaattgcaaagggcttgtttttcttgaagtcatgggaaaactatggtatactgactcactggaaacgaggtggtccccacggagaaaaagggaatcaaaatcgcggcccagaaccgcaaagcctaccacgattacttcgtggaggataagtacgaggcaggcatcgagctgtgcggcacggaggtcaaatccatccgtgcgggcacgatgaacctgaaggactcctactgtactgtgaaggacggtgagctgttcgttcacagtatgcatatctcgccttatgaacacggcaacatcttcaaccgggacccggatcgggaccggcggctgttgatgcacaagcgggagatccgcaagctccacgctctcgtcaagcaggacggctacacgttggtgcccctgagcgtctatttcaagaacgccaaggtgaaggtggaagtcggcctgtgcaagggcaagaagaattacgacaagcgggacgccaccgccaagcgggacgccgcccgtgaaatggaccgggccatgaaggcccgcagataacagatcagaaaggaacgaatgaatatgagcaatcccatcgtaaccatcactatggaggacggccgcattatgcgcggcgagctgtatcccgagaaggctcccaacaccgtcaacaacttcatctctctggctaacaagggcttctatgacggcctgaccttccaccgggtcatccccggcttcatgatccagggcggctgccccaacggaaacggcatgggcggccccggctatgagatcaacggcgagttcgccggcaacggcttccgccagaacgatctgatccacgagaccggcgtgctgtccatggcccgcaccatggcacccaactccgccggcagccagttctttgtgatggtggctcccgctcctcatctggacggccagtacgccgccttcggcaagatcaccgagggtcaggatgtggccattgacatttcccgtgtccagcggaacatgatgaacgatatgcccaagaagcccgtggtcatggcaaccgtccgggtggatacccagggcgtcgagtatcccgctcccgagacccactaaaatactccgaaaggagatctgaccatgaaaacagcagttattaccggtgcgtcctccggccttggccgggaatttgtccggcagttctattccgtattcccggaaattgaacgggtgtggctcattgcccgccggacggaccgccttcaggaactggcagagcagctggaggaaaaggggatcagcaccctgacgctgccgctggacctgtgcgacaccatgagctttaccgcctatcaggagcatctggtggaggaacagccggagatcgccctgctggtgaacaacgccggatgcggatatctggggaacattggcgagatcgacaccgtttcccagacccggatgatcgatctgaacctccgggcgctgactgccatcaccaatttgtcggtgccctatatggacaaggggagccggatcttgaacgtcagctccatcgcctccttctgccccaccccccggatgacggtgtattccgccacgaaagcctatgtttccgcctacaccatcggcgcggcggaggaactgaagacgaaaggcatcaccgttaccgccgtctgccccggccccatggccacagagtttctggcagtgggtcatgtggtggattcccggccctttgagctgttgccctactgcgatcaggtacaggtggccggcggtgcactgcgggcggccagagcgggacagaccatctacacccccagactgttctataagttctaccgtctgctggcaaaactcaccccggccaaattgatggtcaagctgaccaaaacctgaaactgtcacggaattgtaacacattccgatatgggaatgtgttacaattccaaatagcaaattctgctttcctattttacaaaccagcagagcgtttgtggaacgaaagaggaggagcaatggaacggatgaagttttcgccggaaggcggaaacggaatgagtgacatttgctcaaaagcgcaactcacgtccaactcgtttcacaaaccagcggagcgtttgtggaacgaaagaggaggagcaatggaacggatgaagttttcgccggaaggcggaaacggaatgagtgacatttgctccgacgacggggccgtaaaggtttcgacggggatggggaagcgggacaagcgggcggcggcgccggaccgccataaaacgggcaattttataaattaaataacaacaatactgttgctattgctgcttaattaaagcagccgtctgaaccggagaggccacaggccggggaaggcgtcgttgatgtggcgtccgtgaggcgggaaagagttgacctgcccacgcatcatgactctaccaaaccgcaaagtctgtcaggtgtctttgcggggcgggaattctgaaacctgactgcgcccggagaaagtcccgtgaaactgttttcggacaggggttcaattcccctcggctccaccaaattagacaaaagctgtgtataacttatgttatacacagcttttgctcttttaacagggcaaacacacaaatttggcctgcaaactgtgcaaaataacggcacgggagaaaatgaaataatctatattcctatgttttatctcttgaatggggtaacacatgggaatttttgcttttaggaggaataaagcatgagaataccatatggttttgagttgatcagcggcgggacacttgaagtcaacaaggatgaagcaaatatcgtatcaatgatttttgatttctatatggcaggagcaagcttgggaaaagtggtggatatgcttcattcaaaacagatatcttctccaaccggaaagttgaaatggacccgcgctacggtagatcaccttctttctaatggcaaatatgtggctgttgtcgggttggagaaattcttggatgtgcaatttgagaaggctgctcgctgtaatattgactacgacaaggatggggcaccgaggaaagatacgcgttatgtgtctcctgctgtggttcagatttaatttgtcttttacaactctgaaagttatgctacaatgaccttgcgaggtgattgtgtggcaaagaaactgaatctggtagatatgtacggaattggagttatgctggaataccttgtagctgaagacaaccttacctgcgaggaacgagatcgagtcatattgcgaattgcgcgggaaaacgatattgccgaatatatgctttcgaatcttgccggttatggaagaagtaagcaagaggtgttgaaacgggcagagcggaggaaaaactcggaattacagggcaaaaagcaagatgagagctatatctctctgaccgagattgcccgagctcacagcgaggatgctccaggatatgtgatacagagttggctgagaaatggaaatactttagcattcttaaacctctgggaacaggagaacaatccgaattatagtgaggtcggttatgcagaactttcgaagagaaagaagaatgcctcatttacgttgacaccaaagttatggattgaccaaacaaaggcaatcggcatcgtttccaagcagggaaaaaacggaggaacgtttgcccatccgatgatcgcctgcgagtttgcctcgtggattgccccggaattcaagatgcaattactaaggttgtcgctggataaaacaaaattgcgatgagcaaatatcgggctgggttgcagtttcatatcgaatttgcaggagaatgttgaaagaatttattgcaaaatggatggaaaaataaactggttgttcatagaacagaaatcaaggtttagcggagtctcgaacgagataaattcatcagcctgactgattcgctaaagccaaggataacgataaaacttgatacattatggttgatttaggcggcacacttataaaataagtggtctatatatgattggtggcagatagatgggaggactatattatgccaacaacaattgatagcatgacaggagtagaaatatgtattgtgttaatccagcccatgtgttggctcaccttcccaatgcacggaaagaattagataattggatggcaagtataggatgagcaaataacaaaaaggttcaattagatgtcaaaaatcgttgaattcagcggattggcagcttcttattacattatgtcgaggataaaccccacgagaacacagaagaaggtgaagttgaggtgaaaacaaatggcccagagtgataaaatccaactgttcgaggacaaacgcatccgcaccgcatgggacgcggaaaaggaagaatggtatttttccgttgtcgacgttgtcgcggttttgacggatcagccagatgcccgtcatgccagcacatattgggcggttttaaagaagcggctgaataacgagggcgcaggccaactgcttacaaattgtaagcagttgaaaatgaccgcttcggatggcaaaaagcgattgaccgatgtggccgataccgagcaacttctccgcatcatccagtccatcccgtcacccaaagcggagccgttcaaactctggctggcgcaagtagggcgggatcgcattgaggaaaccatcgatccggagctgaccatcgagcgggcactggaaacctatctcaagaagggctatacccgcgagtggatcaaccaacggttgcaggccattcaagtccgcaaggaactgacggatgagtgggatgcccgcggtgttcagaaaggcgtggagtatgctatcctcacggacgagatttcccgcgcatggtcggggatgtctacccgccagtacaaaaacctgaaaggcttgaaaaaggaaaaccttcgggacaacatgacaacgctggagttggtgttgaatatgctggcggaagcaacaaccacacagttctcaaaagatcgcaagccgacaactttccaagaaaatctggcagttgccaaagctggcggtcaggtcgccggacggacaagaaaagacattgagtcacagtcaaatatgccggttatctccccaaagaatgcagtacaactcaatcaagtaataactgatttgctggagaaaacgacttcggatatacctaaaaaaatggacgataagtaaacttggccgttctttgcagcacatagatattttcaaatggcaaaagaaaaatatccgaattgaagccgcctgacaaaagaaatggacatgacttttcgtcatgtccatttcttttggcggtagagctttttcacacatcccccatcctcgcgaaagagcggtcccgggtgtcatatccgggaccgctgttgtttaaagctgattttacacgttgaagcggaagtagatcatgtcgccgtcctgcaccacatactccttgccttcgctgcggagctggcccttctccttggcggcgttgacaccgccgtacttgatcatatcatcataggcaatgacctccgcccggatgaagccccgctcgatgtcagtgtggattttaccggcggcctgaggggccttggtgccctttttgatggtccaggcgcggcactcatccttgccgtaggtcaggaaagagataaggcccagcagggagtagctgcacttgatgagccgatccagaccggattccgcaatgcccagctcgtccaggaacatctggcggtcctcaccctccagctcagcgatgtcctgctccagcttggcacagatgggcagcacctcgctgccctcggcttctgccagcgcacggaccttcttcagatactcgttgccctcctgattggcgaagccgtcctcgtccatgttggcggcgtagatgatgggcttcagggtcagcaggtcggaggtggcgatcagggccttatcatcatcggagcagtcaaaggtccgggcagacttgccgccgtccagatgctccgccagcgccttgaacatctccacctcatggaggaacttcttgtcgcccttggcggccttctgggctttgtcaacacggcgctggaccatgtccagatccgccatgatcagctccatatcgatggcctcaatatcccccacgggatctacgggcacgttggtgccggcgtctgccaccacgtgcatgatgttttcgtcatcaaagcagcggaccacatggacgatggcatcggtctcgcgaatattggccaggaacttgttgccaaggcccgcaccctgactggcgcccttcaccagaccggcgatgtccacgaactcaatgaccgccggggtctttttgtccggctcatagatctctgccagcttgtccagccgtgcatccggcactgctaccatgcccacgttggggtcaatggtgcagaaggggtaattggcgctctcggcaccggcgttggtgatggcgttgaacagggtggacttgccaacattcggcagtcccacgatacctaatttcataaagcaaattctccttttgctgttgtttggcgttttctaatagcacattttatcatcctattgggaaaagcgcaagtagggcggggggaaaagactgctgctgatgacgttgaaacgacagctatatcatcggggacagccaaccggtaaggcttcgtagcgccgcctacggctgccggtcttatggaacatgaccggcgaaacagtctggttggcgtaaagctcaataaaggtgcaaagggcatgacaaaaccctgtaaccgttcgggtaatgttcataaggacacaagttgacaccatatcttgcaaggaggcggacagcggttgctgtccgctttcttgcgttttttctctgttttttattatgcgggaagctcgaatacctcgcttaggggcggcgcaatgtgcggctgcgcctcgccctgctccatcgcactgtccactgtgccgatgtcgcggtacacgatgcggatgctctggtgggaactgcgggagtatttttccgtccgctcgcctacctcgatccgctggatgaacagccgcagcagctccggcgtcagctcgtcgatggcggtatactgcttcgccttctcaacgaatgtgttcacgttggcggaggcggctttcagcttttccagccgggc

SEQ ID NO: 12281 - DNA, 36761 bp, Unknown
  gut microbiota DNA sequence
gggacgccatctttgcagatggtgtcccctttcatattcacttttgcgtttcgcctgtcacagtccttattttgcgctttccaccatggcggtgatctccgccttgggccggtagcccacggatttggcaacggccttgccgtccttaaagaccaccagcatggggatgctggagacctgaaagcgcatggccagctccatctgctcgtccacattgatcttgcccaccttgatggttccggcgttttcctcagcgatctcgtggaccacgggagcgatcatcttgcagggaccgcaccagtcggcgtagaagtccagcaggacgggcttatcggaattcagtacctcgttttcaaaattcgcagcagtaattttcagttcagccataagaagggttcctttcgtttgtatattgtcagtctttgtttttcagcttgcaaatactctggggtatagtctctgcgggatagaaggcgcactgcgtccgtggcttgtcaagtaccatggtgatgagcagcgaagtcagcatgaggctgtaaggccgagggcgaagcagaggatgggtcccctctcagtccttcaaagatttgtaatagagcatacagtggcagtagccctcgaaatcagggtcggcgatctggtccttaaactcctgacacatgcacctggtagcctccgtgcgctccaggcggcaggggcagtatccgccggtacgtttcaggccctcgcggatggtgttgacgacctcctgatcggaattgagcttgattttcatgtcagttccctctttcctcattttttgttatggccttatcatagcaggtttcgtcctgcctttctgtaacaaagtcacattcatgaaaaaatccgacgcttttttcagcgtcggatttttcaggtcagctgcttcaggctgtcaaagtcccgcaaggtgatggcgccgcgcttgagctccacaaggccctcctccgagaactgcttgagcatccgcgccacggcctcccgtgcggagctgatatgctgggcgatctgttcatgggtcatgcgaatcgtatcagagccggtgcgctccgcttcggacagaagaaagcccgccagccgccggtcaagacccttgaacaaaagctgctgcatggcccacatgacgtcggaaaaccgtgccgtggccagctcatagaggcagcagcgcacagccaaattctgctccttgagcatggcaacgatatttgcggggataatgaggacctcggtatcccgctgggcagtcatctgggtgtcaaaggtgatctgactgatgacgcaggaggccgacagcacacacaggtcgcctgcatacagccggaacagcgtcacctcccgcccctcgtcggagaggagataggtgcggagctctccggagagtaccagcaccagaccgagacattcgctgccgccgtcatggatgagcgcccccttttcatagcggcgcgtcaccgcactgcgctgcaccgtttcccgctcccgctcggtcagatccttccaaaacggaagctgcaccagccgatcctccatatcagtggcagccgtgatggccgcagccatgctcgccgcaggtatggccgccctcgccgtgggcgtggtcgtgatgatcacagcggacgttgggatcgtatgcaagcgcgcttgccagcagggcgttcaccgctgcgtccgcttcgccgctgacgccgccgtagagcttgataccggcctccgccagtgccatctgcgcaccgccgccgataccgccgcaaatcagggtatccacgccccgctgcatcaggaagccagccagcgcgccgtggccgctgccgttggtgtccaccacttcctcccggacgatcttgccgtccgccacttcatagagcttgaactgctccgtgtggccgaagtgctggaaaatttgaccgttttcataggtaactgcgattttcatatcaggttctcctttttgtttgtgatcggattcgttgaatgtccgcaaccggcagctgcggccgcagtgtggatgctcctcaccgccgcagatacggtaattcccgccggtgatgcgcagcggctttccgtggacaagacacgctgcgatcttctgccgcgcgctttcgtagatttcctgtacggtggaacgggaaatgtccatctgggcggcacactgctcatgggtgcgctgttccagatccaccagccggatgacctcgtattcgtccagcgtcagcaggatcggcgttccgctcccgcccccgttcgggcagaaggtatcgatctgcggtttgccgcagatccttcggcaccgcggtggtctcggcattcatacgcccccttcgttttcggtatatgccgattataaatcggttttttggaaaagtcaattgctttctgccgctgcgcggtcttgatgccgcagaacagctgcgagggcctctccccatagaaaaataccgctgtacagcttacgtacagcggtatccgatcccaaaagtttcgattacagtttatttttgcggctgcgacaattttttcagcacccagatctgaatgggaacggagcagagaaaggtcagcaggtccgccaccatctgagccatctggataccgggcaggcccagcgtcagggccaggatccacacggtagggataaagaacagcccctgccgggccaccgccataaaggtggccggcaccgtcaggcccatggtctgctgacacatattgcccatgaccacccagctttgcaggcagaaggtcacgcactggaaccgcagagccgccgtaccgatggcgatgacctccggatcgtcccggaagatggatacaagctgcggtgcccaggcaaagcccgccgcgctgacagccagcagcagcacaaacgtcaccttgacgctgaaccagaagccctccttcacccgatggtacaggccggcgccgtagttgaagccgcacaccggctgaaagccctggccgaagccgatcatggcagagccgccgaacatcatgatccgctgcaccacgcccatagcggcgatggccgcgtctccataggtccgggccgcctgattgaggcagatggtagctacgctggcaagaccctgccgggccagagacggcagaccgcccttgaagatccacagataataatagggcttcagtttcacatgggaaagatggatctgaaggttaccgcccttggtgcagccgatcagcagcaggcaaaagctgacaaactggctgatgatggtagcccaagcagcgccggcgatccccagatccagcacaaagatcagcagagggtccagaccgatgttcagtaccgcgccgctggtgatgcccaccatggcgtaagcggcgctgccctgaaaacgaagctggttattcagcaccagcgatgaggtcatccacggcgcgcccagcaggatcacgctgaggtacgctttggtatagggcagaatggtgtccgtggagccaagcagataggccagaggttccagaaacagcagtcccagcacgcagatcaatatgccggtagccaacgcgctgaaaaagccggtggaggccatttccgatgcctcctgatagtttttgtggccaatctcccgggagataaaattaccgctgccctgaccgaagaaaaagccgatggcctgaataatggccatcagggaaaataccacgcccaccgcgccggtggcggcattgctcttcagcatccctacaaaaaacgtgtccgccatgttgtaaaaggcagtcaccagcatactgaccacgcagggcagcgccatgcgtgggatcagccggctcaccggtgtttccgtcatcagttgatacttcttttgctgttgatcttccaaaaaggtcccccctgtgcagatatggctgtcatttttgtggattgtaacatatttttcgaaaaaagaaaagaaaaacgtaaaatttttccgcgttttccgggtgtttttatgattcttgacagaaaaagtccttgaatctcggccaaaaggtgagtataatataaaagattattgaccggggcttttgccccgcacaaaacttcagggactacccggagaggatgagacagatgactgcatacaaagacatgacactggaccaacggagggcggaatacgcagcactgcagaccgcttttgcagatctgaaggcacaggggctgaagctggacatgacccgcggcaagccctgcaaggatcagctggacatggtatctgacatcttcgatatgctcaaggagccggaggactatattgtcgacggcattgatatccgcaactacggcgcgctgtccggtctgccagaggccaagcgcctgttcgcaaaccttttggactgcaagcccaagcaggtattcgtgggcggcaacgccagtctgcagctcatgtacggcgtgatcgactgcgcctttatccacggccgcctcaacagcccccgcccctggtgcaaggagcctgttgtcaagtggctgtgccccgcccccggctatgaccgccacttcaagctgacggaatccttcggctttgagctcatcaccattcccatgacctccaccggtccggacatggacgccgtggaggaagccatcaaggacccggctgtgaagggcatctggtgcgtgcccaagtattccaaccccgagggcatcatctactccaaggataccatcgtccgcatggcctccatgaagcccgccgcgccggacttcacgatcatgtgggataacgcctactgcatccacgagtttgacggcgactatgtggagttcccggacatcttgcaccagtgcaagaagtatggcaactatgatatggtctacgagttcgcctccacctccaagatcaccttccccggcgacggtgtggcctgcatggctacctccgaagccaatctggaggattttgagaagtggatcggtattcagaccatttcctatgataaggtgaaccagcagcgccatgtgctctatctccagaaccgggctcacaccctgaagctgatgaaaaagcacgcggcattcatgaagccgaagttcgaggccgttctgagcactctggatcgtgagatcgccccgctggagatcgccagctggagccatcccaagggcggctacttcgtctcctttgacgccatgcccggtaccgccaagcggacgctggccctgtgcaaggaggccggcgtggccatgaccgccgccggcgccaccttcccctacggcatcgaccccaatgacagcaacatccgtattgccccctccttcccgcctgtggaggatgtggagaaggccattgccgttttctgcacctgcgtaaagatgtctgcattggagaagctgggcgtatgagataccaaggcatggtctaccgtccgccctccgaggcgtacagcctcatcgtgcaggtgacctacgggtgcagccacaatacctgtgccttttgcagcatgtacaaggaaaagcgctttgccctgcggcctctgcatgaggttctggaggatttccagatggcccggcagcgctaccgcagcgtccgccgcatctttctggcggacggcgacgcactgatccgaaaggccagtgaactgtacacaattctggataccatccgggagctgtttccggagtgcgagcgggtcaccagctacgcctctcccagcagcatccgcctgcggacggacgaggagctgcaaaccctccgggccaaaggcctgaccatggtctacatggggttggaatccggcagtgacaaggtcctcaccctcatgcggaagggccatcccgccgctgagatcatcgagatgggacagaaggtccgcagaaacggcatggcactatccgtcactgccatcaccggtctgggcggcccggagctgctggaggaacatgccgtcaagaccgccgaggccttcaacgccatgaacccggaatacatcggaatgctgacgctgatggtggagccgggaacacctctgtatgactgggtccatgacggcagcttccgtctgctggaccagcatcaggtgctgaaggaaacagagctgctggtctctcacttcgacagccccggcagtgtgttccgcatgaatcacgccagcaactatctggatctccggggcacactcaatcaggaccgggatgctctgctggccaagatccatcaggctgaacaggatctcagctgtctgcggcccgaaagctggcgtggactgtgattcgcagcggagccattcccattctttcgtcagataagaacaggcgtgtagggttctgctaacagcgcacgatacgttcccatgaatgacagcaagctcgttcatgtgcataatcaaaaagagcggagggatcgtttgatccctccgctcttttgcggttttgcggtcaggcagcggcaagatccgctgtggcctgccggtagatacgaatgaaatagatgatctccgccgctgccgtaatggtccaggaaaacacatacagcagatacagggatgtgatggtgccgaaccacgcaaacacggtgtagacccagataatgcggaacacgcaggagcccaggatcacgatgaccatggggacagcgctcttgccaaggccacgggaggcggcgatggagccgtccataaacgcggagacgcagtaggaaacgctcatgaccgtcaaacggtacatacccgcgtccatcacctgcgggtctgtggtaaagaggctcaggaacggccgtccaaacagcagcagtcccagacccagaagcaatcccgcaccgaaggcgtaagccgtgctgatcaggaaggtccggcggatacggtccttcttgcctgcgccgtagttctgaccgatgaaactgccgcaggcggtgtagaaggcctgcatcacatcatacaccagcgcgtcggcgttggtagcggcggagttacccgccaccatggtggcactgaaggtgttgacgccacgctggatgaacagattggccaacgcgaaaatggcgttttgcagtccggacgggataccgatggatagaatggcttttgtgcgggtcttatggaaccgcagctgggaaagccgcaggcaatagctctcacgactccgcagcagcgccgccgttaccagaatggcggagaaatactgcgagatgatgctggccaccgccacgcctgccacgtccatattgcagacgatgacgaagaacaggttcagcaccacgttgatgacgccggcgatggagaggtagtacagaggtcggcgggtatcacccaccgcggagaacacggcgttgccaaagttgtagaccgccagtgcgggcatacccagacagtagatgcgcaggtacagcacagcgccgtccatcagctccggtttggtgttcagcgctctgaggataccgcctgcaaagccgcagccgatccccaacaacaccagtcccgccgccgcgcaggtcagcgccgccgagtggacggtatccgagaggttcttttgatcgtcagctccgaagtggtgcgccaccagtacgttgacgccgccggccaatccgatgaggaagccggtaaacagggacacgaggatggtggtagagcccaccgctcccaacgctgtagaacccgcgaaccggccgaccaccgccacgtccgccatattgaataacacctgcagcaggttggaaaagatcagaggaatgctgaatcggaagatcttcttccccagcgggcccgttgtgaggtccgcctgtgccgttttcatgtctcccgccccccttttatcgtcatgcccgccaagtgtaacacagtcggcagggcatttcaaccgtgaaagcgaaataatcagcgtcgaccttttgcaaaatcattcgttgactttctacaacataatccggtataagggtggcgcactttagcaaaatcgattacgtatcaggaggaaccgttttatgaaaacatccggcgccgcatctaagtttgcagtccccatctgatgccggtgagattccagttcaacatcggtgacatcgcacctatgctcattgctcatagagcgtcatcctttttggctgccagacgaaacaggtacatgaccagaagccacacccacgagaccatttccgcataggcgatggtcatgtttccaaagtgcggggccattgcgtaggaggcaatgatgcggacggccagagagaccagtcccgcaacgctggagtacatcaggtctcccctgccctccagatagccgcggaacgccgtggtcaggccgaagatcggatagaagaatgcaatgcggtggaaaaaggcgcttccgatggccaccgcagcggtcccggcgccgaaaagcgcaatgatctttccgcctgtcgggatcacgaggcccgtcaggaacgcagacaccaccaaggtcagaattgtaccggcagagagggtttttcgggtgcgtatcgtatctcccgcgccgtgactatgagccgtgaccgtggaaataccggagccgaggttcacaatgggcagcaggatcagcgtgtcgatgcggtaggccgttgtgatggcggtgacagtatccgttccgaagcggttcatgaagtcctgcaataccagactgcccaaggcgctgatgctggactgtaccatgggcggcaggccgtagcgcaagccgtcccgcaccacggcgccgcagaagctctctttccggcagttgcttttcagccaggggtatttccatgtgccgtacagaacgatgaacaccgtcatgatcgcttgggacagcacagtcgccgcagccgcgcccagtacgccccagcgcagctccgcaacaaaaaggatatccagcagcacattgatgagagaggagaccagaatggagaggaacggaatgcggctgtcccccagcccgcgcagggtggcggtatagacattatagactgccagaaatggcaggccccagaaaataatgcggatataaccgctggcgaggtcgatggtatccgccggcgtgtgcagcagctccataaacggataggacagggcggagccgactgccgcagccagcagaaatatgccgccgaggatcacggcaaacactgccagcacaggcgggatgctgtcctgtttctttgcaccgaagttcttggcgatcaggacggacaggcccagtgtgaagccggtgatggtggtgatgaagaagctgatgggaatggacgtcacgccgatggcggaaagggacagctctccgtccacattgccgacgatgaaggcgtctgcccagttatagagctgctgcagcacaccgctgaggatcagcggcaggctgaaccggatcagctctttcatgatggttcctaatttttgattctcgttcatgtgtcctcctgaaaatcgcagaacaaaaccacgcaattgttctgcacaattgcgtggtcaaaagcagcatatcaaacgccttgaaaaccccacgtcacaaattttgtaggagtattatagcatggcgtggctgacaatgcaagagagacggtcgatcctgtccggtcccggtcagatcaccgacgcgccgaagggcatcagcgacagctttgccattttgaagcactgctttccgatggggatgccaaggagtgttatgcaccagaggcagccaagaatgacatagccgatcgccagttcaaagccgaagaatacgatccaaatcaggttcaccagaaaggaaaatccgccgcccccatatatgacctcttttccgaaagggaaaaaggcgagacttgcaaacttgaagcattgcagtccgacgggaataccgatgatggtcacacaccacaggcatccggccagcacccacgcaagtccgccgatcagtccaccaaacagaaaccatagaatattgccgatcactgtcatattcctttcccctttcgttttttcttttcgtattgtgttcaatccgccttgtgaaaacaggctgccgcttgtttgagtgccttggcagcgacagcgtccggtaagcaaacgattgtaattccatcacttgttctttctaatttcgatcagtccacatataccggcagcaacacacaaaagcgccggaacactcgttcctaaattattcagttccgttgcgccggctccaatcagtacaatggctgctataaaattcattgcgacgcagaacataaaccatttcattttcgttacctcctattttcactgttcaacataattccgccattttggacagttcacgctcaatttggagttccgcaaaacgaacatttccccactgtaaatagtcagggcctataaccgtacttcggccccaaaaagttttctcgcttcaccgatgctgccggtaaatgttccccgtaaaccataaacacaggccgcataacggataaccgcaaaaataaccgattctctgtctctgaacgctgaacacacgcagagatcgtgattggatcaaaaatggtcggacattcgtgtgaagcgacggaaagcggtcattcttcaagctcaaaggtttcccgctgattcaccgcgtccagcgcaagctgggcacgggacagttcatcggcagctttctcatagtcggcctccaccgccgcgatgtcatagttggcgtaggtgtagtcgatgatgctggactggcggccgtactgctcctccacacgctccttgggcagtcggcttttcatttccagcagcttgcttttccgcttggtaagttgaggaatgtagaccagcagctcgtcgatggtcatgtcaaagctgtccacggtctgcgtggcgttaaaaatgttgatggcgtgcttgagcttgcggattttcgcttccaactctgcgagacggatctgcgtttcagcgtaatcgtagacaggccgaacggactcgacatcctcccccatggcagcccggaagtcccggctgcgggtctccttgtccagcaacgcggtatactcgtcattcagttttttcagcagcttgttggcctgtgcggaggtgtagttcatttccatctgcctctctttcctctatctgcatgtattgaattttttaatagtataacacggtcgggtgcgcttgtatagtcggtacagtaaggggcgctaccgttggatcgtctatccattgacagaagctcacatttcattctacaatgaacgtaaagacattgcgcgatacaaggcagaacgccatctgaatatgaagcaatccagttgcaggttcacacctgctgatccgggcgcagaaaggtggaacctatatggccagatcctctttccagaaattgaaattacttcatgtcatgaattatctgcttcagaactccgacgaggagcacccgattacagtcaatcagatgattcaatacttagagtccaacggcatcgccgcagagcgcaaaagcatttacgatgacatcgaggcgctgcgcaccttcggcatggatattgaggaatgcaagcggggccgcgtgttcggctattatgtggcaagccgcacctttgagctgccggagctgaagctgctggtggacagtgtgcagtcctccaaattcatcacccacaaaaagaccgcgtccctcatcaagaagattgagacgttagccagcgtacacagcgcccagcttcttcaccggcaggtctttgtgaaaaaccgcatcaagaccatgaacgagtccatctactacaatgtggatgagattcacaacggcatctccaataaccggaagatccggtttctgtactttgagtacaatgtggccaaggagcggcagtaccgccacggcggcgcatactatgtagtcagtcccttcgccatgacctgggacgatgaaaactactatctggtggcctatgactctgaggctggaatcatcaagcactaccgcgtggacaagatggagaagatctccacgctggatgaggagcgggacggtcaggaggtctatcaggcgctggacatggcggtctacacccgcaaaacatttggtatgttcaccggcgaagagatcaaggtacagatgcggtttgaaaatcatctggtgggtgccgttctggaccggttgggcagcgaggtgttcatcgtccccgacggcccggcccatttcaccgtccggacggacgtggtggtcagtcctcagttctttgcgtgggtgctgggctttggctctcaggcacagatcgtaggacccgctcatgttgtggacggcatgaaggcgcatatcggctccgtcgcggcgctttacggcccgcaggcataaaaactgaatcaaattcagatcaagcggctctgaccattacggtcagagccgttttttcgtcgcagtccggttattgggacaggtaagattgtaaaatgatgacactggaaggacacccgatcattttgaaggaggggttttatgaagttcaagatcgttttttccgccgctgaaaaggaaagcaggcacgaggctgccgcgcggtttgttatttccagaaagccgaagcctaccaaatccctggtgctgatccacttccctgctcgcaacatgacgctctcctactacaacgatcaatttgatctccactgcggcgatctggtcttcgtggatggaaagctggaaggtttccgcggtcatgtggtggatgtctgctataccttcaagatcaatctgtccgactacaagcgggtcatcagcgtcgccgatacgaaggtccacggtgaattccattttgccggatcgcacttcgtcacctttgaccgcagcgcactcccttatgaacaggtcatcacctggttcaaggcacctgagaaggaggatacggagattgtttccgaacaggacggcagcggctttcagttgaatgatctgcaaaccatgaagatcagcgacgccattgcggagcggggacatgactattacagagaaaaccgggtgcggtacatctctctggataagactcgggtgcgggccattgtggaagggacacagccctacgagctggaatgtgactacatcgatggcgagatcagaaatctggtttgcgactgtttctgcacttatgcctgcaagcatatgttcgccgccatgttgcagctaaaagaaactctgacattcattgagaagcactacccgggcagatttgaagaaagtcggtatttcgccgccgtctgcaaggaaatgttgctgaataccgcgatggccggcagagaaaccggcagtattgtactctgatacgcggatcgatctgaggaaaatacgccgtacagagatcgcagctggtgacagtgtccgttttataggacagtatgtattgtatactgagcatgtaatcagaaaacaacacaccacggaaggggttataaagatggagcgatttgaactgcggtatgtgatgggacacattgaggtatatgatgaaaacggccggttctgcttttctgcggatcatgtgtccgaggccatggaggaattgcgggaggagttcagcgcagcctgacccttaccggctgataggcgaaaaaagtctgccttccaaatggaaggcagacttttgcagagcattttcttatctgtcgctatttcaatcagcatttatgaatacgcactctgcaagactctatttgccatttattctgcccggctccggtgctcagctcagaaccagccattcaagaggtccagtacgccggagaagtccccggtcatcgtatagccgcccttctgcgtatagagcgttccgcggtcatccattgagatctcctgctgattttcaaagctgaagcggtacacatactgatcgtaggggccgaccttgctgtcagaggttcccctccgtactacttgaatggtttccagttcattcaacagggctcccttctggtcatttgtaagatcaatcttttccgcgccgtctatggattcccgcgccacggtgcaggggagctccaacagcttttccgggaataccgccgatgctttttggggaaagggttttgcaatgacgatcaccgcaagcagggccaaaaccacaatcgcagccgctaaaaatgggaccgaaattctctttttcatatcacgttctccttttcatgtttgttcataggtattccgtcaaaaaccgcgttaccactttttcagcacacccagcaggccccgcttgagcacctggccgcctgccgagatcagttgagactcgatcttggccgcccggcgctccgccttgcggcgagcctcgtcctccagcttctgtttgcgctttcgttcggtttcttcctctttcagacgcagcttttccgcctgagcctcctccttttcacgggccttgcggtcggcctcctcctgtttggcggcctccacttcctcccgttccgctgtcagcacctcgtaggccgacacgttatccacaaactcgtcatacttctccatgccgtcgtgcatcatcaccttggcccggaccatgggctccggcaccgacatgaggctctgggggcagataatcttcgtgcgctccaccatagcgggtacgcccgcttcgtccaagaacgaggtcagcgcctcgcccacgcccagctccatgatggcatcctccgcctgaaacgcgggattgggccggaaggcccgcgccgccgcgcggacagccttcagctccgtgggggtataggcccggagggcgtgctgcacccgattggaaagctgtgccagcacggtatcgggaatatcgctgggactttgcgtcacaaagtacacgcccacgccccgggagcggatcagcttcaccgtctgctccaccttttgcagcagcacggcgggggcatcgcggaacagcatgtgggcctcgtcaaagaagaataccatccggggcttgtccagatcgccagcctccggcaggatctcaaacagctccgacagcatccacagcaggaaactggcgtacagcgtgggattctgcaccagcttgacgcagtccagcacattgatcatgccccggccgtcagcagccgtgcgcatccagtcgcggatgtccagcgccggttccccgaaaaacagctcgccgccctgctgctccagcggcagcagcgcccgcaggatcgccgccaccgactgagatgtgatattgccataggtcatcatgtactcggcgcggtgctcgttgacataggtcagcatggcccgcagatccttcaggtcgatcagcagcagccccttgtcatccgcaatttgaaacacgatgtgcagaattccctcctgcaccgccgtcaagcccaaaatccggctgagaagctccggtcccatgtcgctgacggtggcccggacggcgtggccgccctcctgataaacatcccagaaggtggtgggatagccctggtagacaaagcggtcccgcaggccgaatttgtcgatgcgcttttccatgccctcgctgctctggcccggcgcgcagatgcccgccacgtcgcccttcacatcacacagaaacaccggcacaccggcgtcggaaaaggactccgccatcaccttcatggtgacggtcttgccggtgccgctggccccagcgatcagtccgtggcggttgcacatattcagcgccagttccacccgcttgtcacctgccagacccatatagatcttcccgttttcgtacatgaagccacctccgtcatttgttaatgctctttttcatcattatacctgcgcgcccgccccggtgcaagagcaaagaggtgcgtttcccctgttcataagggtttttcagcggtcagacaggcagacgccgccttatagctgtgaaaggcataaggccccccagaagaagcataggtaatacctccaattagcataacttatttcgttaaaaatagatacttttttaacatattgtgcaaaaatcgcaacaatcttttcaaaattttgtggcgaggtcccacggaaaaagccgtaacaggaattgacatttcctgtcgtgtctgagataatgattacattgaagcacaggcaactgacggaacgtggagcaccacatggaagcctgctgtcatacgtactgtcgaccgtctgggcaaacctgttctccatggagatccatggggaccggtttaccctttttttatttgcatttttatctttttaaggaggatcgcatgaaaaaagtagcagtcattatgggaagcgactctgactggcccgttgtaaagggtgcctgccagcagctcgagaccttcggcattccctatgaggcccacattctcagcgcccaccgcacccccgccgccgccgcggacttcgccagaagcgcccgggccaacggcttcggcgtgctgatctgcgccgccggtatggcggcccatctggcgggcgccttcgccggaaactccaccctgccggttatcggcatccccatgaagggcggtgcggcggatgggctggacgctctgctggctaccgtccagatgcccagcggcatccccgtggctaccgtggccatcaatggcgcgaagaatgccgctgtgctggccgctcagatcctggccgtcagcgatgacgcactggccgccaagctggacgctcagcgctccgagatggcagagcagatcgccgccaaggaggccaagcttcaggcggagctggcccactaagctgttcacacaagcattgatcttttcctgataaaaccgatattcaaaacattttggaggtacaatactatggaactcgtttatactggcaagaccaagaacgtttacgctctggaaaacggcaactatctgctgaagttcaaggatgactgcaccggcaaggacggcgtattcgatcccggtgagaactccgtgggcctgaccatcgacggcgtgggcgatgtgaacctgcgcatgagcatctatttctttgagaagatcaacgccgccggcatcaagacccattttgtcagcgccgacctgaataataccaccatggaagtcctccctgccaaggtctttggccatggcctggaggtcatttgccgtcacaaggccgtcggctccttcatccgccgctacggcgagtatatcgctgagggcgccgacctgcccgcctatgtggagaccaccttcaagaatgacgagaagggcgatcctctggtgaccaaggacgcgctggttgctctgggcgtgatgaccgccgagcagtatgatgccatcaaggaggagacccagaagatcactcagatcgtggccgatgatctgaaggaaaagggcatggtcctctatgacatcaagtttgagttcggctatgcacccgacggcagcgttatgctcatcgacgaggtggccagcggcaacatgcgggtctataaggacggccagtacatcgatcccatgaccctctcccagctgttcttcgcgtaatgggcggttattttggagcgatctcccaccgggatgtgggactggacgtatttttcggcacggactaccactcccatctgggtacccgccggggcggcatggtggtttacgggccggagaccgggttcgtccgggagatccacgatattgaaaacacccccttccgcacaaaatttgaaagcgcgctgcatgagttcaagggccacatcggcatgggctgcatcagcgacaccgacccccagccgctgctggtgcgctcccatctgggcctgtacgccatctgcacggtgggtatcatcaacaacatcgacgagctgatcgatacctatttctccgaccacgggcatcagttcatggcccagagcagcggaaaggtcaatgtctccgagctggtggccgccctcatcaatatgaaggaaaatctggtggagggcattttgtacgcgcaggagatgatcaaaggctctatcacgatcctgctgatgacgccggacggtattctggctgcccgcgaccggctgggccgcctgcctgtgctggtaggcaagcacccggacggcagcctgtgcgtatcctttgaatccttcgcctatcataagctgggctatgaggatgcttacgagttaggtccccgtgagatcgtggccctgacccggaacggctatgagaccgtctctcctccgggtaaggaaatgaagatctgcggctttctctggacctattacggctaccccaactccaattacgagggcgtcaacgtggaggtcatgcgctatcgcaacggcgagatcatggctcgcgacgaggtggcccagggccggctccccaaggtggactatgtggcgggcgtgccggattccggcgtcccccacgccatcggcttcgccaaccgcagcggcaagcccttcgcccgcccctttgtaaagtacacccccacctggccccggtccttcacccctgccaatcaagaggtccgcaatcaggtggccaaaatgaagcagatccccgtttccgagctgattcaggggaaaaagctgctgtttgtggacgattccatcgtccggggcacccagctccgggaaacggtggacttcctctatgagtccggtgcggaagaggtccacatgcgctctgcctgcccgcccattatgtatagctgcaagtacctgaacttctcccggggcaactctgatatggagctgctggcccggcgggtgattcaggagctggagggtgatgaaggacacaagcatctggacgagtactccgattcctccacggagcggggtcagtgcctgctcaagtccatctgtgaaaaattcggttttgattctctcggttatcagtctttggacggcgtgctggaagccatcggcattgaccgggataaggtctgtacctactgctggaacggaaaggaatgatcgacatggaaacatctcactccgccgcctatgcggcagccggtgtggacatcactgccggttacaagggcgtcaagctgatgagcgcggacgtcaagcgcacccacattcccggcgtagtttctgacatcggcggcttcggcggcctgtttgcccccgatctgaccggtatgacggagccggtgctggtctccggcaccgacggcgtgggcaccaaactgcgtctggctgagctgctgaacaagcatgacaccatcggcatcgactgcgtggccatgtgcgtgaacgacgtgatctgctgcggcgcgaagcccctgtttttcctggattacattgccatcggcaagaacgtgccggaaaaggtggcagccattgtctccggcgtggcagagggctgtgtccaggccggctgcgctctcatcggcggtgagaccgccgagcaccccggcatgatggccgccgatgactacgatctggcaggcttcaccgtgggcgtggtggacaagcccaaggtcatcgactccagccgcatggcggagggcgatgtggtgctggctctgccctcctccggcttccactccaacggctactctctggtccgcaaggtgttcgacgtggagaacgccgatctgggccggtatgatgacgagctgggtgaaactctgggcgaggccctgctccgtcccaccgtcatctatgtcaagcccgtcctccgctgcatcgaggccgcagacgtgaagggcgtcagccacatcaccggcggcggcttctatgagaatgtcccccgctgcatccccgacggcctgtgcgccaggatcgacaaggccgctgtcaaaacaccctccattttccgtctgctccagaaaaagggcggcatcgacgagcacgatatgttcaacaccttcaatatgggcgtgggcatggctgtgatcgtcagccccgagaccgccgacgcggccctctccgctctgaaggcagaggggatcgacgcctatgtctgcggcgagatcgttgccggcgaagaaaaagttgttttgtgctgagtgaaaccgctcccggtacgcactgtcccgcttttccgcggtatcctgacgtatactgctccggtgcgctgaaaggaatcggtgcatcggcgtcaaaggagaaatcatgactatgaaaaaagcgaagatcgccgtgctggtctccggcggcggcacaaatttacaggcactgctggacgcgcaggcggcgggactgctgccccacggagagattgcgctggtggtctcctccaatgaaggagcctacgccctgacccgggcggccaacgccggcgttcccgccgagacggtctcccccaagcgctgcggcggtcaggcggcctttgagtccgccctgtccgacctgctggcggcgcatgagatcgacctcatcgttctggcaggcttcctcaccatcctcagtgcggactttaccgcccgctggccctcccgcatcctgaatgtgcatccctctctgatccccgccttctgcggcaaggggatgtacggtctgaaggtccacgaggccgctctggccaagggcgtgaaggtcacgggagccacggtgcattttgtcaatgagatcccggacggtggagagatcctgctgcaaaaagcggtggagattctgccggacgacacccccgaaacccttcagcgccgggtcatggagcaggccgaatggcagcttctgcctcgggcagcggagctggtctcggaacaaatcgtaaaggagaagagcaatgcttgattttctgacccttctgcgggagaatccctaccccggccggggtatccttgtgagccggaacctcgtttactatttcatcatgggccgcagcgccaacagccgcaaccggatcttcgtgaaaacggaggacggcatccgcaccgaggcgcatgatcccgccaagctggaggatcccagcctcatcatctatcatcccgtccggaccatgggcgacgcgctggtggtcaccaacggcgaccagacagacaccatctgccagcacggcgatttccgcaagggtctgatgacccgggaatacgagccggacgagcccaactggaccccccgcatctccgccattctgaatgccgacggctcttttgagatgtccattctgaagcacaagaacggccgctgcctgcgggaattcttctgttatgagggctgcgacgagaatcagggctatttcatcagcacctatcagggcgacggaaatcctctgcccacctttgccggtgagcctctggaggtcaccgttcccaagccggaggaagtctgggccgctctgaacggagacaacaaggtgtccctctataccaacgtgaacggcgaggtgcgcctgttcaacaaaaatctgggagattaaggagaaggtgccgaaatgaacgagttggaactgaaatatggctgcaaccccaaccagaagccgtccaaggtctttatgcaggacggctctgacctgccctttaccgttttgaacggaaagcccggctatatcaacctgctggatgcgctgaactcctggcagctggtgaaggaattgaaggccgccaccggcctgcccgccgccgccagcttcaaacacgtctcccccgccggtgccgccgtgggacggcccctgagcgaggtggaccggaagatctacttcgtggatgacgccgccgagctctcccccatcgcctgcgcttatatccgcgcccggggcgctgaccgcctgtgctcctacggtgactgggccgctctctccgacgtctgcgacgccgccaccgcccagtacctcaagggcgaggtgtccgacggcatcatcgcccccggctataccgacgaggcgctggaaattctgaaaaccaagaagaagggcggctacaacgtggtccagatcaacgcggactacgtccccgccgccgtggagcacaaggatgtgttcggcgtcaccttcgagcagggccgcaataaccttgtgatcgacagggagatgctgaccaacatcgtctctgaaaacaaggagcttccggaggctgccaagatcgacatgatcgtggccctcatcactctgaaatacacccagtccaactctgtctgctatgtgaaggacggccaggccatcggcgtgggcgcaggccagcagagccgcatccactgcacccgtctggctggtcaaaaggcggacaactggtatctgcgccagcatcccaaggtgctgggtctgcaattcgtggacaacatccgccgccctgaccgggacaacgccatcgacatctacacctccgacgagtatgaggacgtgctggccgacggtgtgtggcagaacaccttcaaggtccgccccgaggtcctgaccccggaggaaaagaaggcgtggatcgccacgcaggccggcgtcactgttggcagcgatgccttcttccccttcggcgacaacgtggagcgggccagaaagtccggcgtgacctacattgccgagcccggcggctccatccgggatgaccatgtcatcgccaccgccgacaaatacggcatggtgctggccttcaccggcgcacggctgttccatcactaacccgctgcacaagtcaaagcttccgcgtccacacagacgcaaacgcagatccgttccgctgccccgcatgttcctccgtaaacgcttttccgatttacgggagacgtctgcggggcagcagctaaaaatcattcagggagggaaccatgaaccttctggttatcggcggcggcggccgtgagcacgccatcgtcaaaaaattgaaagagaatcccgctgtggagacgatctactgcgctcccggcaacggcggcatcgctgctgacgctgtgtgcgtcccggagatcggcgcgaaggatatttccgcgcaggtggactttgccaagacccacagcattgacttcgccgtggtggcgccggacgatccgctggtgctgggtgcggtggacgcgctggaggccgctgggatcccctgcttcggcccggaggcgaaggccgccatcattgagggcagcaaggtcttttccaaggacctgatgaaaaaatacgggatccccacggcggagtatcaggtgttcaccgatgctgccgccgcgatggactatgtgaagtcctgcgccctgcccgtggtggtcaaggccgacggtctggctctgggcaagggtgtgctcatcgctgagacccgggaggacgccgtggccgccgtggaatccatcatgctggaccgcgccttcggcgacagcggaaatcaggtggtcattgaggaattcctcaccggcccggaggtctccgtgctggcctttaccgacggcaagaccgtggtccccatggtatcctccatggaccacaagcgggcccatgaccatgacgagggtctgaataccggcggcatgggcaccgtggcccccaacccctactacaccgaagacatggcccgcgtgtgcatggagaccatttttctgcccaccatggaggccatgaacgcggaaaaccgcaccttccggggctgcctctattttggtctgatgctgacgcccaacggccccaaggtcattgagtacaactgccgcttcggtgacccggagacgcaggtggtcctgccccttctggaaagcgacctgctgacggtcatgcaggcctgccggaacggaacgctggcggaaactgaggtgaagttctccgacggtgccgcctgctgtgtcatcatggcgtccagcggctacccggagcattacgaaaagggcttcgccatcaccatgcccgccgagaccgccgcccatacctatgtggctggcgcaaagcgggaggaggaccgtctgctgaccagcggcggccgggtgctgggcgtcaccgccacggcggcggatttgaaaagcgccattgaaaaagcctacgagcgggtggagagcgttcatttcgacaatgccttctaccgtcatgacatcggccagcgcgccctgaaagcgctggaacactgaagggagcaagggcaggcatggtttacagagtatatgtagaaaagaaagaagcgctggccaacgaagcccgcgctctgttggaggacctgcgggcatttctgggtattcagtccctgacaggtctgcggctgttcaaccgctatgatttggagggcatcagccgggagctgttcgactacgccgttcaaacggtgctgtccgagccccagttggacacggtgacgagtgaagtgcctcagggagacacggtgttcgccgtagagtatctgcccggccagtatgaccagcgggcggactccgccgcccagtgcatccagatcttatcccaaggcgagcggcccacggtccgcaccgcccgggtatacgtcctggagggcgagctgacggcggagcaggtcgaggccgtcaagaagtatgtcatcaacccggtggagagccgggaggcgtctctggagctgccggagaccctgcggatggaatacgatattcctaccaccgtccggaccgtggagggcttcacctccatggacgctgccgcgctggacgctctgcgggacgagctgggtcttgccatggatctggacgatctgaaatttttgcagggctatttccgggatgacgaggggcgggaccccaccatcaccgagatccgggtggtagacacctattggtccgaccactgccgccacaccaccttctccacccacatcgaccaggtggagatccacgacgcggccattcaggctgcctacgagcggtacctggccgcacgggtggaggtctacggcgaggaaaaggccgccaagcggcctcagaccctgatggacattgccaccatcggcgcgaaggtcctgaaaaagcggggcctgctgccggagctggacgagagtgaggagatcaatgcctgctccatccacgtcaccgccacggtggacggcgaggcccaggactggctgctgatgttcaaaaatgagacccacaaccaccccacggagatcgagcccttcggcggcgcggccacctgcatcggcggctgcatccgggaccccctgtccggccgtgcctatgtccatcaggccatgcgggtgaccggtgcgggagacccccgcgcctccctggaccagaccctctccggcaagctgccccagcggaagctgtgccagaccgccgcggcgggctattcctcctacggcaaccagatcggtctggccaccggccatgtggcagagctgtaccacgagggctacatcgccaagcgtctggaatgcggcgcggtggttgcggcggctcccgcctataacgtccgtcgtgagtgtcccgcccccggagatgtggtcattctgctgggcggacgcaccggccgggacggcatcggcggcgcaaccggttcttccaagagccacaacctgaaatccctctccaccatggcctccgaggtccagaagggcaacgcccccgaggaacgcaagatccagcgcctgttccgggacagcgccgtgacccatctcatcaagcggtgcaacgactttggcgccggcggcgtcagcgttgccatcggcgagctggcggacggcctgcggatcgatctggacgccgttcgcaagaagtatgacggtctggacggcacggagctggccatctccgaatctcaggagcgcatggccgtggtggtggcccccgaagatgtggacgccttcatcgccgccgccgaatcggaaaatctggaagcctaccgggtggccgtggtcacggaagaagcccggatggtcatggagtggaacggcacggtcatcgccgacctgagccgtgacttcctgaacaccaacggcgctgtgaagcacgccggggtccgcgtggcggagaaggaccgcactgagcttacaacgccccggttccagtccctccgggagatggcctccagcctgaaatgcgcctcccgccgcggccttgtggagcggttcgacagcaccatcggtgccggttccatcctcatgcccttcggcggccggacacagcgcaccccggcacaggctatggccgccgtattccccgtcctgcccggtcaggaaacggatcaggccagcgtcatggcctggggctgcgacccggagcagacctgcaccgacccctacaccggagcctacaacgcggtctacacctctatggccaagctggtggccgccggtgcggactataaaaaagcctatctctcctttcaggagttctttgaaaagctccgcaatgagccggagcgctggggcaagcccttctccgctctgctgggcactgtggacgcgcagctggagctgggcgccgccgccattggcggtaaagactccatgtccggcaccttcctggatctggacgtaccgcccacgctgatctccttcgccattgcgccgctgaaagcgggcgaggtgctctcccccgaattcaaggaagcggggcatcccgtttacctgttctccggtacggacgcggatagcgtcaaggcggcatgggagcggctgcatgatctggcgctggccggcaaggtccgggcggcgtgggccgtggaaaacggtcttgctgagggcgtgatgaagatgtccttcggcaatgagatcggcttcgccgccgaaaacgccgacttggattggaacaccctgtatcccggcgccatcgtagcggaactgaccgaggacacggcgaaggccgtccgtctgggcgtcaccaccgccgagccggtggtgcggatcgccgatgacagcgcccccatttccgagctgctggctttgaacgagggcgttctggaatccgtctatcccagccgcaccgccgccgatccggcggaggtccccgtgctctccgcccccgccgctccccggacggctcccaaggccggtgtggcggtccccaaggtgctgatccccgtattccccggtaccaactgcgaatatgactccgcccgtgccgttcagcgggccggattggagcctgaaattctggtgctgaacaaccagtccgctcagggcgtggccgactccatcagccgcttcgccaaggcagcccggaacagccagatcatcttcgtccccggcggcttctccggcggcgacgagccggacggctccgccaaattcatcaccgctttcttccgcaacccggaggtgcgggacgccaccatggacctgctgaaaaaccgggacggcctgatgctgggcatctgcaacggttttcaggcgctcatcaagctgggtcttgtcccctacggtgagatcatcgacaccgacgagacctgctccaccctgaccttcaacaccatcagccgccaccagtcccgtctggtgcggacccgcatcgcttccaaccgctctccatggctggcagggacgcaggtgggcgatatttacaccgtccccatctcccacggcgagggccggttcctgtgcagtgaggagctggttcggaagctggctgacaacggccagatcgtcactcagtatgtggacgagcacggtgtccccggcatggacgtggacgtaaaccccaacggctccatctgggctgtggagggcatcatgtctcccgacggccgggtactgggcaagatgggccactccgagcgtgtggccgacggtctttacaaaaatgtagacggctgctatgatatgaagctgttccagtctgcaaagaagtattttgacatttgagaacgggaggacacggatcatgttgactgatattgagatcgcccaacagtgccggatgcgccccatcacggagatcgccgccaccgcggggatcgatgaggaatatctggagcagtatggccgctacaaggccaagatcgatcaccgtctgctggaggatcgggccgaccgacctgacggcaagctgatcctggtgaccgccatcaaccccaccccggcaggcgagggcaagaccaccacctccgtgggtctggccgacggtctgcggaagctgggcaaaaacgtcgtggccgctctgcgggagccgtctctcggtcccgtgttcggcgtcaagggcggcgctgccggcggcggctacgctcaggtggtccccatggaggacatcaacctccacttcaccggcgatttccacgccatcggcgcggccaacaacctgctggccgccatgctggataaccacattcagcagggcaacgctctggggatcgacgtaaagcagatcacctggaagcgctgcgtggatatgaatgaccgccagctccgccacatcattgacggcatcggcggcaaaatgcagggcgttccccgggaggacggctttgacatcaccgtggccagcgaggtcatggcggtactgtgtctcgccagcggcatcaccgatctgaaagaacggctgggccgtatgatcgtggcctacacctatgacggcaagcctgtcaccgcccatgacctgaaagccgaaggcgctatgaccgccctgctgaaggacgctctgaagcccaatctggtgcagacactggagggtacgcccacgctgatccacggcggtcccttcgccaacatcgcccacggctgcaactccgtcaccgccacccgcatggccctgaagctgggcgattacgctgtgaccgaggccggcttcggcgcggatctgggcgcggaaaaattcctggacatcaagtgccgtctggcgggtctgcggcccagtgccgtggtggtggtagccaccgtccgggcactgaaaagccacggcggcgtacccaaggccgagctgaaccacgagaatctggacgcgctggaaaagggcctgcccaatctgctccatcatgtagacaccatccgcaacaccttccacctgccctgcgtggtggcggtcaacgccttccccaccgacacggaagccgagctgcggctggtggaggacaagtgccgggagctgagtgtccgcgctgtgctgtccgaggtctgggccaagggcggcgagggcggcaaggccctggctgccgaagtggtacgcctgtgcgaggagccctgcccggagcagcccaccccggaggagttcaccttcgcctatcccgacaacacctctctcatctataagctcaacgccattgtaaaccgggtctacggcggcgcgcaggccgtcctgacccccgccgcccagaagcaggcccagcagctctttgatctgggcttcggcgatctgccggtgtgcatggcaaagacccagtattccctgtccgacgatcccactctgctgggtgcgcccgagggcttcaccgtcaccgtgcggaacctgaaggtcagcgccggcgccgggttcatcgtagccctcacgggtgacatcatgaccatgccgggtcttcccaaggtccccgctgccgaaaagatcgacgtggacaaggacggaaagatcaccggattgttctgaggcatggtcatgccgccgcaaatgcggcgtacaagcgtttcgcaaagtgacaccttgaaattgcccagattcatttcgggcaatttgagtgaaatcgaggggccccgtgggacctgccccatggggaaacatccaaagcaaagcatcacgcaagcgttgcaaagcagcgggccaagcagcaagaataagtgcagaaaaggcgggcgcatctgaaccgatgcgctcgtctttgtccgcttttatatgcaaaaggcgcagcctattcaggctgcgccaagggttcttcgtatgctatatctgctctccgtctgcttttaccggaatcggatatttcattcaaatcaggtaattcgccttccgctgcctgtactccgggaccattccccgattgcgggacatccgtttccagtttgggttcagggggccggaaggtgccgtccagcttctgaaaacagcggcggtaaccgaggagcttctttacgacaatgcctttactctatggaccggattgcaaaaggcctggaagcagacggcatcctcaccggcgctggcaaaacaaaatggtggaccagcaccatcaacaagatcctgcacaatgagaaatatatcggcgatgcgcttctacagaaaacctacaccatagacttcctgaataaaaccagagtgaagaacaatgacattgttccgcaatactatgtggagggcaaccacgaagcaatcattccaaaggacatcttcttgcgggtacaggaagagctggtacgcaggcgagtggtcaaaaccagtgccaatggcaaaaggcgctcctacagctgcaaccactactttgcacagattgtcatttgcggcgaatgcggtgaaatgttccgcagaatccactggaacaatcgcggctgcaaatccatcgtctggcgctgcatcagtagactggagccaaccggacaggaatgccacgccagaaccgtcaatgagccggtattggaaaatgtggtagttcaggcaatcaacacgctccttggcgataagtcaacctaccaggcgcagctccagcagaacatcgcaaaggtgatccgaagcgctcagcaaaataccgctgatggtatcaatgaaagactgcagagactccaaaaagagcttctcaaaaaagccaatagcaaagaagcctacggcgagattgccgacgagatcttcaagctccgggaacagcacgaaaagtgcacggtggctttcgttttgtggacatagtccgcgtaatatttattgaactgggtggatttgtagggcagttcgtcgttctgatggcactgctcacagtattccacccacagcaggctcaaggtgacgccgttcttctgcatctcacggtgcacccactcgtagtccggcatcttgtagacaggatccttttgctcggttggaaataaacgctgggaaactccctgctgcgacatggactgagcttgctgccagtcaagtttctgttcccgagcccgggctaatgtacgtgtgaccgtgttgcgaccgcaaccagcggcatctacgatctctcggtgtgtgagtcccaggctatggagcctgaggatctcgcggtaattggtcatacaggtgacctccttgtagatatttacgccagaaatctgatgcatatctacattttaccgcagtgctcaacgacggcggcaagggtgctcaatcccgccggaatggatgctcaatttgagcggttgaggtgcgcaatctcgcgcggaatactcaaataatcgcccgtaaccaaagagcactatccgggcatagcccagatagtgctcaaatcagtacagttttaaaaattggtcaatcgtgtagggattctcccccctcttccccccttttttctatgcaaatcatgtcagtgccctttttcagccggagcagcttgcgtatctatcgcaaatcctctggatctcaggtagtcacaacccctaagttcaaagcctgaatcgaattgctcaaacggactaacggaaattgccagttccagcgtaaggctgccgttctcgcattataagatgttcacgcaaagcgccttataggacaagctgttgactttctgcggtttttggttataatagtttgtatactttgtcaaaaattcaggctttgatgagggaaattttaataaatacgcctctgttgccagtcagatgatagcgagggaaacgatttatgaaacaatgtaactacagccgcgaagcactatttcagctcaatggtattccgccccttggaatgtcgatctccttggcactgcaacacttagtcgctatgatcgtcggctgtgttaccccggcgatcattattgccaacgcgcttggattaccgcagagtgaacgcgttctgctcattcaggtatccttggtcatgtccgcagtgacgaccctgatcgagttattccccattggcggcaagctgggttccggacttcctgtaatgttcggcatcagctttgcttacttgcccagtatgcaggccatcgttggcggcggcggagacatcgccaccattgcgggtgcaatggtcgttggcggtatcgttgccgctgttgtgggtgtttttgtgaagaagatccgcagatttttcccgcccatcatcaccggcacggtggtgttcacgatcggtctttctctctatcctaccgccatcaattatatggccggcggcaccgggaatacttacgaggtagtcgtgctgcgaaagggcttgacctccgcgctggttcacggctcatggcaaaactgggcggtggcggcgttcactctgatcgttgtgatggtcatgtccaacaagggcaagggcatctgcaagcttgccgccattctgctgggcatgatcgccggatatattgtcgccgctgtgtttggcatggtagatctctctgaggtgagagacgcggcgtggttctcccttccccaattcatgcatttcggcatcaagtttgagttctcggcctgcatcgcgcttgcactgctgttcgccatcaacgcgatccaggcgatcggcgatttgaccgccaccacggtgggaggcttgaaccgggagcccacggaccaagagctgcagggcggcattgttacctatggcctgaccaatgtgctgtcggcatttttcggcagcctgccaacagcgacctattcgcaaaatgtaggtattgttactacaaataaggtcgttaatcgggtggtttttgctttggccggcggatttttgctgcttgcgggtctgattcctaaattttcagctattttaacgacgattccgcaatgcgtgctgggtggagcgaccatcactgtattttccaccatcgctatgaccggcatgaagctgatcgcgtccgaaaccatctccccccgcaatactaccattgtagggctgtcggctgcgttgggcgttggtatctctcaatcctcgtctgcgttgagccagttcccggagagcattacgatcattttcggtaagacgccggtggtcattgccacaattatggcagttctgctgaacctgatcctgcctcaggaaaacaaggatcaataaaccgatcatcctatttttagggattgctttgataagacccgtggacttttgaaatcggcacttttgcaggtgtctgccgtatagcaatagatggcagacacctgcgttattacatttcactctgtgcgtaacggagaacagcatactatagcttgcgttcaaagaagccttgccagaccgtatttctaccataactgagaaagttttatttttcctcatcggcagaagctcctattgaacgactcgcccagcgagtagttttcggtataaagcttcatgcaagagcagcgcaccacgaacatgcacaaatgccagtgcatgaagctttcgtgcatcatttccggttgcctcgcaggggcgaggaaatggcacatttcttattttgctatgcaaaagcggatgcactgagacgtgcatccgcttttttcagtattcaactgtgcttctctccgttggacggctatgatgtgctgatctgctgatagctcttgccgcaacgtcacgctgcgttcattcagaaaaacggaacgaacattccggaggattgctgggcttcgtcgatgtgcatatcggggttgatctgatccagccagggaatcatgtccagaagattctggatcacaaggtcgggcttttccgcgtccgccgccgttgccgcgtccttctgggcagagagtgcggagacgatctgaacggctttgccgaagcccgcctgcttggcgccgatgatgtcgcgggagatcgtatcgcccacatacacgcagttttcggctgtggtctgcatctgccgcagagaaatgcggaagatctccggatggggcttgcggtagccggtcacgctggaaaccgtcacatcctccatgcagccccggatgccgtactcctccagcatgttgaacacgttgtaaagggaggcattgttggaaatgatgccgatatggtagccgcgggccttcagcgcttccagcgtttccagaacgtcgccccgcagctcccggtggtaataggtcacctcccagagattggccagctcctccgtaatggggatcagcttttcccggtcgaagccaaattctttcaagtagtagtcaggccagatctcctccggcttcttctccaattccaggccctcgctccagcgcttgtattctttcaggccagccatgacccggcggtcaaactcctccgggctgcatcccggctccagaccgtgcgcccgcagggttttctgcagcgcatccatggccttcgcctgggtctcctgattgttccagatgtcctctaatgtgccgcccatatcgaataaaacggtattcagcattggtgggtcctccttaccggtcattattatgattcatcgtcatcgtcttcgtaaaacagcatggcctcatcctgggcgttatggaacgcaccgggagccgttccggagctttccgggccaaacagggcctctgtgggggagatatccggctccggcgtctggaccggatcggataccggctttgcagcgggcttctttttctgctcctgttccaccgcctctttcagctcctccgagatggtctttctgacgaaatactcgggatgcgcctttcgcagccttcggtagatgggccagctgacggcgttgccaagcagcaccggcggcaggccgaccgtcagaaacaggcgcagcatagagcctctcgtctcctgcggcagcatccacgccgccgcgcagaacatcagcaggatcacagccagcccagcaaagccgtagggcaccacccgcttgtccttcagcaggaacaacaggcagcagagcagcgtgctgatgaccgtaatgatgatggtgtggagcatggaggtgaccgtttcgccgccgaaaaagacggtccggtacagcggtcccgccagaagcgcggctgtacagaagtaaacggccagatccaacagtgccgcaccgcacgccgccagcgcaatggggctttttctgcggccatgcttgtcgataaagaagctcatagatacctcgcagttttgaaaatgaagcggagagcctgcgctctcttcatcccaaaaagcttttgggatgaagagagcggcggacgatcgtccgccgctcttgcttacatacagtcagcggatggaaggaccgatcagcccaacatctgccagaaatcgcggacggcgttgtagttcacatagatctcgttggcgtcaaagggagcaacgttgatctcggagaagggagtggagccctcggcgggttcgatgtcatcgcggacaggccagccgcccagagtgttgaagggcttgtaaccagaggtgtcaccgtcgatgccgcccatcatgaagcggatcagcagcttggcggcggcaggatgctcgcagccttccacaacgtacagggtgttgacagcggggataccggtgtcgggctccagattcacgggagcaaagacccagccgttatcggcggccttgcggagcttggaggaagcgcagaagccaacggggggatccttctggccgggggtaccgacagcctcggcgatcgcgtcggaggaagcggtgaagatcggttcgttggcgtgcagacgcttcaggaactcataaccggcgttctcgcagccgtcggacagcttcagttcttcgccatacagggccttataagcctcggccagacggttcggctcctcgcctacgcagaagccggtgatccaggagccccaggacaggttgtccagaggattctgcatcacgatcttgcccttccactggggctcggtcagctgccagatgttggtgatgggggaaccatcgggataagcctccgtgttgtagaagagctgagtcagctcaatgtacagaggcgtggcggtcgcggtatactgcgggtcgatgtgggcgaagatgtcagcgggctgataattgtagaacgtcttgttggccacatactggttccacatggagccgtcctggtccttgatgtggacaacgtcggcaacatgcttgccggcctcgtactcacgggtgaccttctccagcagctcgttggtggagatgtcgaagggaacgcagtcaatgccgggatacttttcctcgaaagcggcctccaccttggtgcatctggaggagatggagtacagggtcacggtgccgccctcttcaagggccttctgatacagttcctcgtcggtttcctcggtgttgtagatctgagaagcttcttcccagggggtcagctgggtttccgcagggggagtgttgggatcggtggtgtcgccggacgtgtcggctttctttccgcagctggccaggctcagcatcatcgtgccagccagcagggccgccaggagctttttgcgcttcaacatgttcttttcctccaaatcagatttttattttcgcggactctgccgcagtggtacagatttacacgcagtatttgatcagattctcgctcttggtctcgaaaacgttgaccttcttgggattgaagcccagatacaccggctcatcgctggcgtagtgggtggagccaagctccttgaccgtcagcatggtgtcgcccacccggacgctgaccagcgtttcggaaccggcgggcatgccggagtaaacgtggccttccacccaatgcgcgtcatccgcctgacggctgatggacagctgctcgggccggacgccgatggtcacatcgacgctgccggactggggcgcggcctcggtcatatcgccccgctcgaagcccagctgaccgagaggactatcgacccgcataccgccggcctccacctgagcggtgcccttgacgaagttgatgctggggttgccgatgaagtcggccgtgtagaggttcacagggttgtcatacagctccagaggcggtgcgacctgcaccagctcgcccttgcggtacagggcgatgcgggtggacatggtcagtgcctccacctgatcgtgggtgacgtagatgatggtggtgccggtctcgtgatggagccgcttcagctc

SEQ ID NO: 12282 - DNA, 538 bp, Unknown
  gut microbiota DNA sequence
gtccggtcggtctccaccatgcccggggtgctgacccggcccatattgcggatggcctgctcgggggtagcgccgcagatgccgtccgtggactggaggaccacatcgctcattgccaaataggcgcacatcatggcggcgttggtggcggtagccagcttcagtgcgcagccgatcttgccgccgtcgcagatcatgccggtgaggttgccgctcatattgatgatggccttgccgatctgctcgtccgtgccgcccatgagccacaccatagcggccgcggcagccgtggcggcggaaacgccgcagccgcaggtggcggacagcttgccggtaaaggacttgatatagacgttcagcacatgggagaaggccagcgctttttccagcatctcgttagaggcccccagatgatgggccatctccaccacagggataacggcggtgatgccgtggttgccgctgccggcgctgctcataacggcgtagggacagccgctcatgcggccctcggcactgctggctacccgcatcatgg

SEQ ID NO: 12283 - DNA, 1552 bp, Unknown
  gut microbiota DNA sequence
ttggcccttccgcagcaggcggttgacctgctgattgccgaacacaaaaaacactctcgcaatccgtatctgttcccatcgcccaagaccggaaccatgtatgacccggacgctttccggagaacccatgacaaaattttgaaggccatcggcgtggaacacatccggttccacgacctcagacataccttcgccacgctgtccctgaaaagcggcgtggacgtgaaaacgctgtccggcgcgctgggccactactcggcggggtttaccctgaacacctacacccacgccacggcacagatgaagcaggatgccgccgacaccatcggtggggtcatcagccagcagatgcggtaagtgcggcaaaaaacacagggccagacaggaaaaatcctgtctgcccccgtccggtactttccggccctttccccgtgtgggtcaggttgtgagtcttggaaaaacgccaaaaagtaagcgccttgaaaagttgcgaattacgaaataaaatcaccggaatcaagcgattccggcgatttttggtggagactactggactcgaaccagtggcctcatgcgtgtgaagattcgatagggatgccttctgccgaattttgggagaataaagcgggtttgccgcatgatttcctcacccgcagatacgcttttctccgttgtttccgccccggtttttctgttcgtgggtcaggacgtgggtcaaaacgcaagcctcgttttctgcttgcatcggacaaggcgctttcatatggcaaagctggtttcttgacagaatgtgcagaacttggtaaaatgcaatcaggcgctgcacgaacggcaggcggttggtcacatctccgagaggaggtggttgatatgcctattacgatcacactacatatcttcggatatacggtcacgattcgtattaaaggcgaaaaccgccaccctggggtagctgcccataaaacaggttttgagaaacaaatactatggcagttgctggacaatggttgctgacaaaaggggtatgtgtcattaaggcacatgcccctttgcttttgcagttgcctttgttgatggtagatggataggatggattttgtacgatttaaggtcgataatccggaattagcttccctgtgagcaacgcaaaaattatgggcaatgatgcgtccatgcccttgcacaagtacagctcataggtcagttaaatgccgatttccaacctgtttcataagggcacttctgagatgtcatctttcagaaaagtagtcaaaaatccctcacttagaccaatccttgtgaggataggaaagaagtttgctgaaacgataatcttgtccattattccgcgcttctgcaatccgtgtactgcgctcaccgttccgttcgctattgcatggttacaattagttattcaccatccaatgaacagtgggatccctttccataagcagcacatcgtttacagcgatagaaacctctgaatttgaaaactgtttttgcctgtcctgccgagcaagtagaatagacaagcacaaagaaacatgctata

SEQ ID NO: 12284 - DNA, 689 bp, Unknown
  gut microbiota DNA sequence
ggcgctattttttatatcaggtaagacgacgtttttcccatccgtctgattcaacaggagaagctgcacaaaaaaagacatggtttgcagactccgtcagaataaagttgtgggatatgcccacctgaatgaagagagcaaaccatgtccaaaattatgcaattcagcgcaaaacagccaacaatccaatcaaaaacgccgttctttccgctaatcaacgaaatatataactgtacacggggagcgaccgtaaattatttctcaagccattccagatttttcttggtattccggtcgaaaagatgggccatagcgccgttgaaggtaaaggcgatggggctgccgatggtaaacgcggaggtgctttccagctccgtggtgggaacgatcataatggtatcgctgccgcaggcgctgacgtggagatggacggcgctgcccatcatctcgctgacgtccacagtgccgtggatcatggaactctcatcaccgctgaggatcaggtgctcaggccggacgcccagagtgatggggccggctgccgcgccgttggccttcagcttggcctgcttttcctccggcagggtcaccttggcgccgtccagcaccacggcatactgcccgtcctccagcaccagctcagcatcgtagaagttcatctgaggcatgccgatgaagccggccacaaa

SEQ ID NO: 12285 - DNA, 768 bp, Unknown
  gut microbiota DNA sequence
gagccgttctctgtgtatccagaattaacgtccacctatgtgtttgcccgcagtcctaaaaacgaaaaagaaatggtgtttgtggagcgggtatatttcctgcggctcacagatttttacacctatgacctgatgaacggattgcaccacggccacgcacccagccagtgccaaggctgcgggagatactttctgaccaccaacggtcacatccccaaatactgcgacggcgtcgcaccgtaggacagccgctatacctgccggcagtacggcgcgatgatgcaccagaaggagcagaacaagcagcacccggtctaccgcctgttcaatacccgaaccgacaccatccgcaagcatcactggcggggaaaaatctccgatgacctgcggcgggaggcactgtatctggcggggagctaccgggacaaagcgctgatggacaatgactacgccgctgacgggtatgcgcgggacatggaattggaacacatttacgcggaggcggaaaaacggctgaaatgaggaaggggggcgttcctgtgacgaaaaatatgtacaccgttgtaggagatagcccctgcaacgaagaactggctttgcgaatacaagccggagacaaaaacgccggggagcggcttatctcacagaacgagggttacctcaccggactggcgcgggcgtacacgctgtggtgtgagatggaggatttgaagcagaaggcggcgctggcactgctggacgcggcggggcactttgaccccacccatg

SEQ ID NO: 12286 - DNA, 209 bp, Unknown
  gut microbiota DNA sequence
agatcgtccgccatggtgtcccgtgcgaaaagacggttttgttcctccgcgccgcagagattcagggtatatggggcgtgggcgatgatcggtgcgaagcagtgctccttcatgagcgccaccagcgccaccgcgtccgcagggtccagttccttggccttgctccccctgggattccgggtgaaaaactgaaaggtgtccgcccccag

SEQ ID NO: 12287 - DNA, 2600 bp, Unknown
  gut microbiota DNA sequence
aagaaatcggatatccgaaccacaaaggaaatagctgagtgggcaagaaaattcccggcctcatcatggggccgggaatgggggatcaggtctgctgttctttctgctgctccagccgtttggacatacgccagagggtagtacggctgacgcccagctccttggccagatccttttttcgaatgacctgcggcagcatcaccggaagggactctgacggagacgccggctgtccggcaggctccggcggcagttcccggaaaatgtggaggtccatcaaggtggattgatcaacggtgcgggaagaactcatcactacgatgcgctcgcagatgttccgcagttcccggacattgccgggccagcggtactgcttcaacagttcctgagcttccggggtcagttcaggcggcgtggtgccctgttcggcggcgatgatccgcatctggtgctcgatcagagggaggatatcttcgggccgctcccgcagagggggaatatggatctcaagggtattgaggcggtagagtaggtcgctgcggaatttcccctgctggatctgctgttgaatgttgacattggtagcagaaatgacccgcacatcaatggggatcacattggtgctgccgactcgacgcacttctttttcctggagaacacgcagtagtttcgcctgaagagctactgggatttcaccgatctcatctaagaaaatggtaccgtggtgagcttgctcaaaaaggccggtcttaccttcgcgggacgcgccggaaaaggcgcctgcctcatagccaaaaagctcgctttccagcagattttccggcagagtcgcgcagttcacagcaacaaagggctgctcggctcgggcgctggcagcgtggatactgtgggcgaaaagctccttgccggtgccggtctcaccggtgagcagtacattggaattgacccggctgaactttttggccatgtcaaccttgctgcacatccgctcgctgacggcgatgatgtcccggaaggtgtatttggaggtcagaccacgccgtaccagaccctttcggatatgctgttcctcttgcaggatccgggaggcggaggaggtggtgatcagggtaccaatggcagaggtctcgccgctgatgagccggtattttaccatatagcgctggccgttgatgctgatcacttcctcgtcgccatccttgcagggagaggtccggctgccgatataggagagatccggccggatgtctgtgatgggggtgcctcgccattgcgacaggaaggccagaccgtacaatcgataggcctggtcattggcctccagaagctttccggcttcatccaaagcaagaacggcgtcctcgctgctgttgaggatggtgcggataatatggctctttgtgcgctctaagttcatgctgtgagcaaccttgatggcttccagagtggcctgccggacagtttccatccgcatatggatataggtgcaggggatgttccgctccctgcaaaggttggataccgtgccgccgctgacgatggcgtccgtaccatcccgcaggcaggcattcactgcgtctctggcgctttcctcgtcctgtacatcgtacaacgaaatgcgggcgtcgctgagttcttccaattccggaagcaggtcctgaagccggtcccggcccagacaaaggccaatgtgatgaggatggtaggtgttccggcactgaaacagagcttcaaccagatccatgccgtcaaaccgcagccgggtgatgtgtttttccggatagatattgcagatcttgttataagtaatgcctcgggctacgatcacatcgtagttatccagctgatacaggatctccggcgtaccgaaccggtgcaccacattgatgctgatctcatcattttcccattccgcagcctgctgctggacaggcttcagcatatctggtgatggtacaaacacaatgatgcgaaccacctatgatcctcctttactcagcggacagggcctacctatccgattactctttcaaaagttatattgcattatacataatagtgtatcgttcgctataaatcaagtggatttgagacccatcaaagacacatgacaagaaagccgatgcagccccgaaagggaccgcatcggctttgaggatcgatatgtgcggatcagtttacttgtgcagcaggggagagaggggcttgtagatcaagaagcagaggaccacatccagcattcccttgaagaaggtgaagggcatattgaagatggtcaggcacttgatgaggctgtcggaggaggggagaatagcctgatacataccgatgatggcgtccagaggcagaccgtagcacaccacataggcgggatacatcaggaggtagttgaagggtacagacaggactgccatcagcgcggcgccgacaacagcgccgatcagagcgcccttgcgggacttattccgggaatagatgtaaccggcggagaaggaaaagacactgcccatcacgaagttaaacagctcacccacataggcggaggaggtgccgtggagcacggagaacagcaggttcttcaggaaggtgaccacgatgcc

SEQ ID NO: 12288 - DNA, 453 bp, Unknown
  gut microbiota DNA sequence
gaacacgctgcccatcacgaagttgaacagctcgcctacataggcggaggaggtgccgtggagcacggagaacagcaggttcttcaggaaggtgaccacgatgccgtagacagggccgagagagaaggcggccaacagctccggcagatcggacacgtccagctttacgaaggaggggatcagagccgggatggggaattcaatgaacatcagcaggaaggccacgccggagagcattgcggatagagatagcgcccccatctgaaacgccccgtgtttcgccgtgtgatccgctgtgtgcgatctttctccgagagccgagtgtgttttacccactttcgcctgtgaaagcgaacgtgggccatttgtgcgagaagttaaaaaatgcgatgaggaacggtttggaacaacgttgtggcggcaactttttggagatatttgcgtgaacagttt

SEQ ID NO: 12289 - DNA, 9961 bp, Unknown
  gut microbiota DNA sequence
aatagtcagcttgtgggtgcggctccgattggccgcacgggtggaggggatcgcgttggcattgggttcagacataaaaaatacactccttttttcatttgaaaacaccctggatgctttgacttctccaaggtgaacaaacgaaaaaggagcgcgcacaaaacgcacggctttcccgtactcatcttcttccatccagactgtaactgttggtcccggagtttcaccgagtcagcggataccgaagtatccggtcgcggactttaccgccagtggggaatcacaccccgccctgaagacaaagattcagttgttttcttcgggtgatagtatacgacagaagaaacaaaaatgcaacccctaatttttgactttacaaaaaagaacagatgttctataatggaagcgatacacttgaggaggtgaggagatgcctgccagacaggaatcctgctgctttaccgggcacagacccgcaaagctgccgtggggctacaatgagagagacccccgctgtgttaggttgaaagagcggatcgccgatgcggtgctgctggcctatcaggaggggtaccggcattttctctgcggcatggcccagggctgcgacctttatttctgtgaggcggtgctggccctgcgggagcgttatccggaggtcactgtggaggccgccattccctgtcccacgcaggcggacgcctggccggaggcggagcgggatcgctaccgggaattggttgcccggtgcgatatggagaccatggtctccgacacctattcttccacctgtatgcagcggcgggaccgctacatggtggatcacgccatgctgctcatcgccgcctttgacggcaccgccggcgggacccgctacacggtggaatacgccttgcggcgagggattgagatctttgatgtgtcgattcccacggaatagctgtaaaatgaaattgctttactgcatagatgccagaagggggagcagctccgaaagagcgtagatggtatagctcggccggatatccgcccggggttccttcccgagggggttgaaccagacagtgcgcagcccggcgttcgatccgccccggatgtcggaggtcagactgtcgcccaccatgacggtttcctctaaccggaagccgggaatggcggcgaagcaggcatcgaagaacgccttagagggcttgtcggcgcccatttcctccgaaatgaaaatgcctttgaaataggggcgcagtccggcgtcatccaaccggggattctggacggcggcagccccgttggaggcgaggtacaggtcataccgggaggtgagatccttcaaaagctgctccgcaccgggcatgaagtcatgctggcaggagagcagtacctcataccgctcgctgatggccttgccgctgtggtcaacccccagttcccggaataactgctcaaagcgctgcaccagaacctcgtcccgggtgagccgtccttcctccagcagttcccagtgggcgatgttgatgatgtggtagcggtccagaatggcctccgtcggctcgatgcccgtctcccgcagcgtttgggaaagggccttggcctccccggcggtaaaattcaaaatggtgtcatccagatccagaaagatattcttcagcatggcggtttcctctcaaacagatgaatttctgaggccagtttaccggatttcaacgaatttcgcaagatttttttcaaatgttgcgtttggttgcggccctgaaaccctgccgtggtggacttgcccggcgctttttggtaaaattggggcagaagcaagggaggaattgcctatgaatttttcggaaaagctgattcgcctgcggaagcgggagggcatcagtcaggaagagctggcgtcgtatttggaggtttcccggcaggcggtatcccgctgggagcagggcacagctctgcccgatgcggggaaactcctaaagctgcggcagcgcttcggcgtcagcttggactggctgctggaggatgcccaaggctgggaaaacctgaccgacggcgctccgactgccgacgaagacggaggagccgcaccgttgccaaagctgcggaagagcgtcctgccatgggccatcccgctgggagtgtctggcttcggcttgctgctgcttggaattttctcgtcggtattcccggcggaatatatggtcgcgtccacagtgatcgcgggaaatcaggagccggcggaccggatctatcgcggcctggcaggctttttgaagtgcaacaacttggagtggctgttccggctgtgtttggtcatcgccatcggttcgctgttggcgggcctgtggcaaaagggcgtgatgaagcggtttgaagacgccgtggatcacaagctggatgaactgggggagaagaaccgggacgcatccgcataagcattgacttccgtcccgtttccgcgtatcataaaaaggctatgaacgaaaacggaagggtttgaagaacgatgctgtatatcatgcgccacggcaggaccgtgtggaatatggaacacaagctgcaggggaaaacggatgtgcctctcagcgaggcgggacggcctgtggtggagcaggccgcagctgcctaccgggatacgcacattgatgtttgttactgttcgccgctgatccgggccgtggaaacggcggagatcgtgctgcgggggcgggagatccccatcatcacggacgtccggctggaggagatgggcttcggcatctgcgagggcacaacggactttcaggataacccggacaaccccatctacccgctgttcgctgccccggagacctatcgaatcccggtggagggcggcgagagcctggaggacctgtatgcccggacgggggcatttttgaaagaagtgatcgagccgcagctgcggcagggaaaggacatcctgatcgtgggccacggcgccatgaatgcgagcatcgtgtgccagatcaaggacatccccgtgaaggacttctggagcgtgaagatgaaaaacgcggagctggtgcggctgctttgagcgcctccctgtgaccgcagtttgccagtacatgatgaaaaagcccgccgcaggaatcatgcggcgggcctttttttgcgtatcagtcggttaaggggttgataatccagcgtttagctataaagtgcatctgcttgcaaacgatttatttgcaaggaaacaaactgcttggccgggagaattacagcagataggcgtagtccttcagaaccgtcaggatgaaggtctccacatcggcgggcagatcgttctgcccatccagatcggcctcaaagaccttgccgtccagccgcaccaggaccttgcggccctccagcggcaggaagccctgattctccgtgctctcgtcaaagccctcgcgggtcaggaacagggtgaacttgttccggtagggagcggagtcgtaggggcagaacacggcgcagttgccgcactcattgcacatccggtccacatggaggatctcatgtcgtccgtccggcagcgtgatgaccacattggcccggttggggcagacgtcggcgcagacctgacagacggtgttgcagtgcaggcagcgctcaccctcgcacccggccttgggcgggcagaggacacccttccgggcgatagcctcgtcccgggtggcgtgggcgtcatcggggatggcgacgctgtggacgctgccgatgacggcgttggcgaaatactgcgcgtcggcaataccctccaccacggtggcggggccgcgcatggcgtcgccgcccacaaagacgttttccagattcgtgcggaattcggggatgcccttggcgttgacctcgatgccgttggcggtgaacaggtcgctgtccacccgctcgcccacggcggcgatcaccgtatcgcagttgatctcagtgaattccccggtggggacggggctgcggcggcccttttcatcgggatcgcccagcttcatgacctcacatttcaacttgccgttgacctgctctacgggtgccaccagctccaggaaccggacgccgtcctctacggccagctccagctcctccgcgtcggcgggcatatacttcttcgtccggcggtataccagcgtggaggtcttggccccggcacggagagcagcgcgggccgcgtccatggcggtgttgccgccgcccaccacggccacatggcccagagggacgtcctttccggctttcaggtcacggagccactggatcaccggtacaacattgccgggaatgtccagctgaccggccttgcccgcgcctacggcgaagaagatgtgggtgtagcccatggccttcagctcgctgacggagggagcgggggtgttcagctttacctcggcgccgtagaacgtcatgagggcgatgtccttctcaatggcctcctcgctgatacggaagccggggatcaccagccggggcacgccgcccagcttgtggctctgctcaaaaacagtgacagggataccggcccggcccaggaagtaggccgcggcgatgccggtgggaccgccgccgatgatggcggccttgcggccgtcggtgacaggctccggctttttcagagaggccatcaggtcatcatatcccttctccgccgcgatcagtttggtagcccggatctgaacgggatcgtcatagtaattccgggtgcacttggtctggcagcggtgggcgcagatggtgccggtggtgaaggggagggcgttcttctccgtgatgagggccagggcctcggtgtatttgcccttacggcacagctcgatatactccggaatatcctgccggatggggcagccgccctcgcagggagcggtgaagcagtccatcagaggcaccttttccagcagtttccgccggggcaggggcttgatgtccttcagatggtacttatcccgccgggcggacagggccagcgcgtcgatgcccagtacatccacaccgccgaagggggcgaagtccagcttgtccagaatttcgccaatctgggtgaagcgctggtagccgccgggcttcagctccgtggtggccatggtgatgggccagatgccgcaggcgaacagcttgtcgatgttgaaggcgtcggcgccgccggcgtaggacagccgcagcttgccgttaaattcccggctcagccgggcggccatggtggtggtcagggggaacaggctcttgcccgccatgtacatttcctcgctgggcagttctccggcctttacgtccacggggaaggtgttgctcagcttgagaccgaattccagccctcggtccgtagcccgtttttccagacggtggaacatggggacggcgtccttgtattgcagatcctccttgaagtggtggtcatcgaaggcgatatagtcatagcccatttcatccagaatggagcgggcggtctcatagcccagcagagtggggttgcacttgacgaaggtgtgcagcccctttttctcgatgagataggtggcgatgcgctcgatctcctccggcgggcagccgtggagggtggagagggtgacagagcgggaaatccggggggagatggcgtcgatggcgtccttttcagccgggaacagctcatggagaacggagatgcactcctgaaagataggtgtttcggcggcgttcatcatgccgttcaggaaggtgtccaccttctcacccttgacgccctccagatcgtagcccacggacatattgaacacaaagccgttgggatcgcccagaccgtacagcttggacatgatcttgcaggcgcaccacgccttcacgtattcctcaaaggcctgagggacggtcagctccgtggaccactcgcagttgtagcactcgtcctctgccagaatgcaggggcggttgatgcaggcggccagctcagcgccgtccatcttctgaacggttttcagttcaaagaaccgggcaccgccgaaatagccagcgacgatgttctgggccagctgggtgttggggccggcagcggggccgaagggtgtttcaatggtctccccgaaaatgggtagggtcctgccgctgggatggaaggggcgatgaacgccgaacacggaaccctcccggtcatgttccgcgacgatccaggtcatcagctgccggaaggaaatgggggtcattaactcagacatattcacacctcattatgatgataagttttgttttagtacgttctgtggttcagatcgccccagagcttcttcgcggcctccagaatgtgggcgttttccgcctcctcgtcgatgcccaccagctgacgatccagcatgagtgtcttaccggcggcgatggtggtctggcactggcggcccgtcatgccgaagatcatgtggccgtcgatattctcatcggagaagggggtgtagggcttgtagtccatcacgatgatgtccgccgcggccccggccttcaatacgcccagcgtgtcggggaagtacttctcgccgatcttggcgttgttcttgaagagcatatccgtgacctcgcaccagccgacgttgggcaggcagttctggctccgctgggagcagagggccaccttgagggattccagcatatcgttggtgtaggcgtcggtgcccatgcccagcaggatgccccgcttgtagagctggatcaccgggcagatgccgatggcgttgcccatgttggattccggattgttcaccaccatggtgccggtctccttgatgatctccatttcggcagtgttcacatgaatgcagtggcccagaatggtcttggggccgagaatgccgtgatcctgcaagcgctggacggggcgacggccgtagttctgcaggctgtcgtacacatcgttcatgccctcggagacgtggatatggtagccggtgcggccgttgttggctgcgaccatgcggtcaaaggtcttgtcggaaatggtgaagagagcgtggccgccgaacatggccgccagcatgggatccttgttcttttcacattccgtgatgaagtcggcgttttcctggatggcctgcaagcacttttcctcgccgtcccggtcgctaacctcgtagcacaggcaggagcgcaggcccagacgcttgctttcctccgcaatggtgtggagggtgccggggatctcaccgtagctggcgtggtggtcgaagatggtggtcacgccctgcttgatagagtcgatgtagagggcggtggcgctggcccgggtgccgtccatcatcagatggcggtcgatggcccaccacgttccgtccagcacctcatagaagttggtggggttgttgcccacaatggaaaggccccgtgccaaagcggagtagatgtgggtgtgggcgttgatgagggcgggcataatcacgccgcccttggcgtcgatgatctccgcctgtgggtatttggttctcagagcggcttcctcgccgatctccacgatcttcgtgccctcgtaggccaccgcgccgtgttcgtagtagccctgaccctccgggtcgcgggtgatgagccgtccgttggtaacaagtgtcataatacgtccccccttgagaaaatattggaaatttgaaaatgatttgcgaaaaaggataaaagaaaaaggcgctccggtctcccgaaacacctgccgcgcaaaggagacaggtgtcagcccgtgcgcatggcactccgttgcagctgtcttgctttgcagttatgtacttgtaaccctattgtaaaggacagcggggaaaaatgcaagaaaaatctgcggcctggagacagaaagttggatagagcaaataaaaaatggaaaaaagcgggagccatcggctcccgcttgagactgtcttgatcttgaaaagaacagatttacttggtgccgaagatccggtcgccggcatcgcccagaccggggacgatgtagcccttctcattcaggtgatcgtccagagcaccggcatagatatccacgtcggggtgcttctcctgcaggaacttgatgccctcgggagcggccacgaggaccatgagcttgatgtgcttgcagccccgcttcttcatttcgccgatggcctctgcggcagaaccgccagtagccagcatggggtccacgatcagcacgtcgcgctcggcaacgtccttgggcattttgcagaaatagggatggggctccagcgtttcctcgtcccggtacataccgatatggcccacacgggcggcgggaaccatccgcagcacgccgtccaccagacccagaccggcccggaggatggggacgactacgaacttgcggccggccagagtgggggcgtccatctcgcagatgggggtctcaatgtgcttggtggtcatgggcagatcgcgggtggcctcataggtgatgagcataccgatctcgctgaccagttcccggaaatccttgacgctggtgttcttgtcccgcatgatggtcagcttgtgggccaccaggggatgatccataatgactactttacccataattctgttctcctctatatcaaaaaattgaagacgttattgaatcggcgccggtttctttttcagtgggtccgcctgcggcggccggaggtagaaagcctccaattcctgagcggaggccagcttgccctgcgcggctaacgcctccgcctccagtgccacggacgtggcgttctgcatgatgaggtgggggggagccatacggcaggggatgccttgctccgtaaagcgggcgtataccagatgcgcgccgtcacccactaaggtgatgggccggggatcgtttcggatctcctccgccagctcgtcaagagagacggcccgatccggggtcagccgggtgaggacgccgttttccgcagagaagttggcgttatagacctgactgcggcgggcgtccatggcgcagacgatcagcccgtcggtaaaggccgcgttccgggccatagcggccagcgtggacacgcccacggcgggcttgtccacggaaaaggcaaggcccttggcggcggaaacgccgatgcggatgcccgtaaaggagccggggccgacggccacggcaatggcgtccatgtcggacagcttcaagtccgtatttttcaggatgtgctccacaatgggcatcaaagtgcggctgtgggtcagaccggtatcctgatagccggaggccaaaatgcgtccgttttcggatacggtggcggataccgccttggcggaggtctccagggctaaaattttcatggaagctccactccttctatggtaatgctgcggccggtgtctccctcccgggcgatgcggacccagacggtgtcctccggcagagcgtccatcacgttttcgctccactccacggcgcagacaccgccgcgggagagataatcctcccagccgatgtcgaacaggtcatcggcgctgttcagacggtacatatcaaagtggaacagaggcagccggccgccctcgtactcattcacaatggcaaaggtggggctggtgacccggcccttgtagccaagccctgcggcaagtccccgggtgaaggcagtcttgcccatacccagatcccccaaatacgccaccaccgcgccggggttcagcacggcggccagacgggcgccgatggcttccgtctccgcttcgttatgactgtgaaattccatggacaccctcccttgctgcacgtaatccatcacattatagcacgtccgacagaaaatgtaaaaacaaaattcaacaagtttacaggtccctttttgtgtggtatactatcagcgtgtcgaaaaaattttttcgccccgctgagcaagtttccagaactttatagaagttctgaaaacttgggattttaatggcgcgagacacccttcttgggtttcccgcgcacacccttcacccgcaaggggtatgcagcatccgtaaagcggcacagccgctaacggctgccctaccttaccgt

SEQ ID NO: 12290 - DNA, 971 bp, Unknown
  gut microbiota DNA sequence
aagcgatggatacggagtctaacttacttgttctggaagtgcttttccttgcgcttttcaacgaaggcgctcatgccttccttctggtcggcggtggcgaagcacatggcgaacagctcgttctccagagcgatgccgtcgtcaatgtccatctgcatgccgcggtcgatgcaggccttggaatacttcacggcgatgggagcgttggcggtgaaggacttggccatggcgatggcaccggggatcagctcctcgggagcatacacggcgttgaccagaccgatcttctcagcctcagcggcgccgatgaccttgccggagaagatcagctccttggccttggcgatgcccacgcggcggggcaggcgctgggtgccggagaagccgggggtgatgcccaggccaacctcgggctggccgaacttggcgccgcccttgccctcagcgttggggccggcagccaggatgatgtcgcagctcatggccagctcgcagccgccgcccagagcgaagccgttgacagcagcgatggtggggatctccagcttctcaatgcggcgcatcagggcgctgccccgctggccccacttgcggccgccggccacatccagggggagctgctcgccgatgtcggcaccggccacaaaggaacggccctcgccggtaatgatgagagcgcccagctcggcgtccttctccacctcggtgatggcctgctccaggtcgccgatgacggtggagttcagtgcgttcagcgcctcgggacggttgatggtgagaatggcgatgttttcctgcttttcataacgaagggtctgatacataagtagattcctcctcaaaaataatatgtaagcgtctgtgctgacggagatgtgggtccagctgcacccgtcagcctatccatggttgtacagtgagtaatatagcaatttatgtgccaagattggcaagatgtttttcacaaaaat

SEQ ID NO: 12291 - DNA, 600 bp, Unknown
  gut microbiota DNA sequence
agcatgtcaagagagatttcatcgactgcggcaaggaagacaaggatgctcaggaaggcgtagatatcctcaacagattttatcgagaagacaaaaaacataaggttggggtaaatggatggaccgttgaagaccatctagcctatcggcagtcatacgcaccggacattttacaggatttattggagaaactggaggaaatatcttccaggaagaatttgctgcccaagtctaccttggcgcaggcggtcggttatgcccttaatgaatataatgccatttgtgacatcttcaaaagaggtgatacagctctcgataacaactatattgagagaatccagaggtacatatcactatcaagaagaaactcaatgttctttggctcgcacgaaggagcaggacgtgcggctatcctatattccatcgccatctcatgcagactgaatggcatcaatctgttcgaatacatatgcgacgtaatagaaaagactgcagaatggcaaccaaatactccatgggaaaaatatagagacttacttcctgaccgatggaaaaagcagcaacagcattaatttaatcagctgttactgcttttttttt

SEQ ID NO: 12292 - DNA, 2544 bp, Unknown
  gut microbiota DNA sequence
taactattttttctctgccgttcccgcaaacgcaggtgcggcaacgctttgcgccatatctcaactggagacgcctgaaatgtcggagtctaacgctctatccaactgagctacgggcgcatatttgattgttccggcaagagatattccactcacatgtcgctcgatagtataacagattttttcggtcatgtaaagcctttctttgcaaaaaatttttatcccggcaaagattgttaaaaaatttgacaagtccggcattttattttaaaatagtgataacatattttttcaaagcaggtggatcaaatcatgaaaaaagaaaatatctcggacgccgtcattcgtcggcttccccggtattaccggcagctaaccgatctttatcaccgcggcattgtccgcacttcctcccactctctggggcaggaaatgaatattaccgcttctcagatccgtcaggatttcagttgtttcggtgagtttggccagcagggatatggatacaacgttgaagaacttcgttccgagatcggtcacattctgggcgtggacaacgatcaccatctcatcatgatcggcgtcggcaacctgggccgcgcattgctgaacaacttcccctttgaaaacaccggcttcaccgtggacgcctcctttgacgtctctcccgatgtgatcgatacacagatcaacggcatccccgtttattcgaccgatgagctggagtcctacatcaagcgccacgccgtggacgttgttgttctgaccattcctcaggctgtggcacaggctaccgccaaccggttgatcgaccttgggatccggggcttctggaactttaccaatgtggagctgtccagccccaatccggatgttcagtttgaaaacattcactttgccgacagccttctgaccctgagttaccgcatcgccaatcactgagaaaggaactccccatgaaaaagctggtcctgttcctatccgtatgcgcgcttctggcctctgccgtctgggtcggcgccgctggggacgcgggagatccgctggcatctctttcttacttgaacggcgaattttcccaacgtgcagagaaaaaaatcgatcaggcattggagcagtcgggcaaagagttggccgaacgtctgaaaaacggtgaggtaggcgaggcaactgccacctggcaggagacccgcctcaaggagggtgacacgcttcacggcgtcacaggcaccggcgttctgctgctggccggccgcgggcgcgtgacctataaatccggcgctgtggtggatgttaccaccggagctgtggttcccagcgggacgaatctcaccgccaaccaccgctatctgaccgccgaggacaccaccgccgcctataccgtcacctccgaaaccgcggtggtggactatcaggggcagtacgccttctcctattccgaccggccggactacaacgccatggccgccgccctgaagtccctgcatctgttcaagggcactttcactggctacggcgagggctttgatctggaggctgcccccacccgccttcaggccctcatcatgttcatccgggtcttgggtgaggaggagcaggcgctgacctggtccggaactacgccgttcaaggacatcgagaaaggctctcaggcggagcattatgtgggctacgcctatgaaaagggctatacgaacggctacacagccacgtccttcaagcccgccggggctgtcaacgcctatcagtacacggaattcgtgctccgcgccatgggatacagttccgctgccaacaaggatctgtccgataccctgctccgggccgtgaacgccggtgtcctgaccgacggtgacgctgccatgctgcaaagtgccgccttcctgcgggcacagcttgtgtacatctcctattacgccttggaggctgacctgcctgacggcagccagtctctggccgaccgcttgatggacctgggcgtttttaccagagacgagtggctcggctcgtggaagctggtcaagagtgatcgcctctaaaaaattctgcaccttcttcaccggggcacatactatggattgagaccgcatgaacggtctacatctcgatctcataggaggttccgatatgtgctgtaataacggttgcggaggcggcgggaactgctgctggatcatcattttgctgatcatcatctggtgctgctgcggcagcggcggttggggcggctgcaacaacggctgcggctgcaatagcggctgcggttgctaagatcaaagccccgtgcctttatgggcacggggcttcttctatataggacttgactttgcggcagatttcagtaaaatagaggatagtctttcgtctgcattccgtccttttgcggcaagccacgtgtactgcggtcaggttctgtggcgtagccatttgcaaacacactcctgagttagaacatccggccgtcggatcagtctgaatttcatatccggaattagcgcagttggtagcgcgcttgctttgggagcaagatgtcggtagttcgag

SEQ ID NO: 12293 - DNA, 395 bp, Unknown
  gut microbiota DNA sequence
ttcgcagcgcgttttttccacggtaaatgaggtccgccacctgcttttcccgcttgcccatgacggcggcggtctccgcgtggctcagtccctcaaaatagacgaggaacagcgcctcccggtagtcctcgtgcagctctgccatgcaggtccgcaggagccgcgcccgttctgccgactgcacggtttcctccaccagctcccgggcctccggttcctccgtcagcgcgtccagcgaaaagcagtttctcgcccgctttttgtgcagcaaccgcagggccatgtgccgcgctgactggtagaggtaggcgcgaaagccgccgtcccggatggccggccttttggcgatgagataggcaaaggcctcgatcatcaggtcctccgcctcgtgaagg

SEQ ID NO: 12294 - DNA, 1477 bp, Unknown
  gut microbiota DNA sequence
ccttgtccgggttggtggggatgggctgcgtcagctttgtcaggttgcggaagccccaaaggaaacgccggggattcgcgctgttattttcatcaccgaaataaaaaccgacctcattcccgcactccacccgggtgtcgccggggcggctggcaggcgttacgctgaccctgtccggcaggtaagccttgatggtgccgtttttatagtattccgacagtcccacaaagggattggcccagttgtagccgtccgtatagacctcggtgatgtaattggagcaccagtcaccaccttgcgagagggtgttccatgttcttaggtcctctatcttgcttgtaatcacggagttttcggttgaaattactgtgttcttatcataattgtagacgagttggttcattttgagagcggggctgtccgcggcgtttctgtgacccatggcggcaaagccgctgagggtatagccccatcgcgtctcaagctcaatgcccagagagccattagaatccgcgctggtgatcttgatattgtcaacgctcgtcagaacgccccatgcgccttccgaagacagctttgcgatctcatagtagaccgtggtcgttcctgtgacggttttcccggacaccgtggccgtcaggtcgtactccaccttgatggcatttgcggttccgttgggcgttttcttcacagagccgatgtgtttcaggcggagttcggcgggatgcacgatatcccgcttgttatatccggagcccttaaatgtaacaaaattacaatacggcatctgcctgtctgttgggtcggcgctgtccgccgccggggccgtggagagcgtgccgtccttccgcacgatcacgcggagatagtcgtttcgcagctcccacgacccgctgttcagctttttcgctgtcacggtaccgctgtcgaccgtctggatgtctcccaaataggccacagcctccgtgggcagcaggcacagcagcaggcacagcgtcaataacagggtgatcgtttttttcatgatgcgtttccctccttgtctgtctcattgttcttttctcttttctctcgctcatgcaggcgcatacagaccaccgtcagcacagcggcggccgtaaaggaagccacacccaccagcacatagccgcctgcgctgtccgccagcagcgtcgcgccgtaggccccctggacggcggcgccgggtgccccgtcggtgaaatgggccagcgcgccggtcagtcccagagccagcacggtacacagcgttcccaaccgccgcaacaccgtccgctcccgattttggatcagccgcagggccgtctgcttcacacgccggacgcgctccgtggtgtcatacatgccccttcctccttcccgaaaaaaagtccttacattaccatagggacaaaaacggagaaaactacgcacccaaaattgaaaaaatttcaaaaaaaatcagaccgtcctgttggac

SEQ ID NO: 12295 - DNA, 206 bp, Unknown
  gut microbiota DNA sequence
gagctgaagcggctccatcacgagaccggcaccaccatcatctacgtcacccacgatcaggtggaggcgctgaccatgtccacccgcatcgccctgtaccgcaagggcgagctggtgcaggtcgcaccgcctctggaactgtatgacaaccctgtgaacctctacacggccgacttcatcggcaaccccagcatcaacttcgtcaa

SEQ ID NO: 12296 - DNA, 987 bp, Unknown
  gut microbiota DNA sequence
ttgagcaggttcatggacaccgccaccagcgcatataccgcgccctttttcagaacggtgaacagcatgcccgtgggcttcatggtgttttccagcagaacgaccagcgccaacagcgccagcgcgcagagcagggcgatcaccgtgccccgtttgcttttcttttcgttcagcacagtcgatccccccttacactttgtccgtgaccttttcgccgaacagacccgtgggcttcacgcaaagcaccacgatcaggatggcgaaggtaaaggcatcggaaaagacgctccaatcagagcctttgatgacgctctcgcagataccgatgagaaacgcccccaccacggcgccgggaatggagccgataccgccgaataccgccgctacgaaggcccgcagtcccggcagggagccggacagggggacgatggactggtagttggtgaagtacagcagggagccgatggccgccagcagagagccgatgatgaaggtcacggagatcacgctgttgatccggatgcccatgagctgcgcagtttcaaaatcccgggacacggcccgcatggccatgccgatccgggtgtggttgatgagctgggtcagggccgccaccagaagcaccaccagcaccggcgtgaccaccgtcacatacttggtggatacccccgcgatggtcagctggttggacagaccgggcagggcggggtacatctggggcaggccgccggtgacgtaggtcgccaaattttgcagcagatagctgacaccgatggcggagatcattaccgacatccggggggctgtccgcagaggcttgtaggccgcccgctcgatgatgaagcccagcagcaccgtcagaatgatcatcaggggaatggccgcggccagcggcaggctggcactgaggtagaccatcatcaaaccggctaccatgaatacatcgccgtgagcaaagttgatcagccgcaggatgccgtagaccat

SEQ ID NO: 12297 - DNA, 1621 bp, Unknown
  gut microbiota DNA sequence
cacggcgtttacaccctgttcaaggacaacggttatgtgatcgctgccgtcgtggtgggcgatgacgccgcttccaccaagaacctggtgttctctcacaagaaggacgtcgagctggagagctacgacaagaccgaggacgagtggacctggacccgcaaggtcgtcaacgccaagggcgaggagatcgtcctcaccgagaagagcgactctctgtctgagctgaacaagatggtcaagggcctgtggtatcaggtgaagtacgatgccaagggcaacgtgatctctgttgagcccgcttccactgctctggatgccaccgcgaaggagtatatcaccagcttcgccaacattgagaccgctgtcaacgataatgacactgtcctgctggagatggtcgagaccaagactgtccataacgctctggacaagaagctgaccctgaagggcagcaccctgtacgatgcgacctccgctacgctgggcgttgccgtcgacgatgacaccaacatcgtgttcatccagaagaacgacaacaaggagaccacctccttcgagaccggcgtcaaggctctggagaccgctctgaagaacctgaacgaggtcagcaaggatacttacagctatgagttcagcgcttacatcgaggatggcatcgccaccaccgttgtgatccgcgacctgaccgctggcgagtatgagggcagcaagcccgccaccaaggctgattacaccttcgatggcctgactgcttatgttaatgacaacggtgcaatcaagttctccgaagctacctgcgccgctatcagcggttgggaactgggtacccccgctaccgttgagtacaccatctctgtgaacggcagcgctgctcgtacctacaagcagaccctcaccagctctgttgcaatgagcggtctggctggcaccatgaccgtccccggcctgaccgtgaagaacggcagcaacctcgagatcaacgtcgtggttaccttcaagggtactggtactgacaccaacacctacactgtcagcggcacctgctacatcgcctaatctctgattagtcgatcacagctgcatctgtaagtgcagaaagcccccggacgaaagtccgggggcttcttttcttagcttttctgataaaaggcaagcccccaataggggacgccctcttcgttcagctgataagtgggtttcgagctggaaatctggaactgattgcccttccagctgatcggcatctgacttacgtaggtggtgcttcccgtgtagtagatcatacaggcgtgatcatccccgccccggatgaccagataggtctctgcaccgcagaggaaaaagcctgcaggcattttcggaaatgtaacggtggtgggattgctgtcgccgcttttgccggtgcctgtgtaggagatcatcccgatctcgcagtttcccgcccccgccagcgccgtttgcagcgccgccacgccgtcggcgttgcctttcagcgccgtgtcgatcttgtcccagttgtcattgaattcctccaccagaatgcggtccgtccccgcccagcgggacagccggtagttgggtgtctcttggcttgccatatgcctaaacctatcctttctca

SEQ ID NO: 12298 - DNA, 164 bp, Unknown
  gut microbiota DNA sequence
ttccagaacgaagagagtgtgcgcggggttatttacaacgagtgcctttgatacacaatggttgacattctgcatccaacggttttctcgttgaccgatccttttgagtctacgtcttgaagacggggtatgccgcatctggagttcttttctaagtgctgaat

SEQ ID NO: 12299 - DNA, 188 bp, Unknown
  gut microbiota DNA sequence
atcggcggcaagggcggacggtccacccccatcggtctgggcggctggaagcccattgtgaccatcatcctgttcatcttcttcatcgtcggcatcatcatgccggtgatcatcctgatcctggagagctgcatgctgaaggagggcacctattctctgtccaacttcacgctatactactggatcgg

SEQ ID NO: 12300 - DNA, 147 bp, Unknown
  gut microbiota DNA sequence
ctggagagctgcatgctgaaggagggcacctattctctgtccaacttcacgctatactactggatcggcgagggtgatcccaacatcatggagggcgtctccggcatcttcaagaatgaaacctttatgatgtctctggtgaactcc

SEQ ID NO: 12301 - DNA, 204 bp, Unknown
  gut microbiota DNA sequence
ttctgctgggcatcgtgcttggacctctggctgaaaagaacttccgccgtgccatggtcatttctgaaggcagcttcagcattttcttcacgcgtccgatcagctgcgcgttcattttgatcgcgattgtgtccgtggcaatttttggcatccggaactacaagtccagaaagctggcaaagcagaatactgctgaaacttccg

SEQ ID NO: 12302 - DNA, 347 bp, Unknown
  gut microbiota DNA sequence
gccgtggcgtgagtgtaggtgttcagcgtgaaccccgccgagtagtggcccagcgcgccggacagcgttttcacgtccaccccgcttttcagcgacagcgtggcgaaggtgtgccgcaggtcgtgaaaccggatgtgctccgcgccgatggccttcaaaattttgtcatgggttctccggaaggcgtccgggtcatacatggttccggttttgggcgatgggaacagatacggattgcgagggtgctttttgtgttcggcaatcagcaggtcgactgcctgctgagggagagccagcgttcgcacggagttgcgagttttcggcggactgaccaccagttccccgtt

SEQ ID NO: 12303 - DNA, 259 bp, Unknown
  gut microbiota DNA sequence
cacatccaagtccgtccattggagggccagcagttcaccacgccgcaggccggtggtcagttccagatagaaggccgcgagaagcccacggcgctccgcttccgcaaggtacatcccgattttctcctgcggcaggatcttcatttcccgtttctcgagctgcggcagtttgcagccctgggcgggattgctgaggatcagccgctccgccaccgcctgctccaggcagttgtgcagcagcgtgtggacgccccgcacc

SEQ ID NO: 12304 - DNA, 291 bp, Unknown
  gut microbiota DNA sequence
agctttggatacatccagccgttggctttcgctgattgcggctttaagcttctccttgacctcggcctgcgttttacccagcacgttcttgatgatccgctttccgctctccgggtcatagcccgccgtgtaccggccctcccatcgaccatcctttcgtttgcggatgttcccctcgccgtttgctcgtcgctttggcatggtatcagcccctttcgcaacgaacaataccgtaaccaagggaacaaagctacccgaaagtcgaactgttatcagaaagttatcatttgc

SEQ ID NO: 12305 - DNA, 11385 bp, Unknown
  gut microbiota DNA sequence
atcgaatcttcacacgcatgaggccactggttcgagtccagtagtctccaccaaaaatcaccggaatcgcttgattccggtgattttctttcgtgatccgcaacttttttggacgcttaattttcgccgtttcatcaagactcacacgctgacccacacggggaaagggccggaaagtaccggacagggccagacaggaaattttctgtctggccctgtgttttttgccgtacttaccgcatctgctggctgatgaccccgccgatggtgtcggcggcatcctgtttcatctgcgccgtggcgtgggtgtaggtgttcagcgtgaaccccgccgaatagtgacccagcgcgccggacagcgttttcacgtccaccccgcttttcagggacagcgtggcgaaggtgtggcgcaagtcatggaaccggatgtgttccgcgccgatggctttcaaaattttgtcatgcgttcgccggaaagcgtccgggtcatacatagtcccggtcttgggcgatggaaacagatacggattgcgagagtgctttttgtgttcggcaatcagcaggtcgaccgcttgctgcggaagggccaacgttcgcacggagttgcgagttttcggcggactgaccaccagttccccgttgattcgatttacctgctttgtgatagaaagcgttttgctctctacatccaagtccgtccattggatggccagcagttcccctctccgcaggccggtggtcagctccagatagaaggccgcgagaaggccccggcgctccgcttccgcaaggtacatcccgattttctcttgcggcagaattttcatttcccgtttttcgagctgcggcagcttgcagccctgggcggggttggtgaggatcagccgctccgccaccgcctgctccaggcagttgtgcagcagcgtgtggacgccccgcaccactctggggctgaggcttttgtccttgagttcaggaaaatttttgcgctgaactcggccggttttctggaggttgttgtaaaaccgctggatctgaaaggtggtcagcttgtccagcgggacgtccccaattccggggacgatgtggttctcaatgtagttggtgtagtacgcctttgtgttgggccggatgcggggctcggcgtagacctcgtaccacgtccgcacccatgacgcaacagtatagttgccagctttggatacgtctaacttttggctttcgctgatcgcggtcttgagtttctccttgacctcggcctgcgtcttgcccaacacgttcttgatgatccgttttccgctctccgggtcatagcccgcggtgtaccgaccctcccagcggccatctttgcgtttcctgatgttgccctctccgtttgctcgtcgctttggcataaaatcagcctcctttgccaacgaacaatatccgtagggattgggtatctctttttgcagcttgaaaatgcaggtatgcaccttcgacccagctgaaatcgtggcaaattcgtggcaaattgctggaatatcttgactttatgcggatgatatgctaaaatttttccggtttttaggtgactgtctgcgggtagtccgccgggaaatccattagaatttaacagatcggagatacatattatggaaagaatcaagactctcgagactcgtagcctgtgcgacagcgccaagaatggcggttgcggtgagtgccagacttcctgccagtctgcctgcaagaccagctgcggcgtggcaaaccagaagtgcgagaacaccaacaagtaatcaattgcaattttcaaaaagctgccgcctgttcaggcggcactttttctgtacgaggagaacggaagaatggtacatcagtatcaactgaacggctacaacatcgtgctggacacctgctccggtgccattcatgtagtggatgaggtagcctatgacatcattgcgctttacccggatcacacggcggatgagatcgtaacggcaatgatggaaaaatacggcgcacgcgaggatgtgacggagaaggatctgcgggactgcattgatgacgtggaggcgctgaagcaggccgggaaactctatacccccgacaccttcgcggacatggccggcacgttcaaggagcgttccggcgatgtggtgaaggcgctgtgcctgcatgtggcgcacacctgtaacctgaactgctcctactgcttcgccagccaaggaaaataccacggggaccgcgcgctgatgagctttgaggttggcaagcaggcgctggactttctgatggatcactccggcagccgcaccaatctggaggtggacttcttcggcggtgagccgctgatgaactgggacgtggtgaagcagttggtggagtatgcccgcagtgtggaaaaggagcggggcaaaaatttccgctttacgctgaccaccaacggtatgctcatcgatgatgacgtgatcgacttcgccaaccgggaaatgagcaatgtggtgctgtcgctggatggccgcaaggagatccatgaccggctgcgggtggattatgcgggcaacggcagctacgagcgcatcgtgcctaagttccagaagctggtagaggccagaggcaacaagaactattatatgcgcggcacctttacccatgccaatccggactttacgaaggacctgttccacatggcggatctgggcttcaccgagctgagcatggagccggtggtgtgcgcgccggaggaccccgccgcactgacagcggaggatctggagatcgtgaaggaccagtacgagctgctggccaaggatatgctgcgccgggaaaaggaaggcaagcccatcaccttctatcactacatgctggacctgacgggcggcccctgcatttacaagcggatctccggctgcggctccggcacggagtatatggctgtcaccccttggggcgatctgtatccctgccatcagttcgtgggcgaggaagcctacaagctgggcgacatctggaacggcgtgaccaatacggccctgcgggaggaattccgttcctgcaacgcctacgcccggcctgagtgcaatgactgctgggcgagattctactgctccggcggctgcgcggccaacgccttccacgccacgggttccatccgcggcgtctacgaggcaggctgcgaattgttccgcaagcgtattgaatgtgccatcatgatgaaggtggcggaagattctgccaaggccaacggctgatggaaacgcccattgctgattttgtccggcggtacgcggattccgggatggtccgggcgcatatgcccggccacaagggaaaaccctttctgggctgtgaggcgctggacatcaccgagatccaaggcgcggacagcctgtatgaagcggagggcatcatccggcgcagtgagtcctatgccggggagctgttcggctctggccggacggtgtactccacggaggggtccagccagtgcatccgggcgatgctgtatctggcgctgagctgcggaaatgggtcccggacggtggtggctgcccggaatgtacaccgggcgtttgtatacgcggcggccctgttggattttgagatcgtctggctgtggccggagcgcagctcgtctctctgcggctgcccggtatcgccggacacattggagtggacgctggcgaccctgcctgcgccgccggcggcggtctatctcaccagcccggactatctgggcggcatagcggacatttccgctctggcagaggtgtgccggaaacacagtacgcttttggcggtggacaacgcccacggcgcctatctgcggtttctggaaccatcctgtcacccgctggatttgggcgcagacctgtgctgcgattcggcacacaagacgctgccggtgctgaccggcggcgcgtacctgcacatcagccgtgcggcgtcggcatctctccgggagagtgcaaaaacagcgatggccatgtttggctccaccagtccgtcctacctgacgctggcgtcgctggatctgtgcaaccgctatctggcggatgggtatcgggatcgcctgcgggagatgtgtgggcgtctggaggaagcgcgaaaggcgctgacggctgccggttggcagatggaaccgtcggacccgctgcggctgactgtcaaggccccagctgggatgaccggcgggcagttggcgaaccgactgcgtgagagcggtgtggaatgtgaatacgccgatctggactttttggtgctgatgctgacgccggagaatcgtgcggcggacatcgaacggcttctgcatgctttcggaacaaatgatgccgcttatgcgccgcagccgacgctgccgctggcccgtggagaacgggtatgttccgtgcgggaggcactgtttgccccacgggagactgtaccggcggcacggtcgctgggccgggtctgcggcgcccctaccgtggggtgtccgcctgcgatccccattgcggtgtccggtgagcaaattggcccggaagcgctggaactgttccggcggtatggcgtggagcaggtggaagtcctgcgctgaaaacggttttgagaaaagcaagaccggcaaatctgaacactgacaaaccgcagacccggcagtatttaccgggtctgcggtttgttttcttgctgtatgcatccggcttgtgaactgtggagtcttgccaacggcgcgttttggggatggccttctgccgatgagggaaaataagacgcccgctgttatagtaggaatgcggtctggcaactgcaaggtgtaaaacgaagggagaccacataagaaggaataccacaaacagtttatcaaaaatcttccagtgtgcctcttggataaattaccagaaagtccaaagactaagcgtagtttcacgaggataaggagatttgaaatatgaaagcaacaggaatcgtgcggcgcatcgatgacctgggccgggtggtcattcccaaggagatccgccgcactatgcgcatccgcgagggcgacccgttggagatctataccagccgggatggcgaggtcatcttcaaaaagtattccctcatgggcgggttggatgattttgcggcccagctttgcgagactatgagccgttccaccggggccatctgtgccgtgacagaccgggacagcgtcattgccgtggccggcggcgccaagcgggagctgctgggcaagggcattaccgcccaactggagcaggttatggagaaccgccgcatctaccaatatgacggtcaagggccccagatcccggtatccgacagcagtgaccgcctgatggccattgtggccgcgccgatcctttcggagggagatctgctgggactggtgctgttcatcagcgacagccccgctgctgccggggacgcggagtataagctggcccagaccgttgctgcctttttgggccggcacatggaaaactgaagagatcgacagcggcaggcggccatggggtgatccatggccgcctgctatattggttcttaaaagcgggcgattacagggcggagcgattgcatttttgcaaaatgcaatcgcttacataggcggctttgtgaattatcaaatagaaccggtgacgcaaggagcgctgcattcaaagaaaaatatctgaatttgtaaatgttgcacaatgcagaaagacgttgcttttgatatctgtagaaaatggcgattttctattgcaatccaaattttgccatgatatcatattcacaaatcacggcacttggcgctttattttattgtgcatgaatgtaagcgctttcttacactggaaaggagaaccggttttatggataccccaacaatttatgatgtatcccgcctgtccggcgtctccaccgccacggtctcccggacctttacgacgccggaccgggtgcgggaatccacccgccgccgggtttacgccgcggcggaggcgctgcactaccaacccagcgccattgcccgggccatggcccggcagcagaccgacaagatcgcgtttctgatctgtaaagagggcgcgactatcctggatgaattttacgccagcatttgcgagggcgtcatgcgccgcgccaacggcaccaactaccagcttctgatttccacagcggaggaatggacccgcacggcccagagcaagcagatcgagggtgtcatcttggcaggcaacgcccaggccgatctgatttccgaatttcagcggcagaacatccccgtggtcctggtaaacaaccgggcggcgggcttcgatctgccctgcattgtggcggatgaagccggcggtgtgcgtcaggtagtcagccatctgatctctgccggacatcagcgaatcgccatgctgatgggccgcttctccccttacgtcaccagtgcccgttacaatgcgtttctctccgttatgagggaaaacggcctttcggtggatgaatccggcgcgttgatgtgcgaccgggatatccagagcgccacagaggcagccctccgtctgctgagccgcccggatcggccctccgcagtattcgcctttaacgatgtgctggccgccggcgtcatgaaagccgcccggcgtttggggctccgcctgccggaggatctggcggtggtgggcttcgacgattcctccgtctgccccatgatggagccggagctcagctccatccatgtggattgccgccggatgggcgagctgtgtatggagcacatggctgcattgctggacggtgcgcaggatattccccggctgacggtggtgccggtgaatctcaagatccgggcatcctcccgcgccgcgatctgacagaaattttacacaggcttcacctgagtttgattgtttcagcactatataaaatgtatactcttcggtggaaaacgtttttcactcaataaggaggcgttcttgtgaaacggaaaaagagaattggaacggttggaaaggccattggctgtctgttttttctgatggtctcgctgtttcccatctactggctggtggcaatggcgatccggcctacggatgaaatgaggggccatatcgcgttgatccctcaaagtctgacgggcatccattttgcagagctgttttcggccaagaatttcggcactgccatcatcaacagcttgcagactacgttcggttctctgttcgtctcgctggttgtcggtatctgcgcggcctatatcatcgcccgccgccggttccggttcggcctgaaaaagcccatgacatactgggtcctgctggtgcgcgtgctgccgccggtggctttcaccatcccgctgtacattatgttcaataagctcggtattctgaacaccaagctgccggtactgctggcctgcgtgctgatcaacgtgccgctgatcatctggttcctgatcagcttcttccaggatctgccggaagaggtggaggaaagtgccaaggtggacggcgcgaccgagtggcagctgttctgccggatcgtgctgccgctggtggcccccggcatcgcggcagtggccatgctctcctttatgtatgcctggaacgagtacacctacaccgtcattttcacccggaccgccgccaacaacaccgttcctctggcgctggccctgctgaacacggaggataacctcaccaacttcggcctggtggccgcaggcggcgtggtctccgtcatccccatcaccctgtttgtgatctttgcgcagaactacttgatctccggactttcaagcggtgctgtcaaagagtaacaaaataaaatccaacaatttcagattaggaggaaaacaagatgaaaaaagcgttgtccctgattctggcgctggttatggccctgtctctggccgcctgcggcggcggtaagaccgagactccctctgacagcaatactcccgctgataatacctccgcagaacccaccaagctgtccctgatcctgcgcggcggcacctatgccgacgtgatcaaggagtgcctgcccgctttcgaggctgagcacaatgttgtctgcgaggtgcaggagctctctgagggcgacctgtactccggcatcgctctggacgccatcaatgacaagggctcctatgacctgtgcatggtggacggttcctggatggcagagttcaccgagaacggcgtcctggccaacctcaccgagctgggctactctctggatgaggacgtgatccccgctaccaccgccatctgctatgtgggcgatgacctgtatctggctccctactacggcaacgtgaccgtcctgctgtacaacaaggccaacgtggaagccgccggttacaccggtgacaccatcctgtctctggaggatatgctggcgatctgcgaaaaggccaaggctgacggcaagctgggcttcatctatcgtggcgacagccagaacaacctggtcgtcgacttcctgcccatcctgctgtcctacggcggctgggtcatcgacagcaacaatcagcccaccgtcaacactcccgagtttaaagatgctatgaacttctatctgaagctcatcgctaccggttccgcccaggtcaaggatgacctgatcgcttcctgcgataccggcgccggcaccatgggtgtgggctggcccggctggtacactcccactgctgataccgctgctgattactgcgccatcaccggtgctgtcgccaagggcggcgagacccacaacgctaacgtctatggcgtctggaccattggtatccccagcaacagccagaacaaggaactggctaccgagctgctgagctacctgatggacaaggatgtccagaagtccaccgttccctccggcggtgtgccctgccgttactccagcctgcaggatgccgagatcctcaagacctatcctcagtatgaggtcgtctgcaaggctctggaaggcggtatgtatcgtcccgtgattgctgagtggactcagttctacaccatcctgggcgctgagatggacaacatcgtcaacggcgtcaagacggtcgatcagggcctggccgatgcccagtctcagctggaagctctgatgaagtaagcattccgcttacatccccattttgcatgtaatgaaacgtgcggccgggcgaaaagcccggccgcacaacaaaaaagaatgtttcccccattccttttaatgattacgatccgtaacgcttctgaaatgtgaggccgctgtcatgaaaagaaacgtaaataccaaactccgctccgcagatgcccagaccaaacggtttggtttgggaatgctgtcccctaccgttgtgatcctgctgatcatgacggcgtatcctttgttctttacgctggtttacagctttaccgactacaaccttctccgcagcctgaagaaagggtcccattttatcgcccttcaaaactatacaaagctgctgagcgacccgtatttccagcaatccattctcaacaccgtcaagttcactattcttgctgtgatctttgagatgttcatcggtcttgtgatggcgctgtttgtcaacagtctgaaacggggccagaaaaccatgcgcaccctgctgctcctgccgtatctgctgcctaccgtcactgtggctctgagctggcgcatgatgctctctcctaactacggcattgtcaaccaggttttgcaggctctgcacctgccggtctacaactggttttccgatatccacaccgcctttggcatgttagtgctcatcgacgtgtggcaaagtgctccctttgtcttcctactgctgtacgctgccctgcaatccgtgccgcagagccagtacgaggctgcacggatcgacggcgcaaaccgcttcaagatcctcttttatgtgacccttcccaacatcaagaacagcctggccctgtgcgccctgctgcgtaccatcgacagcttccgtctgttcgacaaggtgaacctgctgaccggcggcggtcccgccaacagcacctccaccatcacccagtacctctacaactacggtatcaagtccctggacttcggcttcggcagcgcgggcgccatcgtgatgaccgttctggtcctgctgctttccagtgtgtacatcaaacgtgcgatttcgtaagtgcttatggaagagaagaagttaacagttacttttgtaaatgtgggctacggcgaggctattttactggaatgtccggactcctccaagcctgacggcgtattcaccgccctgatcgacggcggcagcgctgaggacagcgaattcgcggatcgctcctccggtcgggtccgcattgaggaatatctgaaaaaacgggggatccgccgtctggatctggccgtcagcacccacatccatgaggatcatctctgcggtctcctgtgggcagcccggatcgcacccccggcggtgctgtggcaaacgctgccgccggatctttaccgatccctccggcctctggacggctccgtggcgagaaacctctctgaaagcaaattcatgcaggccctgaatgactacggcaccctctgcgctctggtagaggaccacggcggaaccattcttgcgccgaaaagtggtcaggaattggtgattgcgccagatttgaccgttcagatcctgtcaccctctacaaaaaaacagttggcccttgcggacgaaataaatgcgttgtataatagtgcaaacgtttgcagtacgttcctccaacggttggacgcgctggatgcccgcatgaacaactacagtctcattctgcggctgaattaccggggtacccggattttgctgccgggggacaccaatgtgacgggctatgacggcattgatcccgcggacctgcgggcggacctgttcaaagtgggacaccacggacaaaaagacggcgccgacgaagcgctggccgaattgatccgtcccaccgcagtggtctgctgcgcgtccagcgaccgccgctacaacagcgcccatccggacaccatgaagctgctggcagatcatggggcagccctgtatttttccgactgtcccccggtccccggtatgcagatcccgccccatgaggctctgcggtttaccgtcggccccaacggcgccttggacgtccggtatcttccggcatccgaaaacgaataggaggaacacaccatggcagaagtcattttaaagaatatcaagaagatctatccccatcaggagcctaagaaaaagaagaagggcgagccggagaaaaagaccaacctccagatcacggaggagggcgttctggccgttgataacttcaacctgcacattcaggacaaggaattcatcgtgctggttggaccatccggctgcggcaagtccaccaccctgcggatggtggccggtctggaggagatctccggcggcgagct

SEQ ID NO: 12306 - DNA, 126 bp, Unknown
  gut microbiota DNA sequence
caacttcaatctgcacattcaggacaaggaattcatcgtactggtaggcccctccggctgcggcaagtccaccaccctgcggatggtggccggtctggaggagatctccggcggcgagctgtacat

SEQ ID NO: 12307 - DNA, 260 bp, Unknown
  gut microbiota DNA sequence
attgataaatattacggcaaaaaccacgttctgaaggatctgaacctcaccatcgaggacggcgactttatgaccctgctgggaccctccggctgcggcaagaccaccaccctccgcgtggtctccggtctggaaaagccccagaacggcattatcctgatggacggcaaggagatcgtcaacgcggcggaagcttctttcgccccgcccagcaagcgcaacctgaatctggtgtttcagtcctacgcgctgtggcccca

SEQ ID NO: 12308 - DNA, 1215 bp, Unknown
  gut microbiota DNA sequence
cgtcgatccagacacgtccaagcacagcacgatatcgcggctgctcgcacgctcctctccctcatccacggtgctggggcgtgccaccagcgctatcgccagcaccagtgccatcaccaacagaacgacggcggcacgtgacatggtgcgccactgccgaaataatctcgatgcggtttcggtgttgagatcgtcatccaaactgaacgtccgcacggatcctgagtcgttatgcctgcgttttgcggacaccaataccatgatggcgatgacggccaatgacgcaatcaggcctgcaaggcctacccacggccagtgccatgacaattccattcatcgccacctttccacaagattggcaacccactctccagcctgttcaaccgtggcctctctggccgtgtgattgcgttcggcatccgcgaattccggcggatacaatgcctcgatggtctgcctgagcagggtgagcccatgctggttgccggtcgtgcgaggtgtcgcttcaatatcggtgagcgtctgattgcgcacgtcgctgccggtggcagtggagacgaaatctctggcgatcgatgcgagcagggcgaacgcttcctctcttccgagatcgccgttggcatgacggtccaccacatcgttgatgcgttcatgccatatcgacgtgcccgtcgatgcgtcgtgacgtccgcgattggttttcttcgttggcttgagagttggtttcgacagccataccaccaagacgacaagtgccacggcaaggatgaggcataccgcgacaacggtgcccagccccgtttcgatatgaatcgggtccagtgtgtcgaaatcgttgcgagacaaggcgatgtgattcatgctttgcctcccaaggtgagtgaggacggtgctttgagctgattgcgtgtggagcgagatagggatgcggataccatccgtacgaattcccggaacatacgttcgcttgaatcggcacggatcactgtggaaccgcaacgattcagctcatgtctgatggacgcggacagatattcgcgatgcgtgcgaacctcctgcgccgttttgccggtgcgcaggaatgccggaatgcggcggtcgctgcccgcgtcgaatacgtcgcgcgcatggctattgtcgaacggattaatggttgcgacatcgatgagcaccatcggatgggtccttgcgatcctgcggatggactccacatga

SEQ ID NO: 12309 - DNA, 468 bp, Unknown
  gut microbiota DNA sequence
accaccaacgcatccctgtcgcgaatgcgacgggcgtactccagcaaagcgtcgatattgcgaggtttgttccaatcacgctgcagcgcattgtccaacgtctgttcgaattgcgtaagtccgccattgaatggcacacgggtgatcgagcctgaatcgccgaatactatggacacttcgtcaccacgacgcaggctgagcgccgcgaacatgcatagggcgttggctgcgacctgatgaacctgttcgccggaaacgcaggtaccggtcatttcctgtccgacatcgagcaaaagccaggcgcgtgaagtggatgggcgttcgcgctgcaccaccatggggcggcccacacgggcgctggtcttccaatcaatccgttttgcctcgtctccaggctcatagatgcggatatccatgacatcgtcggcgccgaaacgcttgtctgatgcgtgcgcaccctcaagaata

SEQ ID NO: 12310 - DNA, 952 bp, Unknown
  gut microbiota DNA sequence
gcttcgatcttactgcggatcggatcttcggaacgaattgcgtcgatcatggaacgggaaccgcctgaacgatcgagtccacgacctgatcgctggtgacgccgtcggcaagggcctcgaacgtgagcaggatgcggtggcgaagcacttcatgtgtgaaggctttgacgtcttccggaatcacatagtcgcggccttgcatcaacgcgttggcctgtccgatgcgagtcagcgcgatggacgcgcgtggcgaggctccgagacgcactagtgtggacaatccctgcaccggcttggtgccggctcctcgggatgtggcagtgatatcgaccgcgtatttcatgattgcgtcggacacatgcacgcgacgggccgcggcgcgcaggaattcgacatcgctgatggacacgacgtcaccggtgagcgttcgtgaatcaaaagtgtcggagccgcggtgggtgagcatggtgagcatgcgctgttcctcctgcgcggtcggatacgtcatgacggctttcaccatgaaacggtccatttgcgcctcaggaaggttgaacgtgccttcctcctcgattggattctgtgtagcgatgaccatgaacggtttcggcagtgcgatgcactggccgccgatggtggtggctccttcggccatggcttcaagcatggccgattgggtttttgcgtttgaacggttgatttcgtcgagcagcacgaagttggcgtggatcgggccgatctgcgtggagaacttctgcgtcgcgaaatcgaagacctgggtgcccaccagatcggatggcatcagatcaggcgtgcattgcactcgcttgaacgatccggacacggaagtcgccagcgtctgcgcggccgtggtcttggccagacccggtacggattcgatgagaatatgtccgcctgccaccagcgtggtgatcagcgattcacgcaggtt

SEQ ID NO: 12311 - DNA, 196 bp, Unknown
  gut microbiota DNA sequence
aggtaggggataaacaccagctgctccaccagcttgccgtggagcttgccgcggcccttggcgcagatgtaaccgagcatctgaccgaagatggtgccgaacacgccgttgacaagggtcagcttcaaggagttcaccagagacatcataaaggtttcattcttgaagatgccggagacgccctccatgatgttgg

SEQ ID NO: 12312 - DNA, 12062 bp, Unknown
  gut microbiota DNA sequence
tgaatgtcctgtttcttttctttatggtgcttttggaagtgaaatgacagtcttggcagctcacgcttactgagcgatcttgctttccgcgccgccgactaccattttggtcagggcgaacagggcgatgacgttgggaatgaccatgaggttgttgaacatatccgtcagctcccacaccagatcgttgctcatcatggtgcccatcaggatgaacaccagagcgatgagggtgtagaccacagtgcaggccttgggattcttcttgccgaaaagccagatggcgttgatcttaccgaacaggttccagctcaaaaccgtggagaaagcgaagaagaacaggcagatagccacgaatttggcaccgaggctggctcccatcaccgagccgaaagcggtctgggccagattggtcttgctgagcacggaggtcacatcccccacatagccgtttgccagagggccatcggcggtgtagagggtgcagatgatgaccagtgcgttgagggtcagcaccacgaaggtgtcgatgaacacaccgatcatcgccacaacgccctgctcgtgaggatccttcacgttggcttgagcgtgggcatggggggtagagcccataccggcctcgttggagaacagaccacgcttggcgccctgagagacggcctgcttgatggcgtagccgaaagaaccgcccacgatggcctgaggctcaaaggcgtacttgaagatcatgccgaaggtggcggggacgtaccggatgcggaagatcaggatgaccagaccgcccagcaggaagattgccgccataatggggacgattttttccgtaacagcggccagccgctgaacgccgcccaggaaaatcacagcacagatcaccaccagcaccacgcccacgatccaggaggggatgccgaaagcggtctggaagcactcaccgatggagttggactgcaccatgcagcccatgaagcccagagccagaatgatggccacggcgaagaaggtggccaggaacttgccgaagccgcccttgaaagcggtggtgatgtaatagacggggccgccgtggatggtgccgtctgctaccttgatccgggtcttgatggccagcgtagcttcagcatagatggtggccatgccgaagaaagcgatgacccacatccagaagatggcgccggggccgccggtcagaatagcgccggatgcgcccacgatgttgccggtgcctacctgagcggcaatggcagtggccaaggcttggaaggagctcatgccgctgtcatgctttttgccgttgagggtcagattgccgaacactctgcgcataccctcaccgaagcagcggacctgaacaaagcgggtcttgatgctgtaccacaggccgacagccaccagcagaaagaccagaatgtagttggacaggtacgtgttgacgcggcatacagcgggataaagcgcagcgtccagttttgcgacgatcgattccatagttttttcctcctacacacggtttcaccgacggcgggatctttgccgcggtgataaaaaaacggagcggctggcaatgcagccgctccgaagaacgcagtacaggagatcgacgcagccccgccgcaaacggtgaagcctgcggcctgcctgacggatctctccgtctcgcctgccgctgcgtcagatcactctgtccttttacctgagagattcagcggtcatgccgcctttcaccttcggtacccggtgagccgggattctccagagccgcatccacccatagtcctgtccgcacggcggacacctgagagttttactccttcggtagacttacgtcgttttcctatgggcttccattgccggtattccgttgttgaagatagccgtatcctatcatatgcgccgcggaatgtcaactgtccgcgcgtgacggaatatctgaaatatttaaggttttccaaagaaatttgtgcatacgggagaaaaaacggcccctcttttcggaaggaccgcttttcggtatgcggttgatcagaaatctgcgctgcccacagtgcggggatgcagctccacgtcacggatgttgttcacaccggtgagatacatcaccatccgctcgaagcccaggccatagcctgcgtgacggcaggagccgtagcgccgcaggtcgcagtaatacttgtaatcctccggattcatgcccagctccttgatgcgggcttccagcacatccagacgctcctcgcgctggctaccgccgatgatctcgccaatgccaggcaccaggcagtccgccgcggccacggtcttgccgtcatcgttcaggcgcatatagaaagccttaatgtccttgggatagtcggtgacgaatacgggccgcttgaagatgtgctccgtcaggtagcgctcatgctcggtctgcaggtcgataccccactccacgggatagtcgaacttctcgccgctctttttcagcaggtccaccgcttccgtgtagctcacccggccgaagtcggaggaggccacatgctccagacgctcccgcaggcccttatccacgaactggttgaagaagtccatctcctgagggcactgctccatcacatagcggatgatatacttgatcatgtcctcggcggtatccatatagccgttcagatcggtgaaggccatctccggctccaccatccagaactcagcggcgtggcgctgggtgttggaattctccgcacggaaggtagggccaaaggtgtagacattgccgaaggccatggcgaagttctcggcgttcagctgaccggacaccgtcaggctggtcttcttgccgaagaagtcctggctgtagtccacctgcccgtcctcggtcttgggcacgttgttgagatccagcgtggtcacctggaacatctcgccggcgccctcgcagtcgctggcggtgataatgggggtctgtgcgtagacaaagccgcgatcctggaagaacttgtggatggcgtaggccgccgcgctccgcacccggaaggtggcggagaacaggtttgtccggggacgcaggtgctggatagtccgcaggaactctacgctgtggcgctttttctgcaggggatagtccggagtggagatgccctccacggcgatctcggtggccttcaactccagaggctgcttggcatccggtgtcagggtcacaacgccggtgacgatcagggccgcgcctacgttctgggcggcgatgtccttatagttagagagggcctctgcctccatcaccacctgaagattgcggaagcaggagccgtcattcagctcgatgaagccgaagcccttcagatcccggatggtgcggacccagccgcccacggaaacggtctggccggagagcgcttcgctgtctgcaaaaattttcgcgatttttgtgtaactcatagtttgatccgtcctttgtgttgttggtacaattataagcataatactcctatttttcgttctttacaagagggaaccgccattcttccagcagaatcagggattttacggcgaaaacataaattcctcttgaattttggccattcatccgatataatgaacaacgttaatgccggtgtgatggaattggtagacgtgacggactcaaaatccgttggtagcgataccgtgtgggttcgagtcccaccaccggcaccaaatagaaacaccatccgtcagggtggtgttccttttttgctatgcaaaagtgtagcaaaataagaaatgtgccacttcctcgcccctgcggggcaaccggaaatggtgcacgaaaacttcatgcacatttcgtttgcggtatgcgctgtccgtatgcggcagatcttatgggaaaacaggaggaaaccgcagcggtcaaggtggcccatggaattctgtatagatatttttcgccaatatgtgcatagtataaggacgtatgatgcgctctgttctgcaccgcagaatggacgaacacaggaaaggtaacgtaatttatgaatcggaaaaaccatctgctggcgatccttgcggctgtcagcttcatccttgccacccttaccggctgcggcggaaaaacagagccggacgtcccgcagccaacgccggaacctgtcgaatacgccaatctgacggacgaggattcccgtgctctgctctcccggctgcttgagaacgcgggcatagacgagacccggatccgtggcctttttgaccgggtggaccggttcaacgccagcgtcaagagcgaatggctgacgaacggctttgagcgcaccgcccctgccgataccaagtacgatccctatgagatgcaggatctgtgggcggagaaaaacggtgacttccccggctataactgccgcattacggcattcagcctgttcggtgagttcgtcaccgtcggagcggatcagccgaagactcagggagaggatacgctttttctggatttggaaacgctgaccgaagatcccgccgttctctgcggagacagcactgccaaattctgcgcgctgtttgcgccggtgcccgccgcagacagtacggatgtggacgagcaggcccagacgcttcaggcgggctgggccgcccggggcgtcgcattctcggacagccccgctcggctgatctccgttgttctgcatgacaggttctcggacacggagaatacgctgtttgtggggcatgttggggtgctgctgcctgtggaggacgggagcttctgtctgatcgagaaggttgccttccaggaaccgtaccggctggtaaagttacaaaatcgggcggaactgcacgattatctgatggcaaagtacgatacctcctggggacaggataccacccggcccttcatcatggaaaatgacagcctgatggcggagtgagcggcggcacgggactgcggataccgtatcagcaatcatacagtaaaaataattggtttccttgaaaaaccggcagacgtgcggagcgtctgccggtttttgtgtgcagaacgttgcaccggggcacatgtttctgttgatggccgcatagattggacaagcaaaggaggaatcgctatgcagctttggaaaaatacggctttgacctcggtggcggcgctgctggggctgtttctgctgcccttggccgtagcccgggaaccggcggaggtgccggaacatacggaattaccccggacggagcagacggctccggtccagcctgcggcaaaggccgtttacgacgcagaccggaccctgcgggtgctggacggagagactgtgcgggaaatgacgctggcggactatctggtgggcgtcacggcggcggagatgccggcgtcctttgcagaggaggcgctgaaggcgcaggcggtggcagcccgtacctataccctttacaagctgacagccggcagcagccacggggacacggcggacatctgcacggactccacctgctgtcaggcgtatatcgccatggaccaagcccgggccaactggggggcacaggcggacgtttacgagaaaaaggtccgtgatgcggtgacatctaccgatggggaggctatcctctatggcggcattccgattctggcggtgttccattccagctccgcagggctgacccgagctgcgggacaggtgtggcagaacgatctgccctacctgaaaccagtggattcccacgaagccaaggagaccatccccaattattacagccgcgtagactttaccccggcggcgctgaaggaaaagctgctggcgaagatcccctctgccgatctctccggggacaagaaaagctggctgaaagatcctatccgggacagcgccggcagcgtggagacggtggaggtggggggcgtgacggtccggggcggtacggtgcgcgccgcactggggctgcgctccgcctgctttgaatgggaattgcaggacggcaattttgtgttttacgtcaccggctacggccacggcgtgggcctcagtcaatacggcgcggacgccatggcggagagcggcgcggactatcagactatcctgacccactactataccggcgtgacggtggaggtcttcaacggctgagtcacggactttacaagacagaagcaaatgtggtaaaatattttattaaaaactgccgcgaagggggaactgctgatgaaaaagcgatgggccatgggtctgctgtgctgcttgttgctgtttcaattggcttttccggccaaagcggcgggcagtgtgtatttcgtggcggcagaggaaagcgttctgccggtgacagatgccaccatgcccttctgggccaacggctatctgtatgtaccggcctctgtattcaccaatctggggatctctgtcatcaacaataccgcaaaaaagatgacggtgctggaaaaggaccgccgggccatgctgtttgactgggccaagggtacggcgcaggacagcagcggcagtctgttcacccccggcgtcattcagtccggcggactggtgtttgtcccggcgtctaccgtcgcaaactttttcggcctgcaatattccgtgacagatgtgaccaacggctatctggtgtggctgcggtctccggatttcggcatgagcgccaaggattttgccaatgcggcgacctacaatatggaagagcgctacaacgcgtataacagggatgccacgtccagtaccacgcccaatgtaccggttacaccctccgcaccgacgcggggggccagaatccatctgtgtctggaagcggatcagcggacctccgggctgctggacgctttggaccgggccaacggctgggccaccttctactgtacgccggacttcctggaatccaacggcgaactgctgcggcggatggctgcctccggtcatgcggtgggcatactggcggagagcggcgaggacacggcggagcagctgcggcggggcaatgaagccctgtaccgggccactctgggaaagtcccggctggcctatgtgccggatgcggagaagacggagctgcaagccttggaggaggtcggctggcggtgcctgacgccctcaatggaccggtcggattacaagctggaaagcagctccaacgcctccgcgctgatgaagcgggtgtcggcccggcggggggatgtgtctgtctggctggggaccactgcctctgccgcgggcctgcgggaatttgtgatctccgctcagggagcgggccactactgccgggcgatgacggaaatcggctgaccggcggctgaaatggcgcaagatttacaaaacgttcaacaccctgacgaagtttagggtaatataaagtagagaagaacataagaaacgggaccggaaggccctgcagaacggaggagaccctatgggacgcaacattctggttgtagaagacgataagaatatctccgacctgatccacatgtatctggtaaaggaaggctttgacgtccgcattgccggggacggcggcaaagcactggaggagttccagaagaaggagccggacctgatcctgctggacatcatgctgcctgtgatggatggctgggcggtctgcgccaagatccgggagaccagcaaggtgcccatcatcatgctgacggccaagagcgaggtctttgaccggatccagggccttgaaatgggcgcggatgattacatcgtcaagccctttgagatgaaggagctgatcgcccggatcaatgccgttctgcggcggacggagatccccaacgacaccagcaagaaactccatttcgacaagctgaccattgatctggattcctatgaactgatcgtggacggcaagaagatcgacacgccccccaaggagctggaactgctgtaccatctggcctccacccccaaccgggtctacacccgcaaccagcttttggacgaggtgtggggcttcgactattttggcgacagccgcaccgtggacgtgcatatcaagcgcctgcgagaaaaggtagagggcgtcagcgaccagtgggcgctgaaaaccgtctggggcgtgggctataagttcgagaccgtcggcggccagacggcagacaaggcgaagtaatatgaaggattggttccgcgagcggtttcacgggctctattggcggcagatggccgtcaccgtgggcatggtgttcctgacgctggtgctgttgggcgtgtcctttttttccctgagctattcctatgcccgggggcagaaaaccgatgagctgatggtccgggcgatggcggtgagcaagctgtccgtgcggtatctggagaccggccgctatctctctatggaggaattgcagaaggacgagcagttccgtcagctggcggccactgccgccgtgatctccgaaatggatattctggtgtgcgatatggatggccatgtcctcctgtccacggatgccactatggagggccggcccgtcaccattccgtcatcggtgatggacaaggtctccgcagacggcacctgggccgggcggagccgtctggaccagatttattccagcaagcagtttgtgggcggcgtgtccgtggtgaacccgaccaccggggaggtcctgggggcggtgttcaccgtctgcgcctcggattccgttgataatctgtggcgggccttcgcgggactgctgatgatgacgggcttcgtggtgctgatgatctcctttatggcgtcctccatcaccaccatgcggcagatcaagcccatccgggagatggccgccgccacccggcagtatgccgacggtgattttgacgttcgcatgaatgactacggccgggaggacgagatcggcgagctggcggcttcctttaataatatggcagagtccttgcagcagacggagcgtcagcgccgggagttcatcgccaacatctcccacgagctgaaaacccctatgaccaccatcgccgggtatacggacggcattttggacggtaccatcccgcctgagaatgaaaagcagtatctgcggatcatcgccaacgagagccgccgtctcagccgcctggtgcggcggatgctggacgtcagccagctgcaggccatcgatcccctgcgcaacggcaatcatttcgacgtgtgcgagtctatgcgccgggtgctgatctccatggagaagaagatcaatgaccggcatctggatgtggaagcggatattcccgatgagccaattttggtgctgggcgacaacgatatgatcacccaggttatttacaatctgctggaaaacgctgccaaattcgcgcgggaaggctccaccctctacctgggtgtggccatgatggacggcaaggcccggatcactgtccggaacgtgggcgagaccatcccggcggaggagctgccgctgctgtttgagcggttccacaaaagcgacaagtcccgcagcgaggataaggacggctatggcttgggcctgtatatcgtcaagaccattttgcagcagcacaaggaagaaatcaatgtcaccagcgagaacggcgtgaccaccttcacgttttctctgcgggtggagtaaagaggtactatgagcgagcgcaggaccctgcagacgcggggagaagtcatcgaggaatacagcagagatttccccgcggagatcgtggagacctattcccggcctttgccgggggccgtggagcctgtacccacagagccaacgcccagatctcggaggaaaaagcgccgggtgtggaaggggctgttgatccttctggccatagcggcggtaatcgctctgctggcggcgggggtgcaatggctgatatgggaactgcaaatgcccgatgactggggcgaggatgattattactactacgaccaggatcaggaggatgaggatgcccccattaccattcccactgtggaaccggatgcagacgcccgtctggatctggcgaaggaccgcagtcatgcgctttcggctcaggaggtttaccggaaggtaagcggcgccgtggtcacggtggcggtggacctggacggcggccggatgtctgtgggtaccggcgtgatcttccgggaggatggctatatcctcaccaaccaccatgtagtggccgggggcaagacctgcacggtgctgctgcccggaggacggccctatgcggcgaagtatatcgccagcgacgccgggtacgatctggcggtgctgaagatcaatgcggaggaggctcttccctttgcggaattcggaaattccaacgctttgtccgtaggcgaccctgtgtacgccatcggtacgcccctggacattgagatgggcggcaccttcacggatggtatcgtttcctccgtcaaccgggagatccagcttaccagccggacctccatgccgctgatccagaccaatgcggcgctgaacaacggcaactccggcggcccgctcatcgacagttacgggcaggtagtgggtatcaactttatgaagctgtatgcccgatattccacggtggagggtcttggctttgccattccctccgtgcaggcggagcgggtggtcaatgatctgctgatctacggcgagcctcagccggagccgctgctgggcgtttccgttctgcaagtgccggaccagctggcggagcacctgtggggcattcaggtgaaggaggtcacggcgggcggcgcggcggaccgagccggcgtccgggccggggattatcttctggcggcggacggcaaggagaccctcagcagtgcggatctgctgcgggcccggtggcagcatcatgtgggcgacgagatgacgttgaccctctggcgccgcggcgagatcctgacggtgacgctggaactgactgaggccgtggaaaagtgatcccctctaaatgaaacgaatgacccccggcggctgtactcagccgccgggggttttatgatccttttgggggaaaatcagcgaaagaccagagagcagcaggtagataccgaaggggcggcgcagcaggtccacatccaccgctgtggcgatccatgcccctgcaagtgccgccgggacagccacggggacggcggccttccatgtgggcacatccagatatccctcccgccagtggcacagcagggcggaaatggctgtgggcaggaagaacagcagattgatgccctgggccgttcgctggtccacgcctaaaaacagtgtcatcaccaacagcagcagcgttccgccgcccacgccccacgcggagatcaccgcggcccccagcccgcagagaaaggggagcagccagtccgtcacagcagatacctcacccccgcgtaaaagagaaaggcggcgaagatccacttcaaaactttggtggacactctgccgtagaactttccgcccagccagccccccagcagcccacccgccagatagggcagggcggaggcccaattcatcccgccccgccagaggtacatggcggcggacacggcgcacaccgggaaaatgaccgccacacaggtggcatagagctaccgggacttcagattgccccaacgggagagaatggggagaaataccataccgccgcccccaccgaacagaccgttggcaagaccagctgcaccgccggcgatccgggcgggccattttgaagccatcacgccaccttcctttctcgtatgtacggcctccgccggtgggtcaaaggatttttggcccggcggcggaggggagggagccgttatttcagttcaaagctctggcagtcggtgcacttgatctcggtggggttagcctcgtgagtgccgacccgaatggaggtcaggccgcagtaattggagtcctggcagtggtgcgcgcagttgttgacggtgcagctgatgctctgattgggggtgcactggcagccgccgttggtgcagtccttcatgattcgttcctcctgcatgagaaaaattttggcttacgccgtcaggtagtatgtccccggtcttgagctttatgcggctgcgaacataaaaaaaacaggcgttcccaaagggaacgcctgcgaggctgtcgataaagtgataaattttccgcgacggtaaggaagggtgtgcgcgggaaacccaagaag

SEQ ID NO: 12313 - DNA, 33276 bp, Unknown
  gut microbiota DNA sequence
tgcggaggatttaccactttattgacagtctcactatgttttagcaattttttccgtatgaaagcaagaggcagctatgttcaagcgactgaaagagaccatattggagatcatccagcaggcggacctgatcctgctggggctttgctgcgccgcgtcggtgttcggcatcgccatgatttacagcgccacccggtacaacaacgataaccggaagatcatcgtacagacggcggcgctgctcatcggcatcgtggtgtatttcggcatttccatgatcgacctggaaatgctcattaagcggtggaagtggatcgcggcgttcgatgtgctgtttatcctgctgctgaaaacgcccttcggcgtcagcgacgataccggcaataccgcatggctgaaattcccctttctgccggtgagcatcggcccggcggaggtggtgaagatcaccttcatcatcctgctggcctggcagctccaatggctccgggaggaaaaacgggatctgaggtccttttccgccgccttctatgtgggcggtcatacgctggggatagcgggactgtactttgttatttccggcgatatgggcaacgcgctgatgttcctgctgatcttcgtggtgatgtccttcgtggcgggctttgccctgcggtggttcgccctgcttttcggcgcgtcgggggccgtcatcgggggcatcatagcctttgatctggtaccggattccaaaaagtatatgctcaaccgctttatcgttctgtttgaccatagctacgatgtccagcatacaggctggcagcagacccgaagcctgctgaccatcggcggcggaggcttctggggacagggatatctccatggaacacagtctcaggcgggggtcggctccgttccggcccggcacacggacttgattttcgccgtcattggggaggaactggggtttgtgggagccacgctgtcgatcttgctgctggtggccatcatcatccgggtactggtggtgggacgccgggctacccaaccgttccacacctacgtctgcgtggggatcgcctccatggtgatgtttcaaatgatcatcaacatcggcatgtgcctgttcatcatgccggtgatcggcctgacactgccgtttttcagctacggcggctcgtcggtggtgacactgttcgccgccatgggcttcgtctccggcatcaagaagcggacggtggtccgccgccgtccgggacggcccttaggctccaacgcggtatattgacttctaaggcaacaccaagcaatgaaaaccggggcgcgtagcgctccggttttttccatcgggcccgttcacatatttttccggctcttcgacaacactacctctgtatcaatacggtatatccgaactgacaggaggtttttatcatgaatatccgcatgaaacgcggcatggccttggtcctgatggcatcgctgttgttggcaggcagcgcgcaggcgttattcggcctcggaaagagcaagccggaggcagtctctcctgaaaacggccccacggcccgggacctggagatccgcacctaccggggcatcccatatcttgggcagttggaggctgcggaccctgacggcggggagctgacctttgccatcgtcacccagcccaagaaggggaccgtgacggtggagggcgccaatttcacctacacgcccaaggagaacgccgccggaggggacagcttcacctattccgccgccaacagcgccggggccgtgtccctgcccgccaccgtgaccgtgaccatcgaaaagacccgctccggcgttacctacgcggacaccggcgaggccaccgccaccgccgcgcaggatttagcggagcggggcgtgttcaccggggcgaagatcggagataagtggtatttcgagccggaccggaccgtcagccgtggagaatttctggccatggtgctggagaccgccggcgcagaggtgacggacgtcaccatgaccggcttccgggatgatgatgccatccccacttgggcgaaaagctatgccgccgccggcgtggcggagggcatcctacgtggaaagctcacagaggacggggcggtattctcctgcgaggagcctatctccttcagcgaagccgccacggtgctgaaccgggtgctggatctggggaacgtggagttagaggtctggttcgcggatcgggaggcggcgccctcctgggcggcgcaggccgtggggaacatggaagcactgaatgtcctcaacgtgggcagtttcggaagtgaccgcctggaaacggcagtgacccgtgccgacgcggcccggatgctctcagcggcgggaaccctgctgagaggggagaaggataccggcctgctgggtctgctgaaaaagtcctgaccccgcaagaggcgaacgcacccacaaaacgatgcaagcagcctgcccattcggacaggctgcttgcgtgaggctgtcgataaagtgataaattttccgcgacggtaaggaagggtgtgcgcgggaaacccaagaagggtgtcccgcgccattaaaatcctaagttttcagaacttttatgaagttctgaaaacttgctcagcggggagaaaagactttttcgacacgctgacaggcgttcccagagggaacgcctgtcaaatattggctcatttttccaagagcttccgcagggagtcaaaggcttcacccagttccgccttagccttggcggaggggttggcccggaggacccgcaaagcggtttcatagcgctggatggagcgggtgcggacctgcgcttctctctggcggacggcagcgatgagggcgtccagctcctcccgatgcttggcaagctcctgctcgccgggttcgtcgatgccatcgtccagcgcggcgcgggtcttttccaaagcctgggcgatattggccaggatttccagcttggattccacccggcggcggaaggcgttttccagagccgcccggcggcgctgcttccggacctgcttggcggtgcggtgggcttccagttcgtcagccagataggactgcagcaggtatctgtccagagaggtcttttcccggaaagcctgcagttcctcggcagtgcgggcctgggcggcctcggcctttttggccagccgccgcagctctgcgttttcctcggtaagcttggtaaggacctcccgcaggtcgatggcggccttggtggactttaccgtatccatgatgaacagcacggcgatcactgcggccagaggattcaccagcagggccgggagcttatggagcagcttgtcgatggggggatggatgacatagatcagcagatcggagaaaaagccccaggcgatcgaactggtcaggcagatgtagccgtggaggttaaagggctgcttggtgtaatcccagtagcggaccttgaaaagctgctccattacggcgcctaccacatattccagcgccgtagcggccagcatacccagaaaatagaccagccagaagttgtccgccaccggcagggtggcaaacagaatgatgatggccccggagccatagatcggcagcagcggcccatggagaaagccccggttcacccaatgacgctgcttggcggagacataacaggattcccagacccagccgcagaagcaatagaagaagaacagcagggcccactgccccggcgtgtaaacgtacatagaaaatcatcctttcataggatcggcagtgccgtttggctgcgggtcagtccagattgacccggaaatcgccccgggccgccgcgtctgcccggcgctgcttttccgccgcctgagcatccagcagtccaccgatgatctggttggacaccaggaagcccttaggcgtcagatgccagcggccatcctcctccacggcgtagcccgccgcctcacacttttgcagaaacggcaggaaaatgggatcgaaccggcggcggaagcggttctcatactccttggggtccaggccgtacaccgtccggctccccagcatcacccactccacgtcccggtctctgggagggatgacggtgttttcggaaaagcggaactgtccgccgtgtgcggcggcgatgtaggcgtccaagtctttttcgtaggcataccggacgccgccgaaatcgctgtgggcgccggggccgaagccggcgtattcctgaagcttccaatatttcaggttatgccgggattcccggcccggcttggcgaagttggaaatttcgtactgctcatagccgtactgcttcaaaaattccacggtttgcaggtacatatccgcctgttcctcgtctcccggcagaccggcggtgtccttcatggcaaagagaggcgtcccttcctctaccttcaggccgtagcagctcagatgctccgggttcagagctacggcagcggcgagattttccatccatcgctcctgcgtctggtggggcagaccataaatgaggtccagcgacagattttgaatcttggctttccgggcagcctccaccgcctgttggacctgctccatggtgtggacccggccgatggttcgcagttcctcgtcgcaggcggactgcatccccaaggagatccggttgaagccgcagcgccgcagggcgcggagagctttccaatccccggcggagtccgggttggcctccagagtgatctccgcgtcgcgggccacttgataacgcttttcaatgacctttaaaattttgcacaggcgcttttctcctaaatagctgggagtgccgccgccgaagtatacggtatccactgtgtgagacgcggccagcggcgcggcttctgtcaaatgggcgcagagggcgtcggtataggcgtccatgcggtcctcgccatggggcagggagtagaagtcgcagtagacgcatttggccttgcagaaggggatgtggatgtacagccccagcggccggacggttttcataaaaatgccctccttttggaatcatggtcaacagtttaccgcttttcagactgcattgcaagaaatttcacatacttttcgccggaatggggaaactatggaaaacttgtgaaaagaggtcgccctatggatatgacgccccgggaataccaacagtatgtgcagcggaaaatgaaaaagtcccccttggggaaggacgtgtgtctggcctttctcgtgggtggggccatctgcgctctgggacaggccgttctggacggctggatatctctgggcctgtccgaggaggacgcgggcacagccacctcctgcacactggtggccctgtcctcattgctgacgggactgaatctctacaacaagctggcccgcttcggcggcgcgggaacgctggtgcccattaccggcttttccaacgcagtgacctcaccggcactggatttcaagtccgagggattcgtcaccggtatggcggcgaagatgttcaccgtggccgggccggtcatcaccttcgggacactggcatcggcgatctacggcgtgatcctgatgctgttgaaatgatcggcggggggaaaattgcatatctgaaccgaactcctttgacgtggggatgtcttggcggatctgtgcgtcggattcacctttcctgaaaacggggaggtgacaactgcgaccgaccatgcagcctgcggccttgcattgaatttttgcagagctgaaccggtagatgtattgcgtggcatttttcaaattctacaaaaaattgttatttttttgtcatatcttataattgcaaaaaaaacggacacagattatactaacagtgttaatgagcgatattgtttcgcttttctttttacattgactcgtgcacgtgcacggaacggaaaaacatatacagcacgagtggagaccaacagagcaagtatggaacgcatcgccgctagagcctggcgtatcccggggcactggaatcgggtgctgccagctatgatcttgacgggcacggtgttggggggaacagcccacggcatccgttttcaaattaaaaatctgtatacttgttgatacgatatgccgcctgcggcggcgagagaggagcaagacatggaaaccattaccaacctgatcaaagacacaccgatccccaagatggtcaaggttcgccagaacttcgacaagacctgcatccctgagagcgatattcccggcatcatcacccgggagctggatcgccctgagatcggcggcaagatccagcccggtcagaagatcgccattacctgcggcagccgcggcatcaatcacaatgccgtgatggcccgtgccattgtggactttgtcaaatccaagggtgccgagccttacattgtggcggctatgggtagccacggcggcgctaccgccgagggccagctccagatcctcaaggactacggcgtcactgaggaagccatgggctgccctgtgaagagttccatggagacggtgcagatcggcatttccggcatgcgtcaccagccggtgttcatggacaagaacgcctctgaggcggacggcatcatcctcttcaaccgcatcaagccccatacctccttccgcggtccctatgaaagcggcctgatgaagatgatggccatcggccttggcaagcagaagggcgctgagagcatccatcatcagagtcctgccatcatgcatgagctggtggaggagtacggccggacgatcctggaaaacgcaccggttctgggcggcatcgccatcattgaaaatgcctatgatgatacctatctcatcaagggcctgagcccggaggagatcatcagcgaggaacccaagctcaaggagatctcctacaagaccatcgcccacctgctgtttgacaagtgcgacgtgctggtggtggataagatcggcaagaacatctccggcgacggcatggaccccaacgtgtccggccgctttgtccagcccaagtactgctccggcggtattcaggcggagaagtgcgtcatcctggacctgaccgacgagacccacggcaatgcacagggcatcggcctggcggaggtcaccacccgccgtctgttcaacaagatgaagctggagatgacctatcccaccggcgtgaccaacaccttcctgcatctgatgaagatccccatgatcatggacaatgaccgggaagctttacagctggccctgatgtgctgccccgaggcagaggatcatgaccacatgaagatgatccgcatccccaacaccgcccatatcggtgtcatcgagatttctgagggtatgctgcctttggtggagaacaaccccaactttgaggttctcacggagccctatgacctgccctttgacgaaaacggcaacctgttctgaaaaatccgagctgccggaggcctgccgtgaacaggcggaccgccggaaagctctggttttaaatagtagtgcaagaaacgcaaaaaaagaaaggaactgactctatggtatctcccgcaatgctgatcgtagcactggtgatcgcaatcgcaatcatcctgttctgcatcatcgtcctcaaactcaatgcttccatcggcatggttctggctagcctgttcatgggtgtggccggcggcctcgacctgatgactacaatggacaccatctcctccggcttcggcagcatgatgaccagcatcggcctgcctgtcggcttcggcaccatcctgggccagctgatgagtgacagcggcgctgccgacatcatcgccgacaagctggtttccgctttccctgaaaagcgctccatctggggcctgagcctggccggcttcgtgctgtccatccctgtgttctttgatgttaccttcatcattctgattcccatcggcattaccattgccgccaagatcgatatgaagatgtgctatgtcaccggctgtctgaccatcggcgccaccaccgctcactgcgtggtgcctcccacgcccaaccccctggctgccgccgatatctttggctttgatctgggcatcatgatgatcgtcggtctggttgtcggttttatcaccgttctggtgtctgacttcatctatgttaagatccacaaccgcggcatttggaacgaggaaaaggacgtgaaccacagctccaacgttgtcaatgagctggtggctgcccgtgctgcccagaatgacgctaaggcccgcccctccttcggcatggcgctgctgcctgttgtgatccccgtggtgtgcatcctgttcggcactctgggcaccgctgtgtttgacgaggagcctctgatctgcagcttcctgggcaacaagctggttgccatgaccctgggtactctgggcgcttacctggtgagcctgccttacatcggccgcgagaatctggagaagtctgccggtgaggcactgaagagcgccggtgtggtgctgctgatcaccggtgcaggcggctctttctcctctgtcatcaccgctaccggcattggcaatgctatcgtgagcctgctgggcaccgatactacttctgtcatccccgctatgttcctggcctacttcattggcatgatcttccgtgtggcgcagggctccggcaccgtggccggcatgacctctatgggcatcatggcaaccatcgctcctgccatcggctgccatcccgtgtggatcgcgctggcctgtctgtccggcggcaactccatcggccatgtcaacgactccggcttctgggtggccaccaatatgtccggtctgaccgttaccggcggcctgaagacctacaccctgggctctttcatctcctctgtgtgcattttcgtgctggctttgatcggcgccctggtgattcccctgtaagcttactcatcttttataaaaggagtaattacccatgcgtaatgcaatgattatcgaccccaaggataatgtggcagtcgccattgagccgatcgccaagggtgaaacggcgacctacatctgcgagggcaaagaggtctctctccctgttctggaggacatcaccatttaccataagctggctacccgcgatatccgcaagggggagcctgtggtgaaatacggtgagcacatcggcatcgcctcctgcgatatcaaagccggtgaacacgtccatgttcacaatgtggaaggccaccgggaaaatctggaagcgaaagagtaaggagagtggaacaatgactttttacggttataagcgtcctgacggtcgcgtgggcgtgcgcaatcatgtgctgatcctgcctgccagtgtgtgcgcttccgatactacccgtatcattgcccagcaggtgaccggcgccgttacctttaacaatcagcagggctgttctcaggtggcccctgaccagcagcttaccatggacgtgatggcaggctatgccgccaatcccaacgtctacggcacggtggtcgtctctctcggctgcgagaactgccagatggatctggtggtcaaggccattaaggagcgcaccaacaagcccctcaagcaggtcatcatccaggaggccggcggtacgctgaaggctgtggacatggccgtgcgttacgccaaggaaatggtggctgaggcctccatgcttcagaaggaggaattccccatctccgaactgatcgtcggcacggagtgcggcggctccgaccccaccagcggtctggctgccaaccccgtcatcggcgagatgagcgaccgcatcgtggccgcaggcggcacctccatcctttccgagacaacggagttcatcggcgccgagcacattctggcccgccgcgccgccacgcctgaggtccatgaccgcatctttgagatcgttcaccgctatgaggccgctctgcggctggtgggtgaggaagtccgggagggcaacccctcccccggcaacaaggccggcggcatcaccaccctggaggagaagtccctgggctgcatccacaagggcggccacagccctatcaatgccgtgtatgactacgccaagcaggtccagagcaagcagggcctgatcattatggatacgccgggcaatgacccctcctccgtggcagccatggtagccggcggcgcacaggtggtcgtgttctccagcggccgcggcacccccaccggcagccccatcgtcccggttatcaagattaccggcaataagctgacctttgccaagatggaggataacatcgatctggatgcatcccctctgatctacggtaccaagactctggatgagcttggcggcgagttattacagatggtggtggacactgcctgcggcaagcagaccaaggcggaagcgctgggctttaccgaaatggccatcgctcgtgtctgcaattacgtctgatctatcgttttcctctctataaagtacatcgctggctctgacgcggctttatgccgcgtcagagcttttttgtgcaaagagagaattggatagaccgtcccaatatttaagagcgaaaagaaagcggccacaagcaggcggcatatcatcagaacttcttccttgtataagccatgtaaaatttatgaacttttttcgttttaacaaggttacataacgatgtggaaaaagctgtggaaaatgtgaaaaaccctttgacaatggggaaaataccgggtgaccgactgttatgtaaaaagttacgcaacaacctttttgagtgaaatggcacttttcctgacaaaaaaacagggatcggcgggggatgcttgcagtcggggcggggatatgttataatcagttcagtatgaaaatggcagaatgttccctgataaacggggaaatgccctcttggaggaactatggtgactaaaaaacaggattatggcaatgacagcatctcgtctctgaagggcgcggaccgggtccggaagcggcccggtgtcatttttggctccgacggtctggacggctgcgagcacgcggtttttgagatcctctccaactccatcgacgaggcccgggagggccacggccgggtcatcactgtgacgcggtacaatgaccgctctattcaggtggaggatatgggccgcggctgccctgtggactggaacgaaaaggaacagcgctacaactgggagctggtgtactgcgagctgtacgccggcggcaagtatgataacctcaccggtgacaactatgaatactccctgggcctcaacggcctgggcgcctgcgccacccagtacgcctcccgctatatggacgtcaccgtctggcgggacggctttgagtacaagctccactttgagcggggcgagatcgtggggggcttggaaaagacgcccctgcccaagtctcaggtgagaaagaccggcacccgcacccgctggctgccggatctggatgtgtttaccgacattgccatcccggcggaatatttcacggatgtactgcgccgtcaagcggtggtgaatgaggggattactttcaagttccgggatcagcaggaggacggctctctgcctgaggaggatttcgtttacgagcacggcatccaggactatgtggcggagctggccggggagggcgcactgaccgccccgatgttctggcaggcggaaaagcggggccgggaccgggcggacaagccggagtacaaggtgaagctctctgccgcctgctgcttttccaacaaggtacaggtcatcgagcattaccacaactcctcctggctggagcatggcggcgcgccggaaaaggcaacaaaaagcgcttttgtctccgcagtagataagtacctgcgggatcaaaacaaatatcagaaaaatgaaagcaagatcacatggcaggatattgaggactgcctgatcttcgtttccaacaacttctccacccagaccagttacgagaaccagacgaaaaaatccatcaccaacaagttcgtgcaggaggccatgacggaattcctgcggacgaatctggagatctacttcatcgagaaccatttcgacgcagagaagatcgctgagcaggtgctggtgaacaagcgcagccgggaaagcgcggagaagcagcggctgaatatcaagaaaaagctctccggcaatatcgacatctccaaccgggtccagaaattcgtggactgccgctccaaggatgtggagaagcgggaaatttatatcgtggagggcgactccgccttgggcagcgtcaagctcagccgggacgcggagtaccagggcatcatgcccgtccggggcaagatcttaaactgcctgaaggcggactacgcccgcattttcaaaagcgagatcatcacggatctgatccgtgtgctgggctgcggcgtggagatccagaacaagcacgtgaaggacctggccgccttcgacctggggaacctccggtggaacaaggtggtcatctgcaccgatggcgacgtggacggcttccagatccggacgctgattttgaccatgctctaccgcctgacccccaccctgatccagcaggggtatgtgtatatcgcggaaacgccgcttttcgagatcaactgcggggataagacctggttcgcctattccgataaggagaaggcagacattgtcaagtctctggaggggaagaagtacaagatcgaccgctccaagggccttggtgaaaacgacccggacatgatgtggctcaccaccatgaacccggagacccggcggttgatccgggtcatgccggaggatgtggagcggacggcggaggtgttcgacctcctgctgggggataacctccagggccggaaggaccatatcgcggaaaacggagcaagatttttggatttagcagacatttcataatgtgccgctatgcggcacgggggaggacttgctcccgcaaggggacagttcctgccgggatgcggcgaaccgccgcagggatacaggcttcgcctgccggaatgcaccccgcattttctttttgagacatcaaaaagaaaaccctccagaggggcttctcttgccccctcggggcaattcaccttctgcgccgtgcacggtggaaaagaaaaatgtttgttccaaccttgcacatgagtgcaaggttggggaaacgtgttctgtgagaacttttatacaggtgaaggcgtgcatactaaatcacgggcggggtgcggtaaatctctaacccggtacgccgtgctgatggaacatcagatttcggggtgcaaataagacaccccctgcccctctttccgctgccgctgatacgcatttgtagaaccaggtagtgcgtagcgcagcggaacgcacgggatcagaaatacgccagtccggttttgcagcctgatgtgcggtgtgcctacaggtgcggggacgcaatgccggacggaacaggtttagcacagccggtaggagacttccggatttggtcggaagtccgtgacagccagccctcgtttcgggtgatttgaccgctttgccggtcaaatcatccctgacattttttcttttccaccgcgcacggcgcattttctttttgatgtttcaaaaagaaaatggggggtgcattccccacggcaaagccgtgccttcctgtgccgcaaagcggcacctcgttgcatccctgcggcggttcgccacgctcctttgtgaagcaaggaacatacaggggacatctgcacggcaaagccgtgttgctcagcgatttatctggcaaaaacaccacttttttgtggataaaataaggaacgtttattatgccgaaaaagaagcagccggaaggatcccggcatccagttagcaaccccaacgtcatgggcctccgggcggcggtggtggagcagcccatcaccgacacgctggagaccaactacatgccctatgccatgagcgtcatcgtctcccgggccattccggagatcgacggcttcaagccctctcaccgcaagctgctctacaccatgtataaaatggggctgctgacgggagcaaggacgaagtccgccaacatcgtgggccagaccatgcgcctaaacccccacggcgatgccgccatctacgatacgatggtgcgtctctccaagggctacggcgctttgctgacgccttttgtggactccaagggcaactttggtaagtcctattccagggatatgtcctgggccgccccccggtacacggaggcaaagctctccgccatctgcggcgagatcttcaaggacatcgacagtgacactgtggacttcgtggacaactatgacaacaccatgaaggagccggcgctgctgcccactaccttccccaatattctggtatccgccaacagcggcattgccgtgggtatggcctcccagttctgcggctttaacctgaaagaggtctgcgatactacggtggcctatttgaaaaacccggactgcgacctgacggagacgctgctggccccggattttcccaccggcggcgagctaatctttgacaccgatgccattcgggacatttacaatacgggccggggcagcgtccgggtgcgggccaagtaccgctatgtgaaggaccagaacctgctggaaatttacgagatcccctactccaccacagtggaggccattctggacaaggtggcggagctgatcaaggcgggcaaggcgaaggaaatctcggatatgcgggatgagaccgacctctccggcctgaagctggccatcgacctgaagcggggcgtggacccggacaagctgatggccaagctctacaagctgacaccgctggaggacgcctttgcctgcaacttcaacgtgctgatcgccggcagccccaaggtgctgggtatccggcagattctggaggaatggacggcatggcgcaccgacagtgtgaagcggcggatcttcttcgtgctgggcaagaagaaggaaaagctgcacctgctgaagggtctgaagcgcatcctgctggatattgacaaggctatccgcatcatccgggagacggaggaggaagccgaggtcatccccaacctgatgatcggtttcggcatcgaccaggtccaggcggagtacgtggcggagatcaagctgcggaacatcaacaaggaatatattctcaagcgcacccgggagacggacgccctgcgggatgagatcgacgatctggaggacctgttgaacagccccaagcgggtgaagaaggtcatcgtggaggagctgaacgccgccgccaagaaatacggcgagccccgccgcacctccatcgtctacccccacgagatcaccagctacaccccggaggaggaacagaaggaggagtatcccgtcactgtgttcctgtcccgtgaggggtatttcaagaaaatcacccccgcctctctgcggatgaacagcgagcagaagttcaaggagggagatgttctccgccagagctttgagacgacttccaacgctgaggccatgttcttcaccgaccactgccaggtctacaagacccggctgggcgagtttgatgacgccaaggccagcgtgctgggtgactacctgcccaccaagctgaaaatggatgcgggagaaaatgtgatcttcatggtgctgccgggggcggactacgccggaagcctgctgttcttctatgagaacggcaaggtggcccggatcgagatgaaggcgtatcagactgcctccaaccgccggaagctcaccggcgcctattccgacaagtcgcccctggcctgtatccgccgtctggatgaggactgtgagctggctgtgtattccaacgagccccgctgtctgatcttccacacggcgctgttggctcccaagaccacccgttccgctcagggcgtggcggtgatgacgttgaagcccaagtatcatctggaaacggtgctgttgtctgaggagacctccattaccaactggacccgctaccgggtgcgggccattcccgccaccggcgctttggtcaaagaagaggattccgaggatcagcagatcagcctgctgtgaggcattctttcttcatgtggcggctatccaccgtcgtgccatccaatttcggacaaaactgtccaaaattggggcattattgctcaccgttggctcagccgattgctgtacattttacgtccagcaatcgggagtctgcctcgaacccgcttcgctttttccgccactggcggcgcttcagcgggttcctcgaaacagcctcgctgtatctgcccccggcagcgcttcggctgtttcccgccggcgctttggtaagggaagaggattctgaggatcagcagatcagcctgctgtaaggccgtgttccgggcgaatagataaagatagggagaaatccatttgaaaaaacaactgagaagctatggcattataacagtgggttctgtgatcttcgcactgtccttcgactggttttttgctgctaacgccgtgggtatgggcggcattacgggactggcccaagtgctgaatgtcctgttcccggctctttccgtaggtatcggcacgatcctcctgaatgtcccgctgtttctggccggatggaagttcatcggctttcacctgctggcctcgtccctgttttccatgacggtcagctcactggcgatggacggcatcgcccttttgtatacattttccccgatggatcccatgctggcctccatctgcggcggcgctatgatgggtgcgggactgggcatcgtcttttctcagggggctaccaccggcggtacggacatcgtggcccgcctgctgaaactgaaatttccgtggcttcccatgggcaagctgatactgatcccggatggtgtggtactggcattgacggccatcgcctttcagcggttggaaacggctctctatggcgcggtggccctgtatgtgtccagcaaggttatggacacggtgctctacggcctgaatgcgtccaaggtggcctacatcatctcgaatcactggcagaagatctccgacgctattctggcctatgaccggggtgtgaccatcctcaatgccaccggcgcgtacagcggcagcgaaaagcacgttttgatggtggccttccgccagcgggagatcgtggagatcaaggagatcgtccatgaggcggacccggcggcgtttttgatcgtctgcgacgcccatgacgtgctgggcgagggcttcggcgagtatcagaaggaattataaggaggaagtttccatgacggattttacaacggtcaaaaaaaatctggaatccaagcggttccgcgtcagtacgtttgccacggcggaggaggccgcggactatctggatcgctccattgacggcgtatctgtgggcatcggcggctccgtcacggcggagcagatgggcctttacgaaaaattgtccgggcacaaccgggtgttctggcactggcgtccggagtcggcggaggacccccgcagagaggctatgacggcggatatgtatatcacctccgtcaacggcatggcggagaccggcgaactcatcaacatcgacggcaacggcaaccgggtggcgtcgtccctgtacggccacaagaaggtctggttcatcgtgggacggaacaagctggcccccacctacgaggaggccctttggcgggcgcggaacattgccgcaccgaagaatgcccagcggctgggccggaaaacgccctgcgccgttcatggagatcgctgctatgactgcaagagcccggagcggatctgccggggcctggtggtcctgtgggaggccgtagccaacatggagatggaagtggtcctcatcgatcaggatctgggctattaaacgatttaaaaaaggaggggcgcgaatgaaggtatatcgactggcggcggcgggactggcgctgggcctgctgacaggctgcgcctctcttctggagcgctcctataccacatcagagcctcacagcagcaagttctgggaaagtgaggccgccgctaccctgcgggcggaaaaccggcaggatatggtcaacgatctgctgattctcatcggtcagcacacagaaaccgcgtcgctgcggctgtataatttcccggacgaacaaactgcgttggaggaattggaaaaggcggcacaggaggttcagcaggagaccccgctgggagcctatgccgtggagtacatcacctatatcagccagccccagcggagctgctttgaggcggaccttcagatcggatatcgccgcacggcggagcagatgcagaccatcgtcagcgcctccagcgtcagtgcgcttggtgatctgctggaggcggcactggacggtggccggacggagctggtggtccgcatgggctattggcaggcagacagccgggagaaggtggcacaggaggttcagcaggtgcggcaggagcgggggacccgggaggaagcggtctggatcgtccgttactatccggaaaccgacccagtggggatcatcgaattcctactcaagcccacggaggaagaaattcaggcgtatcaagcagagcaggcggctgcggcgcagtcggatgctccgacggaatcggaggcatcttcaacagaacgggcgccgtgataggctctttgaaagacatcgaaaaaactattgaaaaaaatgctgaatatttagaataaatgcgagagaactcgaaaagagttttcccgcatttatttttttatctatttgcatggaaaaggaggaggcgagcggcttgggcaagagacatttgacgctgaaagaccgcgcagagctggaggcactttacaacaaggggcgcggcgttgaggagatcgccacgaagctgaacgtgcatcggtctaccgtatataacgaactgaaacggggagacaccggggaaatggacagcaacgggcgcatcggttacagtgcggagctggcacagcaggagatcatcaacaactacaggcggcgcagggcggcccgcgctgccgcagagtaagcggagggacaagccatgaggacggcatactgtgaaatgaagcgcggcggcctgacggtcgagcgccgttcccggcggagtcggacagaagcacggcggcggaagatggtgcgagtacgggagaacatcggcgcggccatgatgctgcttggctttctgcttttgatggtaataggcggcgcggaggatttgacggtgatcttcctcggcggctttgccggtctcggcatgatgctgttgggcggatggctgggtcatgcgttctacggacaggaaaaggacgcggaatggctgcggcgggagcgggacgaagatgtattttgaccgggacagctatcagcaaagcgtccggcgggcgcgtgaggaacgctggcgggtcagaggccgggcgcgggtagttcatccgaagtacggggccgtggtggtgccgcaccggtcgaactacgccgcgctactgaacgcggcggaatactggggctgtgaatggacagacatacgggacgcggagatatgggccgtgccgcccggcacggcggtggttatgccaaaagaattttgcgggaggaattgaatatgaaagtgaaaatcaacacccatggaaacgccttgccggaggttcacggcgaatggatagacctttgcaccgcagaggatgtcacgctggactttctggagtacaagatcatttccttgggtgtttccattgagataccggcgggctactacgcgcacgtcgttccccgttcctcgaccttcggcaagtggggcgtcctgctggcgaacagcatgggcgtgatcgagaatgactactgcggcgacggcgatgtgtggggctatccggcgctgtgcctgttgaaagagggaacgcacattccgaaaggaacgcgcatctgccagttccgacttgtggagaaagcgccggacatggagtttgtgcaggtggagagcttgggcaaccgtgatcgcggcggctttggcagcaccggcgagcaggtgcataccggcggcacggcggaacggaacaagccggagaggaacagccgcgtggagcgaatgttcggcgagcgggagagctgggccacagcagcagaggaggacaaaacgcaggggccgtacaagggatttctgctggtggtgtgcgaggagtgcggcgcggtcaaggcgttctgcgcgaagcgggaagcgtacagtttccggtgtcaggagtgcgggcatgaaacgccgctggagggcctgcgccccatgttcatgcactgtaaatgcggtaagtcgttccgctacaagaccaacgcagagacggagaccatcacccatagctgcttggactgcaaggcccctgtggatatggagctgaacgggaaaggcaccgcctatgtgaccatcggcgtgagaggtggcaagcgatgaaagatattctgtatggcttgggcgcgatgctgctgcttgcgctggcggtgatttgggggctggcgctggtactggccgggcctgccctgctgaaattttgcattctgtatctgtttgggtaaaggaggcggcgggaatgaaactatcgaaatttgcgaacttggtcaggaacggaggccggtgcgccgtgctccatgtggagggcagcggtatttggctttctaccggtacggcaatctaccgggcgacggagctgccggacatggagggcagcgagcaagtgcgaacggtgttggacatgacggcggacgcatggaaaaaggtgtatctgaccgaggactggccggagagcgtcagcaatgtgctgggactgaaccttgcaccgtatgcgcagggcgagcaggacacggaaaaactgaaagtggcggcggctcccaacgggctatggtgttccgcctgccgctgcaaggtggatggcgagctgatcttctacaacgaggcgtatcttgcgccgcttgcggaggagatcaagaaaagcgaatacatctattacacggcgcgacagacccagacgggacagcggtatcttgtggtgcatgacggcatggatgtactggcagccatcatgcccatgaacattctgaaagaggaatacatcaacgaccttgcggaatttcaggcgctctgcatggagcagttctacaaggataaggaacgccgggaggcggttatcgaggaggccgaggacgacccggaggacgcggggcagatcggcatggagggcgtggaagatggagaatgaaagggccattgagattttagacccggaacaccgggaggcgtatgagagccttgaaccggtgaacgaggcttgccggatgggcgtggaggcgctgcggcggcgtgtgccggaaagcccctaccctgacggggacgcgggtgtaatggcctgcccgtcctgcgggagcggcgaatacctgcacaacgaggacggaaaccgctgccgcttctgcggacaatgcggacaggcgattgactgggacggcagcaccggggaggagacggaatgaacgttgtctcttttggcggcgggacaaacagcaccgccatgatcatcggaatgtatctgcacaaaatccctattgatctgattttgtttgcggacaccggcggcgagcagccgcacacctacgagttcatggggacgttcaatgagtggctggtaaagcatggcatcccaaagatcgtctccgtggagtaccacgacaaggacgggaaccgattgacgctggagcaggaatgtatcagcagcgggaggctgccctcgattgcctatggatacaaaaaatgctctctcaagcacaagatcgggacgcaggagaagttctgcaacaactatcaaccgtgcaaagaggtgtgggccagcggccagcgcgtccacaaatacatcggttacgatgccggggagacacggcgcatctaacacgccgcgcccatcgacgaagcggacaaaaagtacgaaaagcattatccgctctacgaatggggctggacgcgcgaggaatgtgtgcacgtgatcgagcgggccggactgccgagaccggggaaaagttcatgctttttctgcccatccatgaagaagaaagaaatacaagcgctgtgggagaactaccccgatctctttgagcgggctatcgcgctggaacacgggagcgccaagacaaatgtgaatgtaaaaggtcttgggcgcgactggtcatgggagagctactacaacgagttcatggcaaacaaggagttcgaggaggcgcagttgacctttgaccagttgttcccggacagccccggcgggtgtatctgcggcgctccgtgcgggtgctatgacggttaaggaggtggcggaatgaaactctgtgatcggtgccgggttgctggctgcttgttgaactacggcgggaaagcctgtaaaaatgcccggaaacagaactgcccggatgtggtctttaccaatgcggacagggttcgagaaatgaatgacgaggaactggcaaaattcatgctgagcagcgacggcgcggcctactgcaagaacaatgatcgtgacagtacgtgccacctaaaaggacgcaacggaatgacggcgtgtgaactgtgcgcactggactggctgcgcgaggaggcggaggaatgaaaatcttgatcggcggctcgccatgtacgcactggtctatcgcgcagaccaagaaccgcgaaacagaagccagcggcataggctgggaactgttcttgaattaccgtatcgcacgggacaagtaccatcccgactatttcctgtacgaaaacaacaaatccatgtctcccgctatccgtgcgcagatcacggcggagctgggcgtggaaccggtgcttatcaactccgctctggtctccgcacagaaccgccagcggctctactgggtcggcaagcgtgagccggacggtacatacagccaagtccgtgtggaacagccggaggacaagggtatcctgctgcgggatattctggaaagcggcgtctgctggcgcgagaaaggctatgcactaacagcatcaaatcatagtgccacagcggaagatatgattgcaagacggcaacgaaatggagctgcagagcctatccgcatcggcactattgagaacgacgcaaagaagcaggactttgacagccagcaataccgtgtttattcaccggatggcaaaagcgtgaccctgtgcggacagggcggtggcgtgggggcgaaaactgggctttacgccgtgccggtgccagtaaatgaaaccgttgaggggaaagcccaatgtctgcgggctacatactacaaagacgggatcagaaacatggttggaaacaccgttgaccgtaaaacctgcgtggcgatgcctgtcgggatggcagcggggccgaaaagcatacttgtagttacggttgcggggaagtcggtgcctgtttacgaggttagaaatgggaaaattgtcatcaagggcaaggagtaccccatcaaactggcggacggcttttacattattcgcaagctgaccgtgacggagtgtaaacgcctccagaccgtgccggacacatacgcctttcccgtcagcgacacgcaggcgtataaaatgctgggtaacggatggacggtggatgtgatcgcccacattatgagccattttaccggactgacggaggagccggtggaagtgctttccatgtacgacggtatgagctgcggccatatcgcgctggacaagctgggtgcggatgttactgcctactacgcaaccgagatcgacaaatacgccatccagaccacacagcacaactacccggagtgggggatgcgtttcaggtgcgggacgaggaatggaggccgaggagagcggaggaggcggagtgatggattgctacgactgtaaagcaaaaagtgtttgcgcggcggtggtgcaacccggctccgtgttgtgtctgatgaaccgcatgagatactgcgggacacacgcagaggaagaaccacggcgacagcagggcgactattgccagtattgcgggcatcgtctgcgggagatcgggcgcgagcgtttctgcaacaatgtgaactgccgaaaccgatatgtaagtgtttgaggcgcggttttgtgggatgtgagatcaatccctcgtatgtagaaatggccgccggaagaatagcggaggtggagtgatggggttcagcaagaaaacacgcgagatcgtctggaagaaatacggcgggcgctgcgcatactgcgggcgcgagattgcctacaaggatatgcaggtcgatcacttcctgccactgcgggcttggggtatcgaagatgcgggaaccaacgacatatcaaacctcatgcccgcctgccgtatgtgcaaccactataagcgggcgaacacgttggagacttttcggcggtacattgcggagataccgcgcaagctgcgcgaggactatatctacaaggtcggcgtggtctatgggaatatcgttgagaacgagaagcctattgtatttttctttgagaaagaaggcgaaacgaaatgagcgagaaaagcacggtatatgagtgcgtagaccgggagcatgacgcttggcggtgccgggcgtgtgggtacatcgagaatttcgaggcggacgggccgacggaaaacggctggcacttctgccccggttgcgggcgggagatcattgtggaagcggtcaatccgtgtccgttcgacaatgacaactgtatgtgccagttctgcgaaacgccgtgcaataacggcttaaactgctcagactgcgcccacgagggaaaggcggtgcatgatgtgcttctctgcacgggctttaacgggagcatggagcagtacacagaaaactggaagcggaagcagatggcgaagttgggaggcgagcgggaatgaaagtgtatctggccggaaagatcacgggagactcgaactacagggagaaattcgcggcggcggcgaagaagctggaggagcgggccggtgtaacggtgatttccccggcggtcacgccggaggggctgaaaaaggaggactatatgcgcatctgctttgccatgctggagagcgccgacacggcggcgttcttgccggattgggaggacagccccggcgcacagcttgaaaagcactggtgcgagtacgtcgggaaaaagatggtgtttctgatggagggtgcggaatgatcgacttcgagggctactatcttgtgccacccgatcaggttgcgtacatcgaaacgaggagaggtggcggggatgcgcaatatgggctgttcttgggcctgtccagcgggaaagagctgggcgtgtggtacagaacagaggaggcgcgaaaagccgcttatacgaagctcgcacgacaggtcgagatcgggaaacgacaggacagggaggacatcttgtatcgcctgcggttgatcgaggcatgtatcaataagacggataagcggacgctacgaatttggaagcagctccaacaactgctgcatctggaaagcgaggagacggaatgagcgggagaacaacagagcgtattctgaacgcggcggcaaaggggctgctgtttctgttcctgtatgtgatgctcggcctgtgctggattggcgcagaatgcgtctttgagggcatcgtgcatgatagcagggttgacggcgttgtgctggcgtggctctgctggctgatcgttggagaaattgagcagttcgagcggaaaatcagaggtgacggacgatggagccgttgctttgccgcttgggactgcacagcccgtgcaagacggaatacatagaggtcacacgccgccggagcgaccggcacggcgggaagtatcacacgaattacatctgctgccgcaggtgcgggaagctgtgctaccggatgcggcggcgcagggagaaaacgatatgaaatgtgagctataccacgataatttccagaatttcaagcggtacaatgtgccgaaagcccagcttgtgatcgcggacatcccatacaacatcggcgcggatgcctatgccagcaatcccatgtggtatcagggcggcgacaacaagaacggggaaagcaagctggcaaagcagagctttttccacacggacggtacattcaagatcgcggagtatatgcacttctgcaacaggctgttgaagaaagagccaaaggaaaagggacaggccccggccatgatcgtgttctgtgcctttgagcagatgcagaccgtgatcgagtacggaaagcggtacggatttgcaaaaagctatccgctatttttctgcaagaactattccgcgcaggtgttaaaagccaacatgaagatcgtgggcgcgacggaatttgcggtcgtcctctaccgggacaagctgccgaagttccgcaacgtcggcgaggacggcggaaagcacatggtttttgactggttccgctgggagcgggacagccgaaaggagtacccgaagatacatcccacgcaaaagccggtgggcgtgttgaaacgcctgatcgaagtgttcacagaccccggcgacgtggtgatcgacccggtggccgggagcggcaccacattacgcgccgcctacgagctggggcgcagcgcctacgggttcgaggtggacaagagtttctacgaggcggcgagagaaaagatgctcgcaccgatcttgacggagacaacgacaatctgacgaccggaggcggtcgcgccgtgagagcggcgcggccttgccggttgaagcgagacctgtttccggcggtgccggagagaatttctgttgcggccgaggggccgcaatgggctggtataccagcagtaagttaagagacaagccatgaaacaggggtgtgcctgacggcatacgactgttgaaataacccgtatgcaagccggtgacggcgcatacacgcaaaaacgatggaggcgtggccgcatgagcctgtattatcgggaacaaaagcatatctgcggcaaagactacgccacggcggggtacatggaggtcgatctgtaccccgtgacaccaaagcagcacaaagcgagccggagagcaaagaagaaagaagcctgtaccctcgcccagcagacctacaacgacaaccgctccaagagataccatgtgcagcttgtgaacgccaatttcggaaagggcgacttctcatggacgggaacctatgacgacgaacatctgccagcgccgggagacaccaagcgggcggatatggactggacgaattacatcaagcgggtgtatcgctggtgcgacaagaacggcgtggagcgcccgaagtgggtagccgccacggaatacacgacggtgatggcagacgggacgatctgtggccgccatcatcaccacgcgatcatccaacacacagagggattgacccgtgacgtgctggaggagctgtggagcgataagaacggaaacagcattggcctaacacgaggggaatatctcaccgttgaccacggaagcgtggagggccttgtaaaatatatcaacaagaacaaacggtgcgcccgaagctggcggcagagccgtggactggaaaaaccaaagacaccgccgcccaacgataccaagtggagccgcaaaaagctggaggaggccagcaccgtgtacatagacgacgctgcgttctgggagcagaaataccccggctacacgctcaaccgcgtggaaaccaaggtgagtaacgccgggcagcggcataccgttgtgatcttgcgccgcgccgagtgctggcacgggcgaggaaatatatatcgaccaaggaggaaatgagaatgaacgatgccgaacgcttcgagcaaatttttctgtcacaggtgacgaggccgggcgcggacaagctgctggagtggctgaaaagcacggatttcttcacggctccggccagcacacggtttcacggggcctatcccggcgggctggtgaagcacagcctgaatgtgtattatgccctgctggggaatttcaatctgcgcggcctgtattcgccgcagacgcaggccatcgtggcgctgctgcatgatgtgtgcaaggcgaactactatgccggggaatatcccgactacaccgtgaaagatcagatgcccatgggacacggggaaaagtctgtctatctcgtgatgaagcacatggagctgacggacgacgaggcccttgccatccgctggcacatgggcgcgtatgacgacgctttccgtggcgggagccggacgctgaatgccgccatggaaagaacgccgcttgtgctggagctgcattacgcggacatgatagcgacgcagagagaaaagcacgaagaggggctgtgaatggcgtaccggctggagctatccgatctgccgccgcgttaccgggcgcaggcagaggcacagcttgccgggcgcgggaaaaagcggggcgacaccgtgacggcggcggcccgtgccgctgccatgtccgggctgaaatttgacagccggggcgagtatgaatactacgtcggcaccgttgcgccaaaggtagggcgcggagagatcgtgaagtgggaggcgcatccctgctttctgctgttcccggcgggtgaatacaacggcgtgaagctgcggagcgttcagtacacggcggatttccggctgacctatgccgacggcaccgtggagatcgtggagatcaagagcaagtttgtccggcggatgcaacgggattatcctgtacggcggcgagtgtttctggagctgattgcccgtccggcgggctggaaattcacagagatcatcacggcggacagcaaggaagaaatcaaacgctggcgggagctggcggaggaggtatcatcatgtgggaaaaacggctgacgcactacgacaaagacgggcgcgtgtattccagcaggggctacgaggtggcccttgcaaagctggcgtggttcgaggacagggagcagaaacgggaggaaatgcccgtgtgcggtctgtgccagcggcaccaaaagctggagaccgtggacggcacggcgttctggctggaatacggcgaggatggcaggccccgccttgtgatggacagcacggcgcggggcggcaggctgaatgtgctgtgcgcggagttctgccccatgtgcgggcggttctgcgggaaactggaggcggagcatgaggagaaataagcatatcccggcgcattttggcaccaacgcggcccgtcaggcgcagacgcgctatctgcgtgggaaaacgccggagagcgagcgggtggagaaaaaccgggaggcggcgggccatgtgatctctttgtgcttcatggttgcgctgcatgaccgctacggcatcgggaaagaccggcttgaccgcgtgaccaacgccgcaaacggcgcgttggagcggtttgccgtcaacaagcgcggcgtgggcatggagcgggcgaaaaagaagctgaacgaggagctggaggggctgctgacggagaattttgtgctgcccgcgtcaaaagcaccgaaaagcaaccgggattgggccttgctgggcgaacggcgggaagcggcggagatcgtagtgaaatgctatgcgctgggggcgcgtcaggccctcggttttggtttggagcggctgaatgagaccgtccgcgccacggaggacgtattccggcagtttaacgagtgggccgagggtggggactggttcggctacaatatgctggcccggcgtatgacggatattctcggcgagccggtggatgtggacgagagcgacgcgaaagagccgatcttcgggaaaacgctggattgacaccacaggcaaggagatttggcgcggagccaagaacaggaggcgacggatgcggtatggcagcgtgaagcacatagccctgtactacaaggcaattccggggatgctgcgcctgctgcggcaggagcgggcggaattggagggcaattattacagactgcgggggctggcgtgtgacgggatgccgcgcggctcgtcgccgggaaagccgacggaggaaagcgggctgcgggcgctggaaaacggcgtgagcgagcggctggcggagatcgcggagacggagcgggttttgtccggggatgaagcctgtatccgtgcctgtctggatgcgctgaacggtaagtacaaaaaggtcattgtgatgcgctatgtgcgtgggtacagttgggcgaagatcagcgcgagacttgggacggcggacagcacggcccgcgattggcacacaagagcaatggagcggctgggcgaggtgctggaggagctgccggaagcggaggcgctggcccgccgcgcgtcgcgcgcgcgtacataataagcggcaaaaaattttgggccgtccggcggggctgagcaagggctgctttgccgactgatcttgcaccggaacaccacggcggcggaacaggaaaaccggccttataggaacaagtttttcaagacttcgcgcgtggcgcgaaagggtttccgtgatcgtcggggcggctctggaaaaacaatttgcgaatgggaggaaaagaccgtggattttgtggataagctggtggagggcatgaggcggctttttgtgcggagagcgaggcgaaaagcgctccggcggcggtgcagatacctgtacagcagcaagagaagataaaaatgccccggcgggccgttttggtacggtctgccggggttttgttctgcacgatagcaagtcggatttgtgttattcgtcggcggggctgtcaagctccagcgggcgtccctcgcgcttcatgcgttcttcgcaggcttgcagcacatacgcctgtacgctctgcccggcggccttggcagcggcgcggatggcgttgccgatgggcttaatggggcgggcgctgatgcggtcgcatttggcgttgtaaatgtcgttgttgcggcgcttgctttcgggtatgggcatggtcaatcctccttttctggctcgtccgggcagtctgtcaggtcgatcacgatgatctccggcggctgcggggcgagcttataatattttccgttttcgtagtgctgatcggtcacgccgtcataccagcatatatcgccgtgttgtgcctgcgccgcctccatgcggtcttgtgcttgctgctcggtgaggccgtcaaaggtgaggcgctggccgtcggcaaattcggccacaaggcggtacgcggggaacacttcggggacttcgttcatggtctgcctccctgtttggttttgttttgtcgcattataacacgcgggcgtgtaaaagtctacggggcaattttggcggaggcgcgggctttaagcgccgcacgggcggttttgtagtcggggaatacttcggcggcgggaaactctttcatgcagcagttccacttggggcgcgaggtcttgcggagatagacgatttcgccgcagtcgtgttccaagtaccatttttccagcgttccgtcgtggttgagcgtgtatcttgtgggggccgtggtcgtggccatggcggtgtcctttctgccctcgtgacctccggggcgggcgcttaacttactggtaacttgctgggcggttttgttattccgccaggccgagggcgcggcgggcggcgatctcggcgttgcgggtcaactggcgctgccatgcgccataccggggagaccagcggaagccgttttgtttcagggcctcgcgctgctggtcgtcgggcttttcgtcaaagatgatctggagacggtcagcctcggtgttgcggacgatctcaccgccgggaaactttgcgttgtcggcgggctgctgggcctgctccgtgcgcttgtccagctcgccgaggcgggcttgtgtgcgcttgatcttgccgcgcaggctggtcaattcgtagtcggggcaaggcttatcaatccacgggcagcgctggcaggtgtcggcaaagtcggcggtgagcttggcggcggcctcggcggtcagaccgggaaagccgacaaaggatttgtgcttgcgataataggcattcatggccttgttgcggtcaagctgggtttgcagcttttggagctggtcagcgagcatttcgcgggcgtgggggtcggcgaggtctaccgcgccggtgccgacggcctcgatcttgttcaagatggccttgatctcgtcgtactctttccagagggtgccctcgcgggacatctgcttttcgtgctttttcatgttgtaattgcctgcgccggaaatgaactggctgggatagctggcctgattgcggttgtagtcgttcgtccattgagcaaggcggcgggcgtagcggtcaagcagcgagtcgagcttgtcgtggtagtaggggctgaccttggatttacgcgcctccaccagcgcggcggcctcgtccacggcggcgcggtagccgttggtggcgctgccgggctggtagtcgctcatgtggacgcagtagtgagcgttgcgggccgtgtcctcgttgatctcgtagtagcgggcggcgggctttgcttcgacctgcggcggggcgatcatgcttgtctgttcgtacatggtgtgtacctccgttttgtgttttggggtttcgcttatggggtgccgtcgctttgtccggtgcggcggctccaaggtatccggttttgtggtcagtcgaggcaggtttcatagcggatgcggtattgctctttcagcttgtcataggcgcgggtggtgacggtgtaggtgttgcgctcctcgtcgtagctgatgccgcgcccgtggagccggggcaggtcgtcgcggagcgggcggagaaaataatgcttgccgtagtaggaaagatcggcggcgaagtcgcagccggtgggggcctgctgcatttcgtagcagtagacgtattcgccgggcttgtcggcctgcacggcgggggccttttctgcctctaatgcggcgtagtccggggcgtagccgaacagctcgccggttttggggtcgtagcgggcggcggagaagtccgggacaaaaagcgttgtctgctcgttgatctgctgggcgtagccgccggggacgggggcaaaggtgccgttgatcttgcgttcgatggatgccatgttgtttacctcctgttttcgttgtcgagggcggacagagcggcggccatgccctgctcaaaaatgcgggtgttctccgcgctggattttgtgagatcgttcgagtagctgcaggcgggccagagcgggcagtcacacgcgccgcatccggggttgtagtgctgattgcagatggtttcgatgcgttcgcctgtctcggcggggatgtaaagccatgccattttgtgtacctcctgatttgtgatttggttttgtgcgtggggtcgggtcgctttgttcggtgcggcccgtccaaggtgtccggcggcggggggtcagacgctatcggccagcgggacgacacgccactcctccggccttttcttcg

SEQ ID NO: 12314 - DNA, 693 bp, Unknown
  gut microbiota DNA sequence
aagtcgccgtcctcgatggtgaggttcagatccttcagaacgtggtttttgccgtaatatttatcaatatgagtcagttcaattttactcatggtctcgtctcctcttttttatctcatctcagccggccatgctcttggccaggtctgcgtctccgaagatatttgccagtgcgtataccaggaacacgatggagaacatcacgatggccacgcagttagaagcctgcgggcagttctggttctggtactggaacgccagatacggcagcgtggaggtcttgggcgtcatgatcaggatgatcagatccaattccttcataatggaaacgaagatcagcatgaagccggaaataaagccgcccttggacagggggaacacgatcttgacaaagcgcttgaagaagcctgcaccctcaatggtggcggcctcctccagctcgccgctgatctgcagcatgttggaggtaccggcgcgggaggcaaagggcagatgcttgaccacggaggtcagcgtcagcagggcgaaggtgccgtacagggccggaatgagcgttacgccgaagagcgtctgaggcttggagaacatggacaggtaaatgccgccgaacgccacggaggggatcaggtaggggataaacaccagctgctccaccagcttgccgtggagcttgccgcggcccttggcgcagat

SEQ ID NO: 12315 - DNA, 764 bp, Unknown
  gut microbiota DNA sequence
tgacgctggcggactccgccgtgcaggccgccgtggacgagtgcaccgccgagctgggcgattccggccgggtgctgctgcggaagagcggcacggagcctgtgctccgggtcatggcggaggccggtaccgccgaggaatgtgaaaagcaggtggaccgcatcatcgccgctatggaaaagagcggccatctcatcgaggtgaagaagtaatgctgactatcaacgagttatatgatctgagccattctctggcgggagattacctgaagcaattcacctatccatgggaggcgctggccgggatctccgacctgattctggagatcggcaagcagcttccggaggacgagtatgtgcaccccaccgactgggacggcaacgttctggaggatgtctgggtggccaaggacgcaacggtgttcaagaccgcctatctccacggcccctgcatcatcggccaccggacggaggtccgtcagtgcgcctttatccggggcagcgcactggtgggcaatgactgcgtggtgggcaactccacggagctgaaaaacgtgatcctgttcgacaatgtgcaggtgcctcattataactatgtgggggattccattctgggctataagtcccacatgggtgccggctccatcacctccaacgtcaagagcgacaagctcttggtggtggtgaaggacggcacggagcaggtagagaccggccgcaaaaaggtgggcgccatgctgggcgaccgggtggaggtcggctgca

SEQ ID NO: 12316 - DNA, 647 bp, Unknown
  gut microbiota DNA sequence
tacgtggacatcccctacgccacggtgacgctggaaaaggccaccgccgacgtggcgggaaaccttgtgttcagcggcgagatcggctttcagaccatcttcgagggcgcggaatttacgatgaaaaagctgggctacggcttgaagggaaatgaattcaaggtcaacggcgtccacgccacgggcagctttaccaccgcgaagatgatggcgctggagcttgccgatgtcaagggcgaggtcaacaccttcaaggatgatgagctctacgcctttgaactggagctgaacgtctttgacctctttgagaccaaggcggagctggagctgacgcgcagcaaaaaggacggcagcctgctgcctaacacgctgtatttctatgtcaaggcaagccccggcatcccccttattccgcccattcccgttggtcagctcaacggcggcggcgcgggcttcatggatctggcaaaaacggtgaacggcgattaccgcggcattccgcccatcaagctgcgcggcacgctgacgggcacctatctccacctcatcgagggtacgggggacgtggtgatcggcccgagtgagatctccctcacggcgacggatgtcggtatcgtcggcgcgggcgagagcgcgcagatcattaa

SEQ ID NO: 12317 - DNA, 164 bp, Unknown
  gut microbiota DNA sequence
ttccagaacgaagagagtgtgcgcggggttatttacaacgagtgcctttgatacacaatggttgacatcctgcatccaacggttttctcgttgactgatccttttgagtctacgtcttgaagacggggtatgccgcatctggagttcttttctaagtgctgaat

SEQ ID NO: 12318 - DNA, 539 bp, Unknown
  gut microbiota DNA sequence
ccgaaaatcaaaatgatataaatatcatagatgcggttgttggtagaataagagcctgcaatgcagaatgtcagtacgatgggagccagaatctcatagggaatgcgggtaatatgcgcataaaaccgggtcaaaccagtgcccacgatatacatgaacacattcaccacgagcaggcccagcatgatggcataaagaacgttgccctgctcggcaaacaaggacggaccgggaaccatgccgtgaagcatgaatgcgcccatcagaatggccgttgcaccgtcaccggggacacccagcgtcagcatggggatcatagttgcaccgcaagcgccgttgttggcagattccgcaacagccacgccctcgatctcacccttgccgaacgtttccgggtgcttggacgcctgcttgacctgattgtaagcaataaacgccgccaaaccgccgccagtgccgggcgttgcgccaatgatgacaccgacaagagaaccaatgccaatgggcttgcggcagcgccgatattcctcttttgtgat

SEQ ID NO: 12319 - DNA, 206 bp, Unknown
  gut microbiota DNA sequence
tccgcaatgctctccggcgtggccttcctgctgatgttcattgaattccccatcccggctctgatcccctccttcgtaaagctggacgtgtccgatctgccggagctgttggccgccttctctctcggccctgtctacggcatcgtggtcaccttcctgaagaacctgctgttctccgtgctccacggcacctcctccgcctatgt

SEQ ID NO: 12320 - DNA, 308 bp, Unknown
  gut microbiota DNA sequence
accatcatctgcccccgtttccgtccctgcatggctaccgtccgtcccggcgttatgaagaagaacgcctttgacgaggccaaggccaacgctgttgagatcgtgaagcccaacttcactctgactgccgaggacatccacaccgacgttaccgaggtggtgaaggccgctaagaagctggtggacctcatcggcgccgattacatcgtgtccgttggccgcggcatttccaaggacgttgagggcggcatcaagctggctgaggagctggctgaggtcctgggcggcgttgttggcggctctcgtgc

SEQ ID NO: 12321 - DNA, 946 bp, Unknown
  gut microbiota DNA sequence
gaagtaacgccagatgatggtgtagtcgatcttgcccagagcgttgcccacgcccaggatcgcgccgacgcccagcacggggatgcagagcatcaaacggcccttgatggacttctgctcaacgtggaaccagtcagccagcaccagacgagcggaacggaaggccgtatcgccggaggtgatggggcaggcgataacgcccagcatagccagagcgatacccacgccgcccatggtcttggagcagacgtcatacacggtggtggagccgccgccgcccatggccagcagatcagcgccggtgtagatggcgcagccggcagcagcccagaccagagcgatgatgccctcggacaccatggcaccgtagaacacgaagtggccctgcttctcactcttcatgcagcgagccatcaaggggctctgggtggcatggaagccggaaatagcgccgcaggccacggtgatgaacatgaagctccagatgggagtgccctgaggatgcatattggtgaagttgttccagatctcggggatcacataacccttggtgaagatacccacggccacaccaacagccatgatgatcaggcagatgccgaacacgggatagatcttaccgatgatcttatcaatggacaggaaggtggcgatgaagtagtatacaaggatcagcaccagccagaacagcttgttggtgaggataccggtgctgccgccgttggagaacaggagctggatcagaccagcagggcccacggcgaacacggtaccgaccatgatcagcagcacaacgctgaacacacgcatgacattcttcatggtgccgcccaggtagatgccggagatctcggagatagaggcgccctcgttacgcacgctgagcataccggagaaataatcgtggacagcaccggcgaaaatggtaccgaaagtgatccacagg

SEQ ID NO: 12322 - DNA, 437 bp, Unknown
  gut microbiota DNA sequence
gtgttgatgcgctggcgcagcttgatcagctctgcccgcatctggttgcggagcttggcgtccaggttggacaaaggctcgtccatcagcaggaccttcggctcccggacgatggcgcggccgatggccacgcgctgacgctggccgccggaaagagccttgggcttgcggtccagatactccgtgatgtccaggatctccgccgcctgctccacccgctgatcgatctcagccttgtccattttccgcagcttcagagggaaggcaatgttctcccgaacggtcatgtgggggtacagggcgtagttctggaacaccatggagatgtcccggtccttgggggccacatcgttcatcagctggccgccaatgtacagctcgccgccggagatctcctccagaccggccaccatccgcagggtggtggacttgccgca

SEQ ID NO: 12323 - DNA, 221 bp, Unknown
  gut microbiota DNA sequence
aataacgatgtgcctatttgggaaaaatacacgcttaccattgaggaagcgtccaaatattttcggattggggaaaacaaactgcgtcggctttccgaggaaaaccccaccgctggctgggtgatcctgaacggcaaccgcatccagatcaagcggaagcagtttgaaaaaatcattgattcccttgacacaatatagtgaaaaagggccttgcgcgtgtt

SEQ ID NO: 12324 - DNA, 9422 bp, Unknown
  gut microbiota DNA sequence
ctgtatctgacccctgaccgcatggcccgggagggcacctatgactatctgctggatcagctcatcaacagcccggaaatgcgccagaagcgcatccgctggcgggatgagggcttccagatgactgaagcgtggttcgagacatggagcggcggcggcactctcggcagccgggaggcgggtctgctcttggacgccgtggccaaggacgcggaaaacggagactggggcgtgtataactggttcctggcggataatgacgccgacaactatgacctccgcattcagttcgaatacaagctgccggagagccagttcaacagaatccatgatacgatccggatcaacgtcaaggaaggcatgacggagacgatccgggcgctgaaggacctgaaattgatcaccgacgccgatctggtcaccaaccgggaacggtacccgtggcagtacgccgcgggcggctgggaccaatatgaccagttctatgggcagttccatatgagccccgaggaatactatgaacggtacagcgagtacccggcggggtggttcggcacggagagcgatgattcgtccacggagacggaaattgctcccgccgtggatgacagccacagccccagcatgtctgatggggcggaggccaccagcttcggcatcatcggcggggcggacggccccacggtgatggtgacaaccgcggcctgacccaaatcgtaccgcaaggacgctccccggcgggagaccgccggggagacaggatctgagaatatacgatatgaatgagcatacgttttttgagtggaaacgctccgaaagactgacggcggtgctggcgctggcgttctgcctgctggggctggggcttcaacgcctgccgggggtgagcttttccggaaagctgagctggggactggcgctggtctgtctggtgctgctgggcctgagccggctgagccgccgccaccggggatggaagattttgctgcggatcgcccaaataggactggcggcgctggttctgggcttgtcggcggtggaggtctgggtcatccgggccggacaccgggacgagtcagcccaaccggcggacgcggtgatcgttctgggagccggggtcaacggcaccacgccctccgtggccctgcaaacccgcatcgacgcggcggagcggtatctcaaggcgcatccgggcatcccggcggtgctgtccgggggacaggggccgggggaggatatctccgaggcccgggccatgtataacgcgctgacggaccggggcattgacccggagcggctgatcttagaggagcagtccgccaatacccgacagaacctgcaaaattctctggcgctgctgccggatgactaccataaaacagtggccatcgtcaccaacgatttccacatggggcgggtgcggctgctgctgaacgccgccggacccggcagggtggtgcaggtgccggcaaagctgccgtggtggtggctcagcgccaactattacctgcgggagagcttcgccgtggtgaacgatcaggtggtgcgtcctctgctggcctaaaaaaatttgaaattttttggaaaaatgtgcaacaaaatcggtgttcaaatcgtcttataggtacaggaacaaaaaccgctccaaggggcgctgaaggagaatgtgtgtatgaaaggagaagcacgcactatggaaacgacaatgaccagggaaccgatctggaagctgtgggtagatacccagcgccgtgtggtgtcctttcatgaggaggccggttctcaactgatggaattccgggaccgggagatgtttttgcggtgtatcgacggatacacggcccagctctaccggtatcagtgacatgaagcttatcaagtgggtatgaccttccactatcagtggaaggtcataccctttttttgcgtcaaagagcaggatgatctatatgaaaaaacaacaaataaatcgaaaaaaagaggaaccgattctgtttgtttggggttgcttctgaaagggactgatagtatgataaaggtatcacttttaaaacggaggtagagagaagcatgaaccgactcttcaaaaagaccctgtccctgatgctcgtcattgtcatgacggtatctctgggggtttccgccgcagctgcggatcagacaggtgccgcgcaggctgagggcccgctgggtatcgtcagcgctatgagcgtggaactgaacgcactggtggaggcgaccaagatctccaagacggaagagatcgcaggcaacaccttttatgagggcgtcctcaacggcgtggatgtggtgctggtcaaggccggtatcggcaaggtgctggcggcgtcctgcgctgagaccctcatcgacacctatcatgtgggcggcatcgtctttaccggcattgccggcggcgtgggcgacgacgtgaacgtgatggacatggtcattgccaccgagttggtgcagcatgactacggcaccgagaccaacagcggctttgagtggaacggcaaggccggcagcaatcaggagaccggcatgatccctgtggatgagagcctttccaagatcgcttatgattctgcctgcaccgtgctgggcgcggagaaggtccatcagggcgtgatcgccaccggcgaccagttcatttccagcgagtcctatgtcaaggaacttcagaccaagttcaacgcactggcctgcgagatggagggcgcttccgtggcccgcgtggcagacgagttccatgtgccctgcgccattctgcgctgcatgagcgacaaggccgacggcattgcccatgatacctatgctttcaactacactgaggcttccaatacctccgcctctgtggtgaaggaaatgctgaacaccattgccaaggatcgggtcgcgcttcccgctgccaaggatgtcgcagcaaaggacaccacgccccgtaccgccatcatcagcgccatgagcgtggaactgaaggctcttgtggatgccgccgacatccagaaggaaaccgtgatcggaagcaagacctactatgtgggtaagctcaatggcgaggacgtggtactggttcaggccggcgtcggcaaggtcctctctgccaactataccgcggccctgctgaataacttcacggtcaagggcgttgtctttaccggcattgccggcggcgtgggcgacgacgtgaacgtgatggacatggtcatcggcaccagccttgtgcagcatgactacggcactgagaccaacaacggcttcgtttggaacggcgaagccggcagcaatcaggagaccggcatgatccccgtggatggcaccctttccaagatcgcttacaacgctgcctgcgatgtgctgggctctgccaaggtccatcagggcgtgatcgccaccggcgaccagtttatctccagcgaatcctatgtcaaggagcttcagaccaagttcgacgcactggcctgcgagatggagggcgcttccgtggcccgcgtctgcgatcagtttggcatgccctgcgctattctgcgctgcatgagcgataaggcagacggcattgcccacgacacctatgcctttaactacaccgaggcttccaacacctccgcatccgtggtacaggaaatgatgaagaccctcagcactacgctgcccttcacggatgtgaagaacaccgactggtgcttcagcgaagtggcgcgggtctatgccgacggcatcatgggcggcacctccaacaccacattcagccccgccggtcccctgacccgtggtcaggtggtggcgatgctgtaccgtatggccggcagccccgctgttactgccaatactaccggcttttccgatgtggacaacggtgcgtactatgctgatgccgtaaagtgggcctccggcaaggagatcgtgggcggctatgccgacggcaccttcgcgcccaaccgtgccatcacccgtgagcagctggctgctatcctgtaccgctacgccaaggccaacggcgcggacatcagtgtgggtgaggacaccaatctgctgagctacaaggatttccagagcgtcggccagtatgcggtgcctgctctgcagtgggctgtgggcagcggcctgatcggcggcaccaccaatgcgatgctgtctcccaaggggacggcaacccgggcacaggccgctgtgatcctggttcgtttcgtcggaatgaccgccgcgaagtaatttcaccagttcctccgcaccggctccgcccttgggcggggccggtttttccacgggaagcggttggaacggaaaagtctgtattttccggggaaaaaccgggaaaatacggttgacaaacggcggaaatgtgatatgataaccgagtaactggatatttggcgaagaaaaggaagagtagccggtcgagggcctgtaaagagagccgccgtttggtgcgaggcggacaggcgcggcggcgaaaatcaccttggagcctcctgctgaaagacgacgcgagtaagcgtggacgtgtgacgggcgttattccgtcagcctgtaatggcaggcgtgagtggccgcgctccgcaaggggaccggcaagtagagtggtaccgcagagtgttttcaaacgctttgtctctgagttcagaggcaaagcgttttttgttttgcgtgaaggaggattgcctgtggagtgtcctgcatgcggtaagcctatggaagagggatacctttccagcaaaggccctgtgttctggtcggaggaggtctccggattttccctgccgacccgaccgggagatgtgctgctgggaaaagctatggggctgctgcggccaaaggcatacctctgccggaattgccggacggttacggtcaaatactgagtaatactaagctaaggaaaacttacaatataaaaggagacgcatcatggattacaacaagaccatcaatctgcccaagaccgacttccccatgcgggcgggcctgcccaagcgggagccggagatgctcaagcgctgggaggacatggacctctacaacgagctgctgaagaagaacgagggtaagccccgcttctcccttcacgacggccctccgttctccaacggcagcctccacatgggccacgccctgaataagtccctgaaggacatcatcgtccggtcctacgccatgcgtggccggtacacaccctatatccccggctgggataaccacggtatgcccatcgagagcgccatcatcaaggagcagaagctcaaccgcaaggccatgagcgtgtctgacttccgtaccgcctgccacgcctatgccgaaaagtatatcggcatccagatggagggcttcaagcgcctgggcgtggtggccgactgggaacacccctacaagaccatgaaccccagctttgaggccgaggaggtcaaggtctttggcgagatgtacaagaagggctacatctacaagggcctgaagcccgtgtactggtgctaccatgacgagaccgctctggctgaggctgagatcgagtatcaggatgatccctgcaccaccgtgtatgtgaagttccccatgcatgacgatcagggcaagctgagccatctggacaagtccaagctgaacttcgtgatctggaccaccaccatctggaccctgcccggcaacctggccatcgcgctgcatccctctgagagctatgccgtggtgaagaacaacggcaacggcgagatgtatattatggctgaggccctcaccgacaaggtgatgggtgtggcgggcatctccgattacgagatcgtggagacccacgagggcgccttctttgagaatatgctggcggaccatcccttcctgcccaagaccagccgtctggtgctggccgattatgttaccatggattccggtaccggctgcgtccacaccgcacccggcttcggcgcggatgactaccagacctgcaagcgctacggcatggacatggtggtgcctgtggacgatcagggccgccacaccgactatgccggcaagtacgccgggatggtggtggaggagtccaaccctgtcatcctggaggatatgaaggagtccggcgctctgctggccagcgaggagatcgtccatagctatccccattgctggcgctgcaagcaccccatcatcttccgggccaccccccagtggttctgctctgtggacgcgttcaaggacgaggcctgcgccgcctgcgacgaggtccgctgggtccccggctggggtatcgaccgcatgaagagcatgatccgggagcgcgccgactggtgcatttcccgccagcgccggtggggtctgcccatccctgtggtgtactgcaaggactgcggcaagcctgtggtgaccgatgagaccatcgccgccatttccgagatgttcggcaaggaaggctccaacgcctggttcgataaggatcccgccgatttcctgcccgccggtatgacctgcccccactgcggcggcaagagcggcttcgagaaggagaccgacacgctggacggctggttcgactccggctccacccactatgcctccatgaagcgggatcagaacttctggcctgccgatatgtatctggagggccttgaccagtaccgcggctggttccagtcctctctgctgaccgccgtgggcgccttcggcaacggtgcgcccttcaaggagtgtgtcacccacggctggaccgtggacggcgagggcaaggccatgcacaagtctctgggcaacggcgtggaccccgctgacatcttcaacaagtacggcgcggacattctgcgtctgtgggcggcttctgcagattaccacgccgacgtgcgctgctccgacgccatcttcaagcagctctctcagaactacctgaagttccgcaacaccgcccggtactgcctgggcaacctggacggctttgatcccaacaacctggtggctcccgccgatatgctggagctggatcgctgggccgtcacccgtctgaatgccctgatcgaaaagtgcgctcaggcgtacaacgactatgagttcctggtggtgacccacgccgtcaacgatttctgcgtggtggagatgtccaacttctacctggatatcatcaaggaccggctgtactgcgatgagaccgacggtctggctcgccgcagcgcccagacggccctgtatctgatcctggataccatcacaaagatcatggcccccatcctgtgcttcacaggtgacgagatctggctggctatgccccacaaggcgggcgacgatgaccggaacgtgctgttcaacgatatgaacggtgtgtttgccgactacgctctctccgctgacgagatggccaagtgggaaaagatcatcgaggtccgcgacgccgtcaacggcgcgctggagactgcccgtgccgagaagaagatcggcaagagcctggaggccgatgtggccctgacggtccccgccgaggacgccttcctggcggagatggacggcgctgctctggcggacctgctgatcgtctcccaggtggaggtcactgtgggcggcgagctggcggtttccgtcagcgaggctgccggcaccaagtgcccccgctgctggaagcacagcacccaggctgacgaaaacggcctgtgccctcgctgcgccagcgtgatcgcaaagtgcgctgacttcggcgaggtctaagcgtcttatccaattcaaaagtatacgaaacacccccggtgtgcatccgcgcaccgggggtgtttttgttgaggaagcggtgaagcggatgtcggcggtgtacgcaaggagacgagcgggagttgctttttgagaaaatattttttagaatgactgtaacgaaccggtctggttccggcacaaatcaacagaaagggggggagagcatgacggattttgaccgggcgtaccgggaaaacgcggagcttgtgtaccgctatgtgttctccctcacccggaatgcggatctggcggaggaggtgacccagcagaccttctacgaggccatccggcatccggggaattaccggggagaggcggcgctgtccacctatctctgcgggatcgccggaaacctgatgaaaaaggagctttcccgccgggccagggagaatcacgttcccatcgaggaaatgacggacctgccgggggagggcagcgccgaggatgcggcaatggggaatctgagccggcaggagctgttccgccgtatccacgccctgccggaaaagacccgggaggtggtgtatctccgactctccggggaactgcccttttcggagatcggggcgatcttaggggagagcgagacttgggcgagagtgaccttttaccgggcaaagcagaaattgttggaaggaggcggtgtgtaatgctgccatgccatattgtgagagacctgctgccgtcctatctggagcacctgacggggccggagacggaagctgatatttgcgagcatctggaatcctgtccggactgccgggcagcccgagacgccatggcggcggacctgaaagcggaaaaagcgccgccgccgaagctgaattttttgaagcggctccgctggcagcagcggctgggggccgttttgtccgtggcggcgacgctgctgtgcctggtagggctgtatcggctggaatactgctatgacctgaccgacacggcggagatgaaggagatcatccgggaggatctggtatccatttctggatttccgtatcacggagaggtggatgttctggaaactgcgacggtaaaggatcggatgtttgttctgtaccggctggaacagaatggaacgtttgaacggcagggtatttatcaattccagcggggcttgtttggcggataccgctttcggagcagagaatatgacacctgtcccattgtgaatacgagcctgatccagataggcagacagcggtatctggagatctataccgcaaactggccgaaggaggctgccagcttccgggtatttcccggataccgtccgcctgcttatgatggcgaggaggagatcctgccggacatcagcacactggcgccggtgtatgagggaacggcggccaagagtatccttcaggtgatcccggtgacggaggagcaggtcaaggctggcttttttggcagcatgtccgtggcttactatgatgcggaaggcagccagttggatacaggggagttgataaagctgtaccggaattcggagggcggctccggcggcgggggaggcggcaacggagctatttggcctgtggatgttttccaggtgatccttgtcattttgggtatcattatgacccggtatttcctctgcccggagccgaaaaaggaacgaaaagatcatctataaaaaggtccccggagcagcgctccggggaccttttatacggttcttgtctgtttaggctgcggagtca

SEQ ID NO: 12325 - DNA, 75393 bp, Unknown
  gut microbiota DNA sequence
gacttcttccatcaggaagatggtgccgtcctttccgctttccacaatggcgtactggcggagggcaccgtccgcgtccacataggagacgccccggttagggagcgtttccacaaagggaatggccagcaggaggggacggtccggggaaagggcatccgccgtgtagaggtcatcatcgcgggtgagcgtgagctggtcgccgccctcccggaaacctacgatgaaatagtggaagtccgtgacggaacgggtgggcaggagaacgatctcggtcatggggtccgtctcccggtaagcgtcatagccgccctccgtcagaccggcatcctctgcgggaaggacggagagggcctcgccttctaaggcggggggttcggtctgggcgggaggctcggatggctctgcctgctggggcggctgctccggggcgtgatctgctggttggccgcaggctgccagacacagcagcaggaaaacggccgtcaacagggccaggatgcgtttcatgggatcactcctttacaagcgggaaagctcagtccttgtccttggcggcttcgatggccttgacctccttcaaggtccagccggaaaccgtcaggtcggcggccatcaccgggtccacagggacagccagatacatattgttgccataggtataagcgccggaggtgacgccgatgacctgaccgtgggcgttcatcagcgcgccgccgctgctgccccgggaaatgtcggcggagttgacaatgcagggcagggcataacggtccagctcatgagcggtggagccgatgatgccggagctgatggccagccccagacccagagggttgccgatggcgtacaccggatcgccggggcggatgtccgccgtgcccaccagatccagatagttgaaagcggaggtggtgcggcgggactgattggtccgggagaccttgattacggcgatgtcgataccggtatcgtagtagaggacccgctctacctcgtaggtttctccgttgaggagggtggcggtggccttgatggaatcttcgatggagtgatagttggtgacggccagaccgtcggcgctgatgaagaagccgctggcgtcggcggaggagacctcatcgtggacctgctcctctgtctcatacaggctgagctggaaggcggcggagaggtagcggtccgccagctggcgggcggtatagtccttgttcagcaggcccagagcgttggcggcggaggcggtgcagacaccgaggtccatcaggcgggagagcaccgtggtctccgttcccttatagcagaaatccagagcgtcataaatggactccgctagatcgcccacggagaggatgccgattagctggcggccggtgagtccgatccgccaggcgaaggctgcggcgtcggagatctcaaagtccccggtcttgtcgttgtagcccagcatccgcagcagcatagcacaccaggcgtcggcgttcaggtgaccgttgggatcaaactgtacgttgctgacgccggagatccagccccggcggttggcgtagttcacagcggtgcgggcccagtccggcacatcccggaaaccggcaaaccagccgtcggtgtccggctttttctcgccgccggccagacggaccagcagcacggcggcctgagcacgggtagcgggagcggtcaggtcacggccggggtcctcggagagcagatgcagcaccgccagggcatcggcccggcgggcagcatccccggtctgggcgctggccatggggacggcgcagatgagaagcatcaccgcgcacagcgcggataacagtcgttttttcatgaaaaaggctccttttggatttggtggcctacattgtagcaccgaatggaccggattgcaagacgccggagcgttaggcaaaagagggggagatggacggtagacagcgatcaaaaaaactggtatgataaacatatcgaggaaataagcttaacttttatgataaaggagtgacttgaaatggaactgaaagacattttgagcaagtgcgatcacacgcttctggcccagacggccacctgggacgaaatcaaggccatctgcgacgacggcatgaagtacggctgcgccagtgtgtgcatccccgccagctatgtgaagcaggcggcggaatacgtggcgggcaagctgcccatctgcaccgtcatcggcttccccaacggctacgataccaccgccgccaagtgcttcatggccgccgacgccgtgagcaacggcgcggaggaagtggacatggtcatcaacctcggctgggtgaaggaccggaaatgggacgagctgctctcggagatcaaggccataaaggaggcctgccgcggcaagctgctgaaggtcatcatcgagtgctgcttcctcaccgacgaggagaagatcaagctgtgcgagatcgtcaccgcctccggcgcggactacatcaagacctccaccggcttcggcgggggcggcgccacccgggaggatgtggccctgttcgccaagcacgtgggccccaacgtgaagatcaaggccgccggcggcatcgccaatttgcaggacgcggaggatttcatcaatctgggggcttcccgtctgggcaccagccgcatcgtgaaggccgtaaaggccatggaaaaataaaaggaggatactatgggaacgccgcataatgaagccaagaagggcgatttcgccaaaaccgtactgatgcccggagaccccctgcgctccaagttcatcgcggagaccttcctgacggatttgaagctggtaaacaacgtccggggcgttcagggctataccggcctgtataagggcgtgccggtgagcgtgatggcctccggcatgggaatgccctccatcggtatttattcttacgagctgtatacccagtatgatgtggagaatatcatccgggtgggcagtgccggagccctgcgggcagatctggagctgggcagcgtggtggccggtcagggcgcctgcgccaactccgcttatctggagcagtatgagctgggcggcacctttgcccccattgcggactttgacctgctgatggcggcagtggaaagcgccaaggagctgggggtgaagatgcctgtgggcaacctctattcctccgacaccttctacgatgccgccggacggaacatgcgcttccagaagatgggcgtcatggcggtggagatggaggcggccgccctgtactgcaacgctgcctacaccggcaagcgggcgctggccatctgctccatctccgacaatctggtgacgggagaggagctgtccccggcggaccggcagaccacgttcaccaacatgatgaagatcgctctggaagtcgccgtaaagatggcggactgaggccgatagactgttaacgcttcctgaagggaacaccccgcccgatcccgggcggggtgttcttttatgcgtgaaagatatggcaaaattgaaaacaattcgggtttcttattgcattgcccgggtgaaattgttataatgacatagacccttgaggtcgacccttttaaagagcttgcacccggcttccgaagccatacataggctgtgatcactccggggaacacggcacggtgcgtttcagagcgggagcggacgttaaaaggagaaaacatgaaagaggtagattccaatgaagaagtttcttgctttgactctggcattggtcatgtctctgtccctggtagcctgcggcgataagaagaccgacgataccaagaccgatgaacctgaccagaagaccgagcagcccacagagaacgagggcgcctataaggtcgcaatgatcaccgactacggtgacatcaccgaccagtccttcaaccagaccacctatgaggcctgcaaggcgtttgccgaggacaacgacatcgagttcaactacttcaagcccgtcggcgacaacaccgccgaccgtgtggctatgatcgagaaggccgctgacgagggctacaatgtcatcgtgatgcccggctacgctttcggcggcgccatcgtggaagctgctcccgagttccccgacgtgaagttcatcgctctggacgtggctgccggcgacctgttggaaactgctgtggccaaggctggtaaaacctatgattacacccccgacaactgggatctgagcgagtacgttgacatgagcaacgtgtactgcgccgtgtaccaggaagagctgtgcggctacatggccggttacgctgctgtgaagctgggctacaagaacctgggcttcctgggcggcatggctgttcccgctgttgtccgttatggctacggcttcgtgcagggcgttgacgctgctgctgccgatctgggcctgactgatgtgagcctgaactatgtctatggcggtcagttcttcggtgatgccgatatcaccgctgtgatggatacctggtatgccggcggcactgaggtcgtcttcgcctgcggcggcggtatctacacctccgctgtggacgctgccaagaaggctaacgccaaggtcatcggcgtggacgttgaccaggctggcgtcatcgctggctacgccggcgtggaaggcatgaccgtcacctccgctatgaagggcctgtatcccaccacctatgacaccctgactgacgttatcgtcaacggcaactgggatgcttacaagggcaagatcgctactctgggcctggtgtccggcgatgatcccgagctgaactatgtccagatccccatgggtgagggcactcagtggtctgacagcttcacgcaggatgactacaaggccatggtgaaggatatgttcgacggcaagatcaccgtttccaacgatgtgagcaaggctccctctgacttcgccaccgtgatcgctgtggaggaccagggcgctatcaagggctaagcgcagaacgcaaatccatacgcgaaaaggaacgtccgaaaggacgttccttttttatccgccaaaagaaggaggtacggaaaaccattggcaccctggtggaatggggcatttcggatgttggagcggctggcagtcttttcgggaacagtttgcggaaagcggacgagtctcccgatggaagcgccctgaggagaccactcttcaaaaaaatgattccggccgtcgatttgcctttctttttgagcggagttatagtatactgaacgtaatactggatgtgagggcaatatgccgctgccggtaaatgaatatggtttccgtccccgcgagatccacacggcgggccattaaaacggaaggagggcggtttgacttggaaacgaattacgccatcgaaatgctccacattacgaagcggttcccaggcatcatcgccaatgatgacattacccttcagctgaaaaagggtgagatccatgccctgctgggcgaaaacggcgcgggcaagtccacgctgatgagcgtgctgttcggcctgtatcagccggaggagggcacgatcaagaaggacggcaaggaggtctctatcaaggaccccaatgacgctaatgacttggggatcggtatggtgcaccagcacttcaagctggtggactgctttacggtgctggacaacatcatcatgggcgtggagcctacgaagcatggctttctccagaaaaaggaggcccgggaaaaggtgctggccctcagcgagaagtacggtctccatgtggacccggacgctttgatcgaggacatcaccgtgggtatgcagcagcgcaccgagatcctgaaaatgctgtaccgggacaatgagatcctgatcttcgacgagcccaccgccgtgctgacgcctcaggagatcgacgagctgatgcagatcatgaagaatctggcggcggaggggaagtccatcctctttatttctcacaagctggcggagatcatggcggtggcggaccgctgcaccgtgctccgcaagggcaagtacatcggcaccgtcaatacgaaagacaccaccccggcggagctgtccgccatgatggtgggccgcaacgtcaatttccatgtggaaaagaagcctgcggagccgggagacgtggtgctggaggtcaagaatatgaccatggcctccaaggtccacaagaacaacgctgtgaagaatgtgtccttccaggtgcggcggggcgagatcgtctgcattgcgggtatcgacggcaacggccagacggaattggtctacggcctgaccggtctggaaccgctggtgtccggcgagcttttcctctgcgggcaggacatcacccacacctccatccgcaagcggagcaccatgggcatgagccacatccctgaggaccggcataagcacggtctggtgctggactattctctggaggacaacatggtactccagcggtactttgagccggaattcaccgacaaggcgggtttcctgcggcggaagaacatccgcggctacgcggagcggctgatcgagcagtatgacgtgcgctccggtcagggtcccgttaccattgcccgctccatgtccggcggcaaccagcagaaggccatcgtggcccgggagatcgacaaggatccggaactgctggtggcagtccagcccacccgcggtctggacgttggcgccattgagtacatccaccgtcagttggtcgcccagcgggacgagggcaaggcggtgctgctggtgagtctggagctggacgaggtcatggacgtacccgaccgcatccttgtgatgtacgagggtgagatcgtgggcgagctggacccgaaaaccaccacccaggaggagctgggcctctacatggccggcgctaagagagacgaggtgaaggcatgaaaaagaatattttcaagagcaacggcttccaatcgctgctggcctctcttttgtgcatcgtgctgggtctgttcctcggctatctcgtactgctggtcatcaatcccgctggcgccggcgaggcgatccttactgtggtcaaaaacttcctgacctataaaaagacatcctcccagttgaaatatctgggcaatacgctggtcaagaccgcaccgctgctgatgtgctcgctgtccatcctgtttgcctataaggtgggcctgttcaacatcggcgctgcgggccagtactgcttcggcgtggcactgagcctgtacgcggcgctgggtttgggctggagctggctgccctgcctgctggtggctatggccggcggcgcagtgcttggggccatctccggtgtgctgaagtcctattgcaacgtcaacgaggtcatctccggcatcatgctgaactggatcgtcctctacctgaccaatatgctgctgaccacggtgaaagaggccgccagcccctacaccatcgtgctggccaacaacaacccctctgctgtgctgccctctctgggagtgggggcgctgttcaacaagaatcagtatgtgggtctggccatccccctgtccattgtgatggcgattctgatctggatcgtactggataagaccagattcggctatgagctgaaggctaccggcttcaaccgcaacgccgccaaatactgcggcatggcggaaaagcggaacgtgatcctgagcctggtgatctccggtgcgctggccggcatgggtgcggcgctgctgtacctcaccggctacgagcagtggcagtgctctacctcctccgttcccgccatgggcttcaacggcattgccgccgccttcttagggggactgaatcctctggggacggtgctggcatccttcttcatccagcacatcaccgccggaggcgcgtatgtggataagtccctgtactgcgcgcagatctccgatctgatctcttccatcatcatttatctctgcggctttgtgctgttcatgaagcatgtgatgaacagctccattgccaaacgggaggaaaaggcggctctgaaggccaaggctgccgcggaacaagatgcggccaacgggaaaggaggcgatcaggcatgagcttgctgctgcaatataccctgatctttgcctccgtgctgatcctggtggctctgggcggctgcttctccgagcactccggcgtgatcaatctgggtctggagggcatcatgatcatgggcgctctgggcggtgccctgacgatgcgctatctgggagagaacagctctcattttgtgacgatcctggcagtggtgctggtttccgccgcggtgggcatggtgtattcctgcctgctggctgtggcctgtatcaacttcaaggcagatcagacgttggtaggcacagctttgaatctgctgggcaccgctggggccaccgtcattgtcaaggccatcaacactgcggccaatcccgatgacgtgtcctccatcattcagtacgccggtgccaaaaaggcatttaccgtgagcatcggctcctttgagttcagctggttcatgctcattacggcgcttttgctggtagcctcctatgtgctgctgtacaagacacggttcggcctgcggctcatggcctgcggcgagcatcctcaggcggcggacagcgtgggtatcaacgtctataaaatgcgctgggccggtgtgctgatctccggtttcttgggcggcttgggcggcatcgtgttcatcaccgccggtgtgtccgagtggcggtttgagtacggcgtggctggctttggcttcctgtctctggcggtgatgatcttcggccagtggaagccccagcgcatcgcgctggcagcgttgctgttcggctttttccgggccttgggcaacgtctacaccggctttgccttcctgaaggtcatgaatctccccagctccgtttacaatatgctgccctacatcatctccctgatcgtgctggcctttacctccaagaactcccgcgcacccaaggcggagggcgttccctacgacaagggtcagcgataaccgaatcgactgtttgcgcttcaaaaagcgtctttccgcattgcggaaaggcgctttttctctgctttttttcggcagagaagtgatttgcggaacgatttgacatggattttacatggtttgtcttttgtcctttacatacagccggtacactgacaatgtgaaaaggggaaaacccaaatatcaaataaaaaaggaagacaaacatgaaaaagacacttgcattgattttgaccctggccttgagcctggcggccctcaccggctgcggctccaagacggaaacgcctgctgacacgaacaccgacagcagcgcgcagacggaggctcccgccaccctctccggcagcgtgtccaccaacggctccacctctatggaaaaggtcatcggcgctctgagtgagcagttcatggccgacaacagcggcgtcaccgtcacctatgatcctaccggctccggcgcaggcattgaggctgccagcaacggcagcgccgacatcggccttgcctcccgcgccctgaaggacgaggagaaggccggcggtctgaccgagaccgtcgtggcgctggacggcatcgccgtcatcgtcaatgccgacagcaaggtggcggatctgacggtggagcagatcggcaagatcttcaccggtgagatcaccgactggagcgaggtgggcggcgatgccggtaccatctcctgcatcggccgtgaggcgggcagcggtacccgggacggcttcgagtccatcaccggcaccaaggattcctgcaagctggatcaggagctgacctccaccggcggcgtcatcgaggcggttgccggcaaccccaacgccatcggttacgcatccctctccgctgtggagggtaagaacaccgtcaaggccgtcaccgtaggcggtgtggcctgcacggaggaaactgttctgaacggcagctacgccattcagcggcccttcgtgctggtgaccaagaccggcgagaccctgtctcccgcagctcaggcattcttcgactacgctacctcttccgctgccagccagctgatcaaggctgctggcgcagtgccggtcgcgaaataagggagcaatcggcgcggatctcgtacatcgcctaagatctgttcgatcaaagaagtggggaggacccccacagggttcctcccacacccttccttcccacaacatgacaagcccgcctccatctatcaccgtaggtggaggcgcttcctgtaaaaccgagaaaggagccagacatggactctgacgcaattctgaccgccgtcaacgcggtggaaagcattacaaattccccgcatacaccggagcggagcagctaccgcgcccgcaaaaccgtggagcagatcgtccatttgatttttctgctgtgcggcatcgtggcggtggcctttgtgctgctcatcagcatttatctcattctctccggcctgcctgccatccggcagatcggcctggtgcagttcctcttcggcaaggtatgggaccccaccaacaccaccaccggggcccagtacggcatttttgcctttatcctcacctcggtctacggcaccgccggagccattgtggtgggcgtgcccatcggactgatgacggcggtgttcctggccaaggtggccccgccgaagctggcggccgtgatccgcacggcggtgcagctgctggcgggcattccctccgtggtgtacggcctggtgggcatgatcgtgctggtgcccgccattcagaaggggttcaatctgggctccggcgcctgcctgctagcggccatcattgtgctggccattatgatcctgccctctatcatcaacgtgtcggaaacggcgctccgggccgttccaaaggagtacgaggaggccagtctcgccttgggcgcggcggagatggagacctatttccgggtcagccttcatgccgcccgcagcggtgtggctaccgcggtggtgctgggcgtgggccgggccatcggcgaggccatggccatcattctggtggcgggcaacgtgtccaatatgccggggctgtttacgccggtgcgctttctcaccaccggcattatctccggcatggcctacgccagtgtaggaagcctgtatcagcaggcgctttattccatcggcctggtgctgttcctctttatcatgctcatcaatgtgtttctgaacgtgtgcgtcaagaaccggaaggagggctgacatgaacggacaaaccttatcccttcgccgccgggtctacaaccgggggatgcgtgcgctggtgtggctgtgcgccggactgacctgcgcactgctggtatttttgatcggctacattttctgccgggggatcccggggctgacttgggagctgctgtccggccagaccagctatattaagaatacgattggtattttaccaaacattctcaacactctgtatatcattttgatggccatggtcatcgttctgcccttgggcgtgggggccgccatctatctgacggagtacgcggaaaaccggcggctggtgagcctcattgagttcgctgccgagaccctgacgggaatcccatccattatcttcggccttgtcggtatgctgtttttcgtgcagaaaatgaatttgcaggcaggtgtgctggcgggcggactgactctggtggtgatgatcctgcccaccattctccgcactacccaggagagcctgaaaaccgtgccccagtcctaccgggagggagcattggggctgggagccggaaagtggcgcatggtccgtaccgtggtgctgcccaacgccatcgacggcatcgtcaccggctgcattttggccgtcggccgcatcgtgggggaaagtgcggcactgctgtacaccgccgggttcggtttggtgctcaacgattttttcacggcccttcattcctcctccgccacgctgacggtggctttgtatgtctacgccaacgaacggggcgagacggcggtggccttctccatcgccaccattctgatgctgttgaccctgctcatcaacctctccgccgtgtttctggggcggaagctgaaaaagaattgaggagatcctatggaaccaattttggaagcaaaaaaactgaatctctggtatggccccaaccatgcccttcacgatgtatccatcgccattcctgagcacgaaatcaccgccttcatcgggccctccggctgcggcaaatctacctttctgcggacgctgaaccggatgaatgacctgatcccgggtgtgaagctcagcggcgaggtggatttccacggacaggacctctacggcagctctgtggaccccacatggctccgcaagcagatcggcatggtgtttcagaaggccaaccctttcccgatgagcatttacgataacgtggcctacggcccccggacccacggcatccgaaaccgggtgaagctggacgagatcgtggagaactctctgcgttccgccgccatctgggacgaggtaaaggaccggctgaagaaaagcgccttggggctttccggcggtcagcagcagcggctgtgcatcgcccgggctttggcggtggagccggaggtgctgctgatggacgaatccaccagcgctctggaccccatctccacctccaagatcgaggatctggcggcggagctgaaaagccggtacactgtggtcatggtgacccacaatatgcagcaggccgcccgtatttccgacaacaccgcctttttcctgctgggggagctggtggagttcggcaagacagagcagctgttttccacccccgccgacaaacggacggaggattacatcaccgggaggtttggataagatgcgcaataaattcgacgaacagcttttgcagctcaaccacgagatgatcgagatgggggcgctgtgcgaggaggtcatcgccctgtcctctcaggcgctgacggatggggacacggcgctggccgccaaggtagctcctctggacagcgagatcgaccacaaggagcgggagatcgaaaacctctgcctgaagctgcttttgcggcagcagccggtggcccgggatctgcggcagatctccgccgcattgaagatgatcaccgacatggaacgcatcggcgaccaggcggaggacatcgcagagatcgtagcctttttagacgggaggcaggcggaaaacgacgcccttttgaaggaaatggcgaaggcggtcatacaaatggtgacggaaagtgtggacgcctatgtgaaatgtgatataatgttggcgaaaaaggtcatcgcggcggatgacgttgtggacgagcagtttgcccgggtcaagcagagcctgatcggaaagatcgcggcggacccggcagacggcgaatacgccctggacctgctgatgatcgccaagtactacgagcgcatcggcgatcacgccacgaacattgccgagtgggtcatttactccgtgaccgggacccacaaggacgaaatcacactgacataaggagattgctatgatctggtgcgtggaggacgacgccagtatccgggatattgagctgtacgccctgacatccaccggctttgaggccagaggctttgacgatggagcatccttctgggaggcgctgcagacggaaacgccggagctggtcctgctggatgtgatgctgccgggggaggacggtgtgtctctgctgaaaaagatgaaggccgcaccggccttgcgggacatccccgtcatcatggccacggccaagggcgcggaatatgacaaaattcaaagtctggacttaggggccgacgactatctggtgaagcccttcggcgtcatggagatggtttcccgggtgaaggcggtgctgcggcggtgtcatcccgccgatacgggccatgtgctctctgccgggggcctttctatggacctggactgccgcaccgtgacggcggacggccagcggctccagctcacttataaggagtttgagcttttgcggctgtttctgtcccatccgggaatggcattcaccagagaacagctattcacacaggtgtggaatatggagtacatggatgacagccgcacactggatatgcacatccgcaccctgcggcagaagttaggggcctacggcaagctgatcgagaccgttcggaacgtgggctaccgtatggagaccggcctatgaccgggaagatctttcgttcgactctggcggcgtcactgacggtgctgctggcatcgctgctggtgatcaccggctgcctttacacctatttcgccacggtgcgggaacagcagcttcagacagaactgacactggctgcggcggcggtggaagcggacggcgcggactatctggcccgcgtccgggacacggcggagcggctgacctgggtggcatcggacggcacagtgctgtatgacacccgaacggatacgcagcccatggaaaatcatggccagcgggaggagatccgggaggcgctcaccggcggcagcggcagcagcgcccgctattccgagacgctgacggaaaagatgctctatcaggcggtgcgcctgacggacggctctgtgctccgcatttccggcagtcagaaaacggtatggatgctggttcttgggatgctccacgccgtcatcgtggtggtgctgttggcggtgggactttccgcactcttggcgagccgggcggcccgacgggtggtggagccgctgaaccggctggatctggagcacccgctggacaacaacgcctatgaggagctgtctccgctgttggggcgggtctacgcccagcagcaggagatccgccatcggaccagagacctccggcagcggcaggacgaatttgaacagatcaccggcagtatgcgggaaggtctggtgctgctggaccacagcgggcgcatcctcagcatcaatccggcggcccaagcactgtttcatgcggacggtacctgcgtaggacaggatttcctgacagtggatcgccatccggacctgaccgccgccatccatgacgccgccgagaccgggcacagtcagctgcgggcaaagcggcgaggccgggaataccagcttgatttcagccgtatcgaatccaacggcaaggtgctgggtacggttttgctggcctttgatgtgacggagcaggcggaagccgagcggatgcggcgggagttcaccgccaacgtgtctcacgaactgaaaacgcccttgcagtccattatcggcagcgcggaattactggaaaacggcttggtgaagccgggggatcagccccggttcctgagccgcatccatcaggaggcggaccggctggtggcgctgatcaacgatattctccgcctgtcccaattggacgagggcggtgcgttgccccatgagcaggtatccgttttggagttggcgcaggaggcggcccgctctctgacagcacaggcggcggcacaagcggtgcacatttccgtgactggcaccgccggaacggttttcggcgttcggcggctactgtacgagatcgcccgaaacctctgcgagaacgccgtgaagtacaacgtccccggcggaagcgttaccgtagaggtggcggaaacggatcgggacgtgaccctcttggttcgggataccggcatcggcatcccggagggggatcagagccgggtctttgagcggttttaccgggtggataagagccattcccgggccattggcggcacggggctggggctgtccatcgtgaaacacgccgtagcgtatcaccacgggaccctccggctggaaagccagccggggaagggaaccgtgatcacggtgacgctgcccaaggagccaacagaatgaacttcggaaaaccgtgggtcctcccacggtttttcttttcaaacggccgctttccgtgtatactggaacaaaaaacgaacgaggtagaggattatgccgatttttgatacccatgcccattatgacgcggaccgctttgacagcgaccgggatgcgctcctttccgccatgccgggggtcggcgtggggctggtgctggacccgggatgcgacctgccctcctctcgtgcggcggcagagctggcggagcggtacccgcatgtgtacgccgccgtgggcatccatccggaggactgcgacggctttcaggacggcgacctgacggagctgcggcagcttttggagcagcccaaggtggtggccatcggggagatcggactggactactactgggaggacaatccatccagaacgtttcagcagacggtattccgcaagcagctggcactggcggcggagttggatctgccggtgatcgtccatgatcgggaagcctacggggactgccttgccatcatcaaggaatttcccaccgtcaccggcgtgttccactgcttttccggctcgccggagatggcggaagagttgctgaagcgggggtggtatctgggctttgacggccccatcacctataaaaacgccaagcgggccccggaggtggcggcggtgacgccgctggagcggatcgtggtggagacggacgctccctatatggctccggtacccatgcggggcaagcggaatgacagccgctatctcccctatgtgatcgagaaattggcggagtggaagggcgtgacggcggaggaaatgacccgcgtgacgtgggaaaacggcagacggctgttccggatttgagataaaaacactcccgcaccgaaaaggtgcgggagcgtttcttatgtatgcagcaaaacggatttcacgatgatgctgacgccgcccagcagaaaaaacacgatggacagcttttgcagccgctctccgctgatgtgaggggagaggagccaggccagccgggcggcgcagaaggcggcggccagcgagataaggctgaagcacagggaggagcggttcaggagcccggtgcagagatacagcccggtgcggaacaggttttcacccagaaagaggaagcaaatgctgcccttgaattcatcgtaatccttggcagtgcgctgaaggtaggctaccagaaacatattgatgccgaacagccccgcgcacataccggagaagaaggccaccagataccgcagccacgggatctcccgacggtccgggcggacggggcgcagccggcgggtggccatttccagtcccagaaataccacaacgccgcccaaaaccgttttgatgatccagggcagggagaagcgcagcagccaggtcccggggaccaccccggccaccatggccagcagcaggggaaggatggcccgccagcggaaattgttccggctttgccaggtgatccggccgttgatgaccagatccggcagcagactgcccggtgtgatcagggtgttgtccagccgcatggccagcagcggtgcggagatcaggggattcccgaacccaatgagccacttgagggtgtacgccgccaactggacgagaaaaataaacaggatcatgcttccggtgtagttcatgagatcccctcccacgcgaagttctgtgtacgttcccaactataccacatcgcatcggagaaaaaaagcttttttctcatttccgcgccgctgacagtggaaaattgccgggtttggtatagcctttggattttttgaccatactccttccgtacctataaacaggaagggaggtattgtatggaaaacaaggtaaaaaacgtactttcgggcattggcttttacggcacgctggcggtgtgcctgctggtggtgggggtgtgcggctgggtcctgctgcaggaccgggaggacccgctgccccagcaggcggtgacgccccaggtctccgtgtcgcagccggtggaaatgccggaggtgcgacttccgacagtggagactttggagccggcgccggtgccggtcccgccaaaggaaaccaaggagctgccggaggtggaggtggatcacacgcctgtggcggcggaagccccccgtctggtggtggccccgctccgaggggatgtgctgacggctttttccatggaggagctggtatacagtcctactttgggagattggcgtacccacaacggcgtggacatcgccgcccagcagggaaccacggtactggcggcctccgcaggggcggtgctgtcggtgacggacgatcccctgatgggcaccaccgtggtgctggagcatgacaacggctatcagaccacctatgccaatctccaggccaagcccaacgtggaggccggggacccggtgtccgccgggcagatcatcggcgcggtggggaccaccgcggcggcggagtccggacagccccatctgcacttcgccgtcaccaaggacggcaaggccgtagaccccaacgaatatttgagcggttgagcggaacaaggccccggatttccggggcctgccgctttttttaaccgttttcccggggaaagttacatcaattcggatttttttgaaaaaattcaatattttccttgacatttgctgtatttcggatataatgataaagcttgcaatatgtaagtaaatccttgctctcatctgagaatgagggccatttgtccaaaaggaggtgcaaatatggcaaagattactgccaattacgaggtcgtctatgtgctcgaccctgcacagggtgaggaggctatcgccgctcaggttgcgaacttcaagtccctggccgagcagaacggctctgacgtcgtggttgaggagtggggcaaccgcaagctggcttatcccatcaactacaagaccgagggctactatgtgctcatgaccttcgtcagcggcccggcattcccccgcgagctggatcgtaagctgcggatcgccgagggcgtcatgcgttccctgatcgtctgcaagggcgagtaaaggagcagcacatgctgaatcgaatcattctcatgggtcgcctgacccgtgaccccgagctccggcgcaccggcagcggtacggcggtgacgtccttctctctggctgttgaccgggatttcaagtcccagtccggcgaaaaggaaacggacttcatcgacatcgtggcctggcgcaacaccgccgaatttgtgagcaagtacttcaccaagggccgcatggccgtggtggagggccgcctgcagatccgggactggaccgacaaggacggcggcaagcgccgcagtgccgaggtcgtggccgacaatgtgtatttcggggattccaagcgcgacggcggcgacaattccggctacaaccccggttatgctcccgcccccgcttcccacagcgccgctcccagcaatttcagcgccagcggctctgacttcgccgagatcggcgaggatgacggcgaactgccgttctgatattactataaggaggaagcaatcatggctttcgatcgtgaagctcgtcccgcccgtcccgcacgcggcaacaagcgccgtaaggtctgccagttctgcgccgagaagtgcgagtgcattgattataaggacgccgccaagctgcgtcgtttcatttctgagcgttccaagatcctgccccgtcggaccaccggcacctgcgccatgcatcagcgtgagctgactgaggccatcaagcgtgcccgtcagatcgctctgctgccctacgtcaccgactaaaagcagctgaatcgaatcaatcgactgaaaaagccccgaaggttttccttcgggctttttttgtcatgttttaggagaaaaaggggctgctgcacggttccgtacaacttttcccggtggtgggggatggcgaatatggcggacgcaattcgttacggctgcataacaaggaggaattgtatggaaaacacaagcaattacggtctgaagcgctgggacggcgaggaccgcatcctgcacacggaattcaatgacaactgggacaagatcgacacggccatcaagggcagtgccgacaaggccgcagcggcgctggcggcggcctcagcgctggaaggaaagctggggttgcagctgatccagaccgtgcaggtccccagcggcagtgattttgcggaggcaagcatcagcgtagattgggaccagtgggccgaaattcatctgcttttccagccaaagctcaccgggactaccacttacagcatttatttttatgacacggtcaacaaacactctgccagccttgcggagaaccaatccggtatctggggcgctgtgctctaccccatgtttgacaagaccagaagcatgaccggccacacctggcagggcagcgccatctcggccacggcgctgtatcagaacttggggttcttgtgtaccagcgtggcaaggggcagcagcattgcggcaggtacaaccatgaccatctacggcagaaaataaatataaagccctcctgagcaaatgctcaggagggcttacttttattcagtcaaactgacggaatgaaagattaggagtagaccacagtggagccagccacggtgtaggtggtgccgtcaaggccctcaaaggtcagattgacagtcacattcaccttgtagccggtaccgatgctggagatctcagcggggagcttcagagcgtccacaatatctttgatctcagtatcagtggtgaccttggtggtctcggtgtaagtgtcaccgttgacggtggccttcacaacagcggtagccttcgcggtcttccaaccatcaatcacagtaccatcgatcttgccgctcacataggcgatttccatagcagaaacatctgcagtgatgctcatggtgccgtcggtcttgacaacaggcttgctggtgtcaggatccttgacctcgaagatcaccagagtcttcaccagataatccttcacgatggcatacacctgatcgttgtcatccacagcaatggacttgtaggagctggtggagatgttgccgtccttgtcgacatagtagatgtcggccttgtcgtcaacagtgatggtctcattcttaggcatgctgtacttgccagcggtgttcaggatgacagtgtactccttggagaccttgtcaatgccttcgccaacgaaatactgcttggtgatgccgtcgctgtaaggagtgaactcacgcagagtggtgatgacaccatacttgttggtggcatagctcttgtacagaccgtccgccttaacagccttagtagaggtaatgttgccatccttatccagaatcttggcgtcgtcagcgaccttcacggtcttgatctcgccgttgacaatggcgttgaactcatagtagtcatcgtcgctgtcatggatcaggttggagatggacttgttggacaggtacagcgcatcgctgctctcgtcgctgacatcaaccttggcaccggggatgatgaacatcacggtgaccatcttgctgttgtcagacttgcagtacagataaacgccagcctttttagcatcatcagtggctccggtggtcttgatggtgggagcgttcttgatgccggtgtaagcggtatagtcgtcagtgtcgacagtgtcgcgaaccacaaacacggtggcgctgttagcagtcacggtagacttgttcagcttaccattggtgttatcagcggtgatggtgatagaagcccggtcattcttcatgtccagagcggcatcgaggtcggtgtaagaagccttcttggtatcgacctcacgcagagtgtaaacaccatcggcgtcaaccttgtaggtaacaatgcggttatccttgatctcgttagtgccagtgctgtagtccttctcggtggtgacaaccttggtggtaccatcggtgaacagcagctcggccttcttgccgacgaaatcgcccttgttagcggtatccagaaccagagcgtagttgccgatctcctcgttctcctcgacatagatcatgtagccataagcgtccagatagacagtgtagtcttccttcacggacacgctgctcagcttctcgccggccacgtacttggaatccttgtacttggtgccgtcgatggtcagagccttggcatcattcttgtcgttgtcggtgtcgttctcggcgcgggtcacagtgccctcgaccttggtagccagagcaacggacttgatctcctgggcatccttggagtaggtgtacagaacgtaagcgtcgtcctcgaacttagcctcggtctcgaactcctcgttagcggagatgggagccttgccggagatgggcttctcgggagtgacgaccacataagcatccttggtggaggtggccttcacgctcttggcgatggtgccgacataggtgttgacctcggtgatggtgatggtatcagcatcgtcatcatagaagacctcggtcagaacgccgttgccgccgaacttggtcttgtcatcgcccttcttgatgtcgcaagcgggctgagaagcgtcctcaacgccgtccacatagacggtgacgtcagccttcttgacggtggagcccaggcccagatccttgtagatctcggaaacctttgccttagcggtgtaggtagcatcgggagtcagggaataggtgccgatctcctcagccttgaccttccactgattggcgggacgggcaaaatcatcgtgagcgttgctgttcagcttcagatcggtgaagtacttctcagcgaactgcatcttgttgtcgtccttgatggtctcggtcttagcggtgttggccatctccttggcgtcggactgctccttgatggtgatgttgccgacggtgacggtggagttcttgtcatactcgaccatggtagccttcagggtgttgaaggcatacaggcaggcctcttcacgagtgacagccttgacgccgttgaagtcgcccttcaggttcttgttcaggccgatgttgatggcctgcttggcaacgttgatggaccagttggggccggtgtagccctcgttggcggactcatagcccagagcacccagcagcatcttcatgaaagcatagccggtcagggtgttggcgggacggaaagtgccgtcagcgtaaccggagatgatgccggtcttctggcagtaagcaatgtagccagcaaaggtgtggttggtggggacgtccttgtaaggagcggcgtcagccaccagagcggatgcggtggtggggccaaggatcaggttgcagatgatcttggcagcagcgccacgggtcagggtggcggtgggattgaaggaaccgtcggcatagccgtcgataaccttcacggcggacatcacggcaacagcttcgtcataagcaatcttgctgttgtcggtgaagtccttggcaccggcagagacggtgaccagagacatggtcatcaccagagccagtaccagagaaaggaacttcttcatgggatttcctccttgataaaatgtcgaaacattcccttggatctccccgcccccggttccgggtttcgtgtcggggctagccgaacgcggaatgtgccctgagccacagccacaccgtaaaacggtttggctgctggcggacgggcacttccgcgtttttccgtccgcaagcacgcttgcgaacggagaaggggaacgcccgttgggaacaccacacgcctacaccaagcacggagcttggaggcagtttgcccgcggttctgtttcgcaagcctaatgtaacagcccccggccgggatgtaaatagatttgcccggttcgtaatgcagatgtaaaaaagtgcggaaataacgtgatttccgcactttttgttgtttgcaaacgtggcaatattcagttcgtttcaaggggctttttctggggcggcagggcgtaccgcttgccggtgaggaggagctcgccccggtctgccatgcgccgcagcagcgccgtacactgggcggggggcaggttcagaagctccgccagctccttccgaacggcggtgccgtgggcggcgaggtaggccgtcaccgcggcggactggtcctccggtaggaccacggcccccgccgggtagtagcacccgcctatacggaccacggctccgtcctgacggagctggttcagcagcttcagcgcggcgcttttggacacgcccagcaggtccatgacctcctcgcgggtcagggactcggcctcggagaggcgggccagcacggtctgacgctggctgccccggcggctgaggcggctcagatcccccaagctgagctgttccagtccgccccggatcagggcagtgcggatcacggtggagaggcgggccaggtccatgggctttccggtgccgggggttaggaggacacggtcctgggcggggtccttgcggtggtcgcagacatctcccagcaggcggctgaggcggctgcccatggggatttcccggtccggcaggcgcaggagaccccggtccagatccacctgcgaccatgtgagattcagaatttctccgggctgcatctgaagtttccagcccatccaaagggccagtcccaccacggagctgccctcctgctgcacgatccgccagaggaggtattcgctgtccggcggcagctccggcgcggcgctttggcgctcctgaaagtattgggagaaggaaccccggagggtggagaccgccatgccgctgacccgggcggcgtaggtccagtcatgagtctgaagctggcggatgacgaagtcctgacggagatccttgaggctgaccttctggccctcagtgtccagcgcggtccgggccagccgggagacggactccggcggcatgggccgctgatatcggtcggaaatgatgacgtgggggtcccgctgggcgtacaggcgatggcgctcccggaggcagtcctccgcagagggggccagcgggacggtccgatccggaagggtcagggcattgtcctcaaactgcacctgatcccaggtgagggcggcgatctcctcccggctcaggccctccagccacgccagacggagaatggccccttccgggctgtacgggaaccgagtcagtatccgctccatagcagccgggtccggccgtttgaatgtataccccattccgggacctccccttctccgccgggggtcccggcgggaaaaatcaaggccggtgaggcatatacaaaataacccttttgtaaatattcgccctctgacgagggccgcaggccgcccacggaaccaaacgaatcggggtggaagcgaaaaaagccgcactgaatgagatcggttttgaaactttcaggaccgatctcattcagtgcgttcaaagggggatttcccttgctttttccgctgcttttcagtaaaattaggttgtcgatgtggggcggcgcttttcttttggcgctgcaaagataacaaaagggttattttgtctaacagagcagccccagacgttccagccgccgcagatgctctgcgccggtggtcagcagataaatccgggtggtctcaatggaactgtggcccagaatatccgccagcttcaccacgtcctgacaggcccggtaaaaggtccgggcgaacaggtgccgcagattgtgggggaagaccttatccgccgccacgccggcagcgcagcacagccgcttcatctccgcccagatctgcacccgggaaagacgttttccgcctccggtgaggaatacctcaccggaggtgattttttgccgttttacgtattttaagagctttttgcacagcttctccggcagcaggatcgtgcggaccttacccttcagggccaccaccgcctttccacggcggagggcctccaccgtgatatacggaacttcgcccacccggatgcccgtagcgcagatagtctccatcaccagtgccagccgttccctccccagcgttctggcggtgcggaccagcgtgcggtattcttcccggtccagttcccgttccgcctcccggaagctgcggcgctggagccgcagcgccttcaccttacattccggccagcccataaaggcgaaaaagcggttgatacctgccagcatggcgttgacggtagcgggggcgtactgggccgtgagctgcgccttccatgtcaggaccagcctccggtccaccattccgccgctccaccgggcaaaggcccggactgcccgaaggtagttctccacggttccgacgctgtattccttccgcaaaagctccgcctgaaaagctgccagccggacggggtcgatccggcgcaagcactcctgtgtttccatctgtatcctcccattctattgacggcggtctctgagaaccgcgttttctctctgatctatgcaacagcatactccccacagccgccgcagacaagaaggccgccctgatcgggcggccttcagcgtgtcgaaaaagtcttttctccccgctgagcaagttttcagaacttcataaaagttctgaaaacttaggattttaatggcgcggggaaacagacgaagtgccgccggtggcggatcaagcgagtctgtttcgaggaaggctcccaatcagcggatataaagtatccgctgattggcttgagccgacggtgtatcccttcttgggtttcccgcgcacaccctttacccgcagtggggtatgcagcatccgtaaagcggcaaagccgctaacggctgccctaccttaccgtcgcggaaaatttatcactttatcgacagcctcaaggccgccctgatcgggcggccttttcctaatagagatcctaatggcgatatacggtgaaatagaggttcacacccggcggttcctgtgtgaaaataaggaaagatgtcggagatcaccggcggatatgctgggagggggaagaaacatgaaacagaaaaagggaatggagcttgtcacggagcggacggtggatggtttccgaagagagctcctccgccgggaatacagccacggcacggcggagagttatgtgcggagcatccgggccttcgcacgatggagcggcggcgcggtggatcggggcctggtcctgacatggaaggctcggctaacggcccaatacgcccccgccaccgtcaacgccatgctggcgggacttaaccggttctttgattttgctgggcggccggagtgccgggtaaaggtcctgcggcttcagcgccgcagcttccgggaggctgaacgggaactggaccgtggagaataccgggcattggtccgcaccgcccgaacgctgggtcgggagcggctggcgttggtgatggagaccatctgcgccacaggcatccgggtgggggaggtgccattcatcacggtggaggccgcctgccgggggcggacggatgttgccttaaagggcaaggtccgtactatttttcttcctgaccgactgtgccgtcggctgctgcaatacgcccggaaacaaaaaatcgcctccggcgagatctttctcaccggaggcggaaaacggctgtcccgcacacagatttgggcggagatgaagcggctgtgccgcgccgccggtgtggcggcgggaaaggtctttccccacaatctgcggcacctgttcgcccggaccttttaccgggcctgtcaggacgtagtgaagctggcggatattttgggccacagttccatcgagaccacacggatctacctgctgaccaccggcacggagcatctgcggcagctggaacggctggggctgctctgttagacaaaatgatgattttgtaattaggatgccggaaaagtacggtttccggtgggataccgggcgcagctcccgccgttttaccgggccaagcacacaaaaaggcatgttgaacagacggggcctgttctgaccggaggtcccgtctgttcagcacgccgcaaagcgaagaacgtcttgctttttcctaatttttcaagtaaactttcagttgtcggcggggaccggcggcttttttgccgccgatatgtgacaaaatcatcattttgtccttccatccccgcagcagacgatcgttccgccgcggcgctgtttctgcggcgacagatgggaggcttttccatgggacacacgttcaatcggccggacgaggccgccatgctgcgcattttggagcggcacccccacagcccggagggggccattctccgtctggcctggctggagggtttgagccggagcgagatcacagaactccgctgggatcaggtggactttgagggcaaggccattcaactcccggaccgcacggtcccgctggaaccctccacggaagcctgcctccgggagcggcacgtccgctgtgccctccgggacccccatgtggtgatctccgagcgcagcaagaagcctatgccgccggagtccatttcccggctgtcccggctggcgctggacagcgagggccagaaggtcaacctcatggacctgcgccacgattttgtgatccgccagcttcagacccatgactggccctatgtggcccgggtcagcggcatggcggtgtccaccctgcgggatgccttctcgccctatctcaccaaacccgccgcgccggaaaatcctctggcccagcgggacgaggcggagtatcttctctggcgcgtgatccagcaggagggctcgtctcccgccggactggccctctggatgggctggaagctccagatgcagccgggagagatcgcctccctcacctgggggcaggtggatttcgaccagaacctcatccgccttccggaccggacggtctccatgggcagccgcctgcggcggctgctgctggacgcttgggaccgccgcaaggaccccgcggagccgcgggtctttaccgcacccaccaccgggcggcccatggacctctcccggctgaccaccgtcacccgcacggcgctgatccggggcggcttggagcatgtgaacctgcggaacctccacacctgggtccgtcagggggatcgggcccagcttttgatggctcaggccgaggagcagggctggctgactcgcgaagcggtcatggagcggctgggcgtgtccaaaagcactgcccggcagtaccttctggagctgcgggaggcgggcaggctggtgcgggtgggcacccggtactaccccgccggggcggtggcggaccccgatgaccatctggacatcatccgggcctatctgcaagagcacggcaccggccgccgtcaggatttcatccgcctgctgggccttgaaccggagcaggggacgctgctcctccggcggctgacggaccggggcgagctggtcctctccgggcggcattacaccctgccggagcaggagaaatgacctccgctttgccccgaaaacaccgaaaccggtcaaggtccgccttggccggtttgttacgttcaaacgttgcgtgaatggcacagttctgcataaaaacgctgcttttttgcacttgtattacatcccggcgggaactatttacattcggaaatggggctgataaagtggccttgcaaagcaggatacccggaacatgcccccggttcagatattgggtaggctagccacgatatgtaaatcggggcggtaaaggggaagccggttttgcaaaaaccaactcccgacagggagaatctaaaaggaggaaaccccatgaagaagttcctttctctggtactggctctggtgatgaccatgtctctggtcactgtcagcgctggtgccaaggacttcagcgacaacagcaagatcgcctataaggaagctgttgacgtgatgtccgccgtgaaggtcatcgatggttacaccgatggttccttcaatcccaccgccaccctgacccgtggcgctgctgccaagatcatctgcaacctgatccttggccccaccaccgcatccgctctggttgctgacgccgctccctacagcgacgttcccaccaaccacaccttcgctggctacattgcctactgccagaagaccggcatcatctccggttacgctgacggtaccttcaagcccgccaactccctgaccggctacgctttcatgaagatgctgctgggcgctctgggctacaaggctgagcaggaaggctacaccggcgccaactggtccatccaggttgccaagcgcgccatgaacatcggcctgaaggatgatctggtgggcgatttcaacggtgtcaaggctgtcacccgtgaagaggcttgcctgtatgccttcaacaccctgaaggctaccatggtcgagtatgacaagaactccaccgtcaccgtcggcaacatcaccatcaaggagcagtccgacgctaaggacatggccaacaccggcaagaccgatggcaacatcgacaaggacggcaagatgcagttcgctgagaagtacttcaccgatctgaagatgttctccgctactgacgatttctctcgtcccgctacccagtggaagatcaaggctgaggaagtcggcaagtacaccgatactcccaacctgacctacaccaaggctgtcaaggctggcgacatctacaaggatttggctctcggctctaccattgataagaaggacgtcaccgtctacatcaacggcgaaaaggctgaggatgcttccgtggctctgaagaagggcagcgacagcaagatcggtaaggattatctggagaagagcggcaagaagtacagcactgccaagaacggcgttctgaccgaggtcttctatgataaggacgatgattctgccatcatcacccaggtcgtgacctatgttggccagatcaacaagtccgtgaaggccacctccagcaaggatgcctatgtggtcatcgaccagctgcccatggatggccctaacgccaacgtgatggctgttccctctgacctgaccggcaagaccgtctccggcaccctcgagttcgagaccaacgagagctatgaggacgacgcttatgttctgtacacctattctcagaccgctgacgaggtcaagtccctcgccgtggccgagaaggtggagggctatgtctctcagactatcaacaagactgatgacaaggatgcgaacaacggcctgaccctcgctggcacctcctacaagatgtccgctgcttactccggtgaggagctgggcgagatctccgtcaaggaagatcacaccgcttacctcgaccagtatggctatgccatctatgtggaagaggttgaggagatcggcaattatgctctgctggtgaacgtggccgataagggcaccttcgtcggcaagaaggctgagctggtcttcaccgacggcaccaccaaggtcgtcactgccgagaaggattactccaaggtttccaacctgaagctggatctgaacggcgatggtgattatgataaggacgaccagaagatctgggataatcgtacttcccccatctccggcgctctgaaggctcccgtgatcgtgacctacaaggtggataatgacggcgtctacaccctgaaggctgttgctgtcgctaagacttcctatgtggatgctgacagtaagctggtcatgaccaacgacaaggccggcatcactgttcaggctgacaccaacgacaagagcctgaacacctccaaggtcaccgccaacagcgcttctcagttcgtggttgccgatcggtccaaggacggcaccttcgacgattacaccgcttacaccggcatcaagagcgcaccctccattgatgctacttccggcaaggctggtgtgtacttctactgcaagtccggcaagatggtcaccgtcatgttcgttctgcccaatgataagtgcgacgtcaccgacgacggcaaggacatgatctatctggctcaggattccgagtccgatctgtatcacgacaaggacggcaactacttcacctatcaggctgttgtcgacggcaagatcaccacggtcaaggtggatgaggaccatacccccaacttccgtaccgcttccatttacaagagctactccgtcaaggacggcatcatcaccaagctgggcgataagtatcccacctatgatgaggctaataacaacaccaagcagtatgtctccggcgctggtatcgacaagacctccaaggagtacactgtgactttggacactgtcgataagaagtatgtcatcaccgttgatgacaaggccgctatctactatgtggataaagacggcaacatctccgagtccagctacaagtctatctctcaggatgacaacgaccgtgtctatgccatcgttgaggataacctggtgaagttcctggtcatcgaagaagttcccaccgagaaggacaacgccagcggcactgctaccgtgactgctgctgtcaacggcgagaccaagaccagccccgttaccgctaccaagggtgacaccgtggttctgaccgccgtgggcgagggtaccaccaagtatgataccgtctacgcctatcagtggttcaaggacggcgagaagctgaccggcgagactggcaagaccctgaccgtttctaccaccaaggccgctgccgctgctgagtacgtctgcaagatcaccttcttcaacgacaaggttgacggcaaggattatgtcaccaccgtgtccaacaaggtttctgtgactgtcgaggaggctcccgtggccgacatgaacgtcctggtcaactatgttgaagccaacggcactgttgtggctcaggagaccacctctgccaaggctgctgacgctgtgaacggctatgtcaccatcaaggctaaggatcctgatggttacaccgtcaagggcctgaagagcaagatggttgagttcaaggccggcgccaacgtgaccgttgagttcactgttgaggctaactgaacctgaataccggcaacggtacgcatcaaagctcatttgagctgagataaagcaagcccccgctctttcgagcgggggcctgtttttgcttttattaccggatgccgtaaaaggttacctttgccccggcgatggagccgctgtcggtgtccgctttcagctgaatacccgttagtgcttcataagtggtggtgtaggatagcttttccgcgctccaaagaaggccgcggaccggacggctctggtcatacaaagggaaatagagcgcgcaggtttgcacgtcagggccgttataaatgatcggatgcacctttgcgttggcggttgtgaaggagagggtatagctgcggccgtcgcttggctcctgataaaccgccagcacgatcgcccaatcactccactggatggtcagcggcttgtcagctgaggaacctccctctggaaagggaacggtctggatcagctgcaaacccgcttttttgcccagcgccgtgtccgccgcctcccgcgcggccgtctccgccgccacggcgtcggcattgcctttcagcgccgtgtcgatggcggcgttgtcgcggttgaagtcctccatcatgatacggtccgtcttttcccactggtttaactgaaaattggctgttttgttcatagataacatcctcctgtcacacggatgtaactttgggggcgccgccgtgtgccccccctgtatgaggggcgtttgctgcacggtttcgtgcaacggaagtgaaaaaaccgccgcaccgttcacaaatggtttacaagtttttcatcttcccttcagatttggggtgtatactgcgtacatcagcaggcgagagagccgtttcccggccccgccgctgatccgagagaaaaagccattctttcaaatacacccctacggcccactgcccgcccgggaggagtcccaaaccggcagaccaacgatcccgccgcaggcaagcggcgtgttgatagatcttttcatacatgacctctccaaagcaaggcggggcgccggttttccaaaccgacgccccgttttgccccgttttgcccgcgagacctgttgaaaaatgtcagaacagccaaagggagacgagggcggccagcagcgtggacagcaggccgtgggtcagcttgcccagcaggcagggggcgagggggaggtccgtgccgtccagaatggcggcggtctggcagagaacggacagcccgccccatccggcgcacccggcggtcagcaggaaaccggtgcggtcacagggcaggaggggcgtcagggagaacagctccccgcagcccacggccatagctgcccatgggccggggagggccgtcaggggcgagatcagcacatagaagaacgtgacgaaggcgcagacggagagcatggtcccggcgctgtcccggacggatgacacaaaggccgctggcagagagggggcctgaaaggaaatggcggggggaacggttttccgtccccggcccagtccccggaacagcagcccggtgaggagggcggcgcagacgtggatcagccagagccacaggcccgcccggacgctgccgaacacccccgcacccagcacactgatgaggaacacggggttggagttgttgcagaaggtcaggagccgctccgcctcctgccgggtcaggtccccggaggcgtacagctccgccgctgtgcgggcgccgatgggatagcctcctaccagccccagcagcagcgcggacccggcgcagccgggcaagcggaacagggacgccatcaggccagccatatcgggcgccagccattgtccgaagcccagccgcaccagcagaccggtgacgaccatgaaggggaacagggcggggatcaccgtcccggcgcagagggtcagggccttggctgcctcgagtcgcagctgtctggcgtccgccagaaaccagaccagaatcccgcacaggatcaggcacacatccgtccgtatccgccgtttcatacgcatcacccgctataccctatgcggggcgggggcggttcatacggcgggacaggcaagccagggggaatttccgcatagagttcggtgaggtgagagcatggagaaaaaacgggaccgggagcagggcggtattctgggcggcgtggcggagctgtttgacctgccggtggatgtggtggcgggcctgccacgattggagctgatcgggaaccggcagctatatctggaacgccacacgggcctgctggcttacagcgatacccagatcgacgccaacaccggcttcggcgttctgcggattcgcggagaacggctgacgctggtggccatgacgggagaagaactgcggatcggcgggaaaatcaacggcgtggagtgggtgtcatgctgaaggagctcatcaacagggcccggggacaggtgtggctccgggtgacgtgtccctacccggaacgggtgctgaatctgtgttccgcccggaagctggccttctgggatctggaatgggaaggggcggagacgtttacctgccgcatgagccggggggatcaccgcatcctcagccgcgcggcggaaaagctggactgtacgatcgaaatcgtgcggcgggagggcgcaccctacacgctggcaaagctgcggcaccgtcaggccttggcggcaggcatcgcggcgtgcggagcggcggtgctgatcgggtccttcttcgtgtgggatattcagattgccgggaatgaaacggtaccgcgggaggtgatcctgcgatccctggagaaaaacggcgttcatcgggggtgcttcggcttcgccctgaatggggaggacatccgcaaccatgtgctgctggagatcccggagctgagctgggtggcggtgaacgtatccggctgccgggccaacgtagaggtacgggaacggcggacggcaccgaagccgctggaccggaaaataccgtgcaatttagtggcccggcgggacgggctggtgctgcgggtgcaggcactggggggcgtccctcaggtgctgaagggaatgtcggtgacggaggggcagctcttgatctccggcgtggaggacacagggaccttcggtacccggttcacagcgggacttgggtccgtggaagggcggacgtggtacaccctgacagccaacgtgcccctcaccggggcagaaaaacggtataccggacgggaaaagcggctccattccgtgattttcggcagccgccggataaaattctttgcaaacagtagcattgacagcggccagtgtgataaaataaccgagagaacgccggttcgggtgtgcgggatcccgcttccgatcatttgggagacggagattgtccggttttacgaaacggagccggtgacggtcacgcaggcccggcggcagaaggagacgggggcggcgctggaagcgtatctccacagccttgtggacccatacggcgaggtaacggccagtcaggtggcctcccggctccggggggatgtcctgacggtgacgctgacggcggagtgccgggaggaactcgggacgcaggcccctatttatacagcaaatgaaccggacggcgcgtccggataactttaggagtgatggcatggaacagaggatcagcattgagcggatggagcaggcagtcaatattttcggctcctttgacgagaacatccgcctgctggaaaaggaatttaatgtgacggtgaccaaccgggacggcgagctgcggatcagcggcgaggcggaggacgtgatgcacgccgccaaagcggtgcaggccatgctgaccctgtcctcccggggggaggcgctgggagagcagaacgtccgctatatcattgacatggtccgcaccggcaaagaggagcagatcagcgagttggcgggggatgtgctgtgcatctccgccaagggccgcccggtgaagccgaaaacgctgggccagaaggaatatatcgcgtcggtgctgaaaaataccgttaccatcggcgtaggccccgccggtaccggcaaaacgtatctggcggtggcggcggcagtgcaggccttccgggaaaagcaggtgaaccgcatcatcctcacccgtcctgcggtggaggccggcgagcggctgggcttcctgcccggcgatctgcaaagcaaggtggacccgtacctccggccgctgtacgacgccctgttcgacatgctgggggcagagacctaccagaagtatctggagcggggcaacatcgaggtggcccccctggcctacatgcgcggccggaccctggacgatagtttcatcattctggacgaggcccagaacaccagccgggagcagatgaaaatgttcctgacccggctgggcttcggctccaagatcgtcattaccggcgacgtgacccagatcgatctgccggacggcaagccctccggcctgcgggaggccatgcgggtgctgaaaaaggtggaaggcatcggtatctgcgagctgaccaacgccgacgtggtgcgtcatgtgatggtccagcggatcgtgaaggcctatgaagaatacgaaactgccaaaaacggcggaaaggggaagaaataatggcaaaacggcactatattcccatcaccgccgacgtgccgggggtgaatgagggccagcgggcctttatccgcaaggtcatccgcaccgctctggcggcagagggggtggattttccctgtgaggtggacgtgctgctgaccaatgacgaggccatccatcagatcaatctggatatgcgggaagtagaccgggccacggatgtgctcagcttcccggagttcgacctacagcccggcgagctgcccggagaagaggacgccgaccccggcaccggactggtgcccctgggggacatggtgatctccatggagcacgtggcggctcaggccaaggagtacggccattccaaccgccgggagctggcatatctggtggtgcactccgtgctgcacctgctgggctatgaccatttggacgaaggcccgcaaaaaaagcagatgcgggcaagagaggaagccattttggcggagctggggatcacccgggaggactgatatgggaaaattcgcgttatatacgattgggtttgctttgcttgcctgcgtgccggcgatactgctggcagggatgttcagcggcggcgggggagatgtcgcaccatttttgctggggctgctggcggtgggagccgttttggcgggagccgtctgtctgaaggacaagctggatcgaatggaggaaacgctgaaagcggtgtccaagaccctccaagaggtcaaaacagaattggaaacagtgaagggacggcaggaagtcgcggagatcaagctggatactgtggcggcgaagctggatacggcccgcgatatagattgagtgtgtcacacaggcggagatctggccatatactgtcctgaggtgatgggatgaacgtatttcgggacggcgtgatcgcctttttctccgccgtggggatgaccacggtggtgtggctgctggcaggagcggtgctccacgcagggcggcccacgatcccggggcttttgctggtactgcctgtgcggggtgaggcgttagccttggagcacgatgtccgggagctgcgccgggtgcggagcagtctgccgggtgcacggatcgtcattgccgactgcggcctgacggcggaggccaggggacttgccgactatctggcggagcgggaggacaacgccgccgtggtggacggggcggacttccggctggacgccggagacaagagataaaaatgccggtcagggaccttgtgtaagaaggactgcgctgcaccggcacgttaaagagaggaagtcatggaagaactgatctgccgggagggtacagtacatagcgttatttttcagaacgccgaaaacggatatacggtcctccgtctcctcaccgaggagggggaggtcgttactgtggtgggatgtatcccctgtgtggcgccgggagagcatctgaccattaccggtacctgggaggtccatccccagcacggcgagcagctgaaggcgcaggagctggagcggacgctgccggaggaggaagaggatatcttcgcctacctgtcctccggcgtctgcaagggcgtgggacccaccaccgcccggcggatcgtggaccggttcggcctggagaccctggatattttagaggcagagccggagcggcttcaggagatccggggcattaccgcgaaaaaggccatggagatcggagagctgttccgtcagcacatgggcttgcggcggctgatggaatttctatcccggtatcagctgccgccggtgctggccatccggctgcggcagcagtatggggacggggccatccgggtggtggagaaaaatccctatctgctgtcagacgatgtatgcggcgtggatttttccgtgacggacaccatggcgctgtccatgggatttgcagaggactgcacggagcgccttgaggcggccctcacttttgaactgacctataacgagaataacggccatgtgtttttgccgaaggacaagctgcttgccgccacctgccagctgttgggctgcgggatcgagcaggtggaagcggcactggacgccctggcggagcatcacgccgtggtggtccagagaatcgccaatgtggaggcggtgtacctgcggcgactgtgggaggcggagacctccgcctgtacacgcctgctggcgctgctggaaatggacgccgacgagggccggttcgcggatcggaccgtggcggaaatcgagaaggaacagggcattacctacgcccccttgcagcggcaggcggtagagctggcggcgaaggttggcgtcatcctgctgaccggcggtcccggcaccggcaagaccaccaccgtccggggcatcgtggccctgtttcagaaaatggggctgaacatcgtgctggcggcccccacgggccgtgcggcgaagcgcatgagcgagctgacgggcatggaggctcagacggttcaccggctgctggggatgacatggaatgaggcggctcatcaggtgaccttccagaaaacggaaaaggagccgctggaggccgaggccgtcattgtggacgagatgagcatggtggacgtgtccctgttctccgcactgctgcgggcgctgcgccccggcacccggctggtgctggtgggcgatgcggaccagctgccctctgtgggggcgggaaatgtgttttccgacctgatccgcagcaagaagatcgagactgtgtttctccgggaggtgttccggcaggcggagcagtccgccatcatccgcaacgcccaccgggtcaatctgggcgaaagcccggacctgaaagggaaccagggggatttcttcttcctttgccgtcgggacgcccagcgggcggtggcgacggtgctggaactgtgcaagacccgcctgccggacaatatgcacatcccggcggagcagatccaggtgctgacgcccacccggaaggggccctgcggtaccatcaacctgaaccggctcttgcaggaggcgctgaacccccggacacccggcaagcgggagatcctgtggggggagcgggtgttccgggtaggggaccggatcatgcagacccggaatgattacgatgtggtctggcagaaggatgacggcaccgtgggtaccggaatgttcaacggcgacgtgggccgcatcgcggagatcgacgccgggggcgagtggctggcgctggactttgacggccggaaagcaccttacagcgtggaaatgctcagcgagatcgacctggcctatgcccagacggtccacaaggcccaaggcagcgagtaccgctgcgtggtgctggcggccatgccctccgcccccagccttatggtccggggggtgctgtatacggcgctgacccgggccagagagctgctggtcatcgtgggcgatgacgcggccatccgctctatggcggccaatgaccggcagcagaaacggtactccggcttgaaatggcggctgtgccacgccggggatgccagcgaataaaatggataagaaaaagccgtccggcggagctggacggcttttttggcgtattttcagcggttttcccggtagaatttcagggacagcgggatggagacggcggtggcgatgatggtcagcgccagcagccccggcagtgccagagaaagaaccgcggctgctacggccttggcgtcattgaccaatccactgagcgcgcctacggaggcgcagatgaggaaggtcatcaaaaaggtgatccaccgggccttttccgtgccgaaacgaagcatcagaggaatgttgatgtccagcagaaccagtcccacgcacagagcggtcagcggaagccacagcggacagtcgaagcgcgggaaaaacagagagaggacgctctggagcgtaagcatgaccgcgccgccagcggcgatgcagagccagcccagcgcataccggctgagcaccacagtccgatccgaatagggcagcatccgggcaaagctgtcccagcggctccgctggtcataggccatgacggaataggggatcatggcgccgtagaccaccgccatgaggttgagataaagcgtggggacgacgctccagatgaaaagcaggacgaaccatacccaaagctgcttccgcagtatataccaatcctttaagagcagggctttcattgcttttctcctttcaccagagcgaggatgatgtcctcaatggtgggcttttccagttggaagcccaccggggccagctcccgccgcaccagcgcccggacaccgccgtagggcgtggtctccatggacacgatggcttccggcatgagggcctccgcttgctccactgtgtcgttgaagatgccgtattgctccagaagggcgtccttttcctcgcagaacagcagccgcccctgatggagaaaggcgatgtagtcgcagagcttttccaaatcgctgagaatgtgggaggagatcaggacagagtgggtttcgtcccgggtaaactcattgaaaagctccaagatctcgtcccggacgatggggtccagtccggcggtggcctcgtccaacaccagaagccgcgcctgatggctgagggcaacggcgatggtgagcttcatcttcatgccccgggaatagtccttgaaggcggttttctctggcagggcgaagcgccgacaataggcgtcgaaggtatcctgctcccagcggcggtaggtggcggccatcacatggcccacctgcggggcggtgagggtctcaggaaagcacccctcgtccagcaccacgccgatgtcctccttggcgttcaggaactccggggcggagacgtccacgcccagcgcggcggcggtgccgctgtccggccgcagcgcgcccatgagaatgcggatgagggtggatttgcccgcgccgttctcgcccaccagaccgcagatggtcccggcgggaacggcgagggtcacgtccttcagagaaaactctccgaaggatttgctgatatggttcaattcaatggcgtttgtcatagagatccctcccacttgcggcgcagcagctccgccaattccgactctgaaaggccgcaggtccgcgccagctctgcggcggcggtcagatggtcctcaagctggcggagcgattgctcccggaacagagccagatccggctccgccacaaagcagcccttgccggccacggtgttgatcagcccttgggcctccagttcgtcataggcccgcttggtggtgatgacggatattttcaggtccttggccagcccacggatggagggcagcgcatcccccggcgacagagcgccggagaggatctgggccttgatctgcccgctgatctgatcgtagataggctggccactgttgtttcggataatgagttccatggaagtcctccgttcgtactgtacatacacagtatatacagttggcgcgagatgtcaagaggaattttcaaaattttccgtggacgcttccggggaagcgtggtatactgagcgaaaagaagtacgcgggaggaacgaatatgagcgatttggagcggatcgaagcggcgatggaggaaaaggtgcggcctgctctccgttcccatggcggtgacatttccatcgaccatgtggaggggaaaactgtgtatgtaaagctgctgggccagtgcgcgggatgcccctcggcggacctgaccaatgagaccatcgtggaggcggagctgaaggcggccctgccggagctggtggaaaaggcggtggtggtccagactgtcagcgatgagctgtgggagcaggcgaaaaagctgctgcgggagcatcatctgtaaaagaaaaaataacgaaaaccctcccggaagctgaggtttccgggagggcttttgcaaatattgatttattctacatcctgcagggcgtcatagccctcctcgccggtgcggaccttcaccacgttttccacatcatagacgaagatcttgccgtcgccgatatggccggtgtagagcaccttcttagcggtttcaatgacgctgcggacaggcaccttgctgaccacaatgtccagctggatcttgggcagcagggtgggctccacctccacgcccaggtaatactccggcttgcccttctggatgccgcagctaagaacgtggctcatggtcatgccggcgatgcccagctccagcatagccgttttcagagcctcaaacttggattccttgcagatgatctccaccttggtgaacttgggggcggtgccgtcggcagtgtcgaaggaggggacacgcttgacgggaatggcctcggcggcgggcacactgccagtgacggccacgggggtgtcggtctccacagcggcggtatccggcagcatagcgaagccagcataggcggtgagcaggccgtgctcggagacatccagaccggtgatttcttcctccggcgtgacccgcaggccgatggtgtgcttcaggatggcgaagacgatggtgatgaccacagccacatagaggattacggaagcaacgcccaggcactggacgccaaagaagtggaagccaccgccgtaaaagccccccttttccgtggacacgccggtggcgaagagaccggtgaggatggtgcccagggcgccgcagacaccgtgaacggagatggcgcccacagggtcgtcaatcttggcaaccttgtcgaaaaactccacggccagcacgatgaccagaccgaagacgatgcccataacggcggcacccagaggggatacagcgtcacacccggcggtgatgcccaccaggcccgccagagcggcgttgtaggtcatggagacatctggcttgccgtagcgcagccaggtgaagatcaagatggtgcagcaggccacggcagtgcagaggttggtgttgaagaacaccagaccggcgctgacgatcagctcgtcggtgtccatgcctacggtggaggcaccgttgaagccgaaccagcagaaccagagaatgaacacgcccagagcggcaaaggtcaggttgtggcctaagatagcacggggcttgccatccttaccatacttgccgatgcgggggcccagcatcttggcaccgatcagggcgcacacgccgcccaccatgtgcacgcaggtggaaccggcaaaatcgtggaaacccagctcactgagccagccgccgccccagatccagtggccggaaataggatagatcagcagggagatggcggcggagtagatgcagtaggcgctgaacttggtgcactccgccatggcgccggagacgatggtggcggaggtggcacagaagaccgtctggaaaatggcgtaggcccacagggggacgccggaagggagaatgctgctgtaatctttcatgatcatagggtcaaaccagccgaagaggccggtgcccgtgccgaacatgatgccgaagccgataagccagaaacaggggatgccgatgcagaagtccatcaggtttttcatcaggatattgccggtgtttttggcccgggtgaagccggcctcgcacatggagaagcccgcctgcatgaaaaagaccagcgctgcgcccagcagcacccaaatggtgttgacagaactgaattccatagttgtttcctcccatttttgccgttttcttccagcgaacgattctgcatataagaaggcaatggagccttccgaacggtaagactccattgccttgcgttttgccgggagacaggagcgggttagcttccactgtccggcagttatatgcagaaaagatcgagggaagagagaaagcgtcttagagcatgcactctaagacgcctttgccttgatgggggcattatacacggtttgtcggctctgtcaatcataccgcgccaattttggctgtttttacaaaagcaagacaagacaaaccgggaatgtgtgtgggttttcccgtgatgttacagccgggtcaccacaggaatgaccatggggctgcgcttggtgtttttgaacaggtagctgctgacagcggacttgaccgcgccgcggagctcaccgtcatcccggccgcgcttgcggctgccggtgacgctgtcagcggcgttcatggcaacattttgcagctccttcatcagatcgccggattccttcacataaatgaatccgcgggtgatgatctcaggcggggacagcagcgcgccgtcctgcgtggcgatgggaaggaccaccaccaccatgccgtcctctgccagacgcttgcggtcccgcatgaccacggcgcccacgtcgccgacgccggagccgtccacatacacctcgccggcggggacggagttggcggacagcttcatggacttgccggtgatttcaatgacgccgccgttatcggcgatggcgatgtgattgcggtccatgcccatctgctgagccagctggcaatggatctgcagcatccgctgctcaccgtggagcgggacgaagaaacggggcttcgtcagggcgtggatgatcttcagttcctcctggcaggcgtggccggagacgtgaagcatatccgcccggtcatagaccacggtagcacccttgcggaacagctcgttgatgacacggcccaccgtgacctcgttgccgggaacggcggaggcggagaggatcaccttgtcgccggcgccgatctccacctgcttgtgggtggagaaggccatgcggtacagggcgctcatttcctcgccctgagagccggtggtgacgatgacctgcttgtttttgggcaggcccttgagcttattgatgtccaccagtgtgtttttggggaccttcatatagcccagctccgtggagaccttcatcatgttctccatgctgcggccggtaacggccaccttccggtcgcactgggcggcggcatccagcacctgctggacacggtggacgttggaggcgaaggtggtgacgatgatacgctcgtcgcaattctggaactggcgcatgaaggtggcgcccaccaccttttcggagggggtgaagccggggcgctctacgttggtagagtcggcgcacaggcacagaacgccctccttgcccagttcgcccaggcgggccaggtcgatgacctccccgtcaatgggggtggagtcgatcttgaagtcaccggtatggacgatggtgcccatcttggtgtggatggcgaaagccacggagtcggcgatggaatggttcacatggatgaactccacggtgaacttgcctgcccggacgctcttgcccgcctctacggtgatgagcttggtggatttcaccagctggtgctcctccagcttcagcttgatgagaccggcggtgaagcgggtgcagtagatgggcatgttgatctgcttgaggacgtaaggaatggcgccgatgtggtcctcgtggccgtgggtgatgaacaggccccggatccgggatttgttcttgatgagataagacacatcggggatcacgcagtcgatgccgtacatgtcatcaccggggaaggccataccgcagtccactacgatgatctcgccgccgtattcataggcggtcatgttcttgccgatctcgttgagaccgccaagggggataattttcagtttttctgccatagatatagaaactcctttgctgaacgccctcaaaggggcggaaatatgtaggagcttttcagagaatacggatgacgtaaagtggacgcaggcgcctaaagaggcacggcaaataaagacgtccgttgtccgcacggccccgtttcgccggcggaggttcggtcacgtctgtccgatctcgtatgaaaaagctctatttattcaaccgcaggctctcgggccgcggaaaaatacaggtgaaataaaatgtaagaaaacggcagggaagccttgcccccaggtgccagatttgatatagtatagcacagaaaagagtatttgtatacataaaattttgaatgagacggaaatgcgctgcaacacggacaatataaagaaaattgttgccgggagaaagaatttctcggcacctattgacaattcctgaaaatctgctactgtatgcgcgttgacataggacggaggaaccaaccatgcggaccaccattaaaatgattgcggagcgggccggtgtatccatcggcacagtagaccgggtgctccatgaccggccttatgtaaaggcggaagtccgggagcgggtcctgcgcgtgatggaggaactggactatcatcccaaccggatggccagcgccctggccaccagcggtacgccccgaaagctggcgctggtgcagccggaatgggaggagggctttgtgcgggatgaaatggatgccggtgcagcccgctttctggagaaatacagagattacaatgtatcactggacatccggaactacccgtcgggggacgaggcggaatgtctgcgtttgctgaatgagacggtggaaaacggcgcacaggccgtcgcgctgtgcgcttccggcaccgaggagatccggcgggcgctggaacggctgtcagagcgggggatcccggtggcgacctttaactccgacgtgcccggcggacggcggatctgctatgtgggcgaggacggccatcgggccggacgggtggccggggagatcgcatcctgctttctgagccgtggtgatgcgtttctggtcatctatgccgatccgaaatatacggcgcataaggcccgtgtggacggatttctggagcggctggcggagcgggggatcccggaggaaaacggtgtgatcgccgccacccaccgggattaccggaaaacggcggaaacggtggaaagtgcattggcggcgcatccaaatttgcggatggtgtatatggcgaaccccagcgtcccggcctgcgcggaggttctccggagccggggcctggcagaaaaggtccacatcctttcccacgactgcggcccggagatccaggagctgctgaaaagcggcgaggtggattttactatcgggcaggatctggcgtatcagccttatcaggcgctgtctgtgctttttgaggcattgatgggacagcggcctgaccgggacacctatgtgaccgcttgccccattctcaattcggagagtatttgacggtaaatatggaaagaaacgggggactgcggtcctccgctgtttccgggcaaaactgtgtacgcacacatataaacacatagtaaggagcgcatgatgaaaaagcattgtttaccggcggctgtgctggcactggccgctttgggctttaccctgggcacctgtgaatttgtgatcgtgggtatcctgccggatattgcggcggggctgaacgtatctctggccgccgtggggcggttggtcagcgtatttgccgcctgctatgcggtaggaacgccgctgctcacggccctgaccggacggatggaccgattccgcctgctgatggggctgatgctcctgtttctgggtgtgaatgtcctgagcatgctggctcccggcgtggcggtgctgtacgcatcccgtgtagtggcggcgctggtgtccgggaccctcaccgcagtggctatgctgtatgcgaaggaggtctcttccccggagcagacggcccgggccatttccgccgtgtacgcgggcttttccgtggcggcggtggcgggggtgcccatcggtacagcggtgtgccacgctcttggttggcgggccacctttggcgtgatcctggcaatgggactggtgctgctgccggtgctggcccggctgctgccgcgggagatcgccgttcctccggcagagggcggcctgctgaaccagttcgcggtgctgcgggacagtcgctgctggcactgtgttttgatggtgctgttcagcgcttccgctacctacacggtctacacctatctgacaccgacgctgaccggtacgctgggtctgccggagacggcggtcagtccggtcctgctggtgatggggctttgcagtgccgccagcaatttgctttccggacgccttgcggaaaaaggcggtctgaagcctttgccgctatttttcgccgcgcaggtcctgctgtttgccgtgctgcctctgctgctggtgaaccggtggctgggattggtagggctgtttgccatgggcctgctgatgtatctgctgaatacgccggtgcaggtccattctctgggattggcagaggcggaatatccagcggcagccagcctctgcgcgtcggtgcagccggtgtcctataactttggcatcgccgcaggctcctttgcgggcagtctggtgcaggatgcttggggactgcgactgttaggcgttccggcggcggtatttgctctgctgagcctgtggcagtgcagaggattgctgcggtccattcagcgcaggaaaacccgccggtaagcacagacaacagaacagataggaaaacaacaccatccgaatggatggtgttgttgagactgtcaataaagtggtaaatcctccgcaacggtaaggaagggtgtgcgcgggaaacccaagaagggtgtctcgcgccattaaaatcctaagtttccagaacttttataaagttctggaaacttgctcagcggggcgaaaaaattttttcgacacgctgaacaacaccatccatccggatggtgttgtttttttggacagatactttacgcccggctccgcttggcggagcgtacccgagccggacggcgctggcagacctcggcggacagaggctggatgtccccggcggccatcagggcctgccgtgtcagaagaggaccgaccatttcatagatcagcacggagaagagggtgatgttgcggatcaatccgccctgctctccaagctgcatagcggttgtgcacattcccagcgctacacctgcctgaggcagcagggtgatccccagatatttacagatctccggtccgcatttcatatatttggagctggcaaaggcaccgatatatttgccggcagagcggaacaggatgtagaccagaccaatgcacacgatggcccaatccgtaaagacgcccaactccaactccgcgccgctgatgacgaagaacagcgcaaaaaggggagaggtccatttgtctgcggctttcatcaaatcggcagactgggggcagagattgcagaacaccgttcccagcatcatgcataccagaagagaggaaaagctgatagtcaccggcccaagggtaatgtgcgacatggacagggccaccgtcagaaaaacgagggaaatggtcatgttcaggcggtttgtattggaatgaaagaggacctccagcttggtcagcagccagcctgcggcggcacccaatgccagagacgcaacgatctccagcagggggttgagcagaatggagatcagatccaactcgccgctgaccagcgctttggaaatgccgaagctgaccgcaaacacgatcaggcccactgcgtcatccagtgcgacgatgggcagaaggagattggtcaccggaccctttgctttatactggcgcaccaccatcagcgtggcggccggcgcagtagccgtcgcaatggcgcccaaggtaatcgcctgagctgcggacagcttttccggcagcagcatgtggaccgtcagcagtgcggcgtccaccagcagggtggcggtcaaggcctggacaacgccgatgacggcagcctggttgcccgtggatttcaggtcctccagacggaactcatttccgatggaaaaggcgatgaagcccagcgcgacctcggagaccagttgcagactgcttaccgcatcggctgagaccagccccagaccggtaatatgcatactgcccagaacataggggccgatcagcacaccggccaccagatacgcagttacgtccggcaatcgccacagattgaatacgcgcgtcatcagaagtcctgccagaaccgcaatggaaacagataagagtgtagacatgtgaatgaatccttctctcctgcatttgattgcatcagtatacaccttgatttttataaaatcaatgcaaacgtttgcaatatttataaaatctttatattacattatatcactgtttatgcgtacataaggaaattaaaaagataatttcgcaaataaaagacaaaaatgacgataacgtttgcgttgtggagacagcctcggaatttggcattttcacacgagggcaaagtaaaaaagagaagccccatggaatggggcttctctggatcatatgcggttgtggctgcatttaggtacggcttgcgttcagcccttgcgagggaagccagccgtcctatggcgggaggttttaacggatcatttcacaatcagggtctggccgtccatctcctccggtacggcaaggcccatcacatccagaatggtgggagcgatgtccgccagacggccctgacgcagctccgaaccggcgccgcagaggatgaagggcaccaaatcggtggtgtgggcggtcatgggggagccgtcctcctgggtcatggtctcggcgttgccgtggtcggcggtgatcatggcgatgccgcccattttcatggtggcgtccaccaccttgcccacgcactcatccacggtctccacggccttcaccgccgcgtcaaagacgccggtgtgacccaccatgtcgcagttggcgaagttcaggatgatgacatcatacgcaccggattcgatccgctccacgcacttgtcgcacacctcgtaggcgctcatctccggctggagatcgtaggttgccaccttgggagagggcaccagcacccggtcctcgccggggaactgggtctccacgccgccgttgaagaagaaggtcacatgggcatacttctccgtttccgcgatgcggagctgggtcagtcccagattgctgagatactcacccagaccgttgcggacggcctgacgggggtaggccacctccacattgggcatggtagcgtcatactccgtggtgcagacgaaggtcacggggaaatactggcgggtgaaaccgtcgaacttcgggtccacaagggtccgggtgatctcacgggcccggtcagggcgatagttgaagaagatcacactgtcattatcggagatggtgccgtccccatcacagatcaccggctcgatgaactcgtcggtgacgccggcggcgtaggcatccttcaccgctgccacgggcaggggattgacgtgggcgctctcaccgtagaccatggcgtcataggcggcttccacacggtcccagcgcttgtcgcggtccatggcgtagtaacggcccatgagggttgcgatcttacccacgcccagctcccggcacttctccaccgtccgggtcacatagtccgcgccggaggtgggggaaacgtcccgtccatccagaaatgcgtggatgtagacccgctcaaggccacggtcctttgccatctgcatcagggcgaagaggtggtcgatgtgggagtggacgccgccgtcgctgagcagacccatgaggtgaagggcagagcgcttttccttgcaggcgtccatggcgtgaacataggcgggattctggaagaaatctccgtcatcaatggatttgctgatccggggcaggtcctgaaacaccacccggcctgcgccgatgttggtgtggcccacctcactgttgcccatctggcctgcaggcagacctacatccaaaccagaggcggacagctctgtatgggcatactcctggaagaactgatccagacgaggagtgttggcggcggcaacggcgttgccctccgtctcggtccggagaccgaatccgtccataatgatgagtgtggtcggtgttttgttcatagaaacctcatttcgcataaagggggggactgtgtccccccgcttttccgcattattcctgattggccgcgttgatgatgtccacgaactgctcgggcttcagagcagcaccgccgatgaggccgccgtcgatatcgggttgggccagcagctcagcagcgttcttggggttcatgctgccgccgtactgaatggtgacgctgcgggccacgcgggcaccgtacaggccacggatggcagcacggatgttggagcagacctcgccggcctgctcggcagtggcggtcttgccggtgccgatggcccagatgggctcataggcgatgatgcagcggcgcagcttctcagcagggacaccgttcagagcgctcttgacctgcagagcgatccactcgttggtgatgccggtttcgcgctgctccaggctctcgcccacgcagatgatggggttcatgccggcgttcagcacagcgtggaccttcttgttgacagtctggtcagtctcgcagaaatactgacggcgctcgctgtgacccacgatgacatacttcacgcccaggtccttcagcatatcggcggaaacctcgccggtgtaagcgcccttctcctcaaagtagacgttctcggcacccacggagatccgcagatccttaaaagccttcatagcggtggaaatattgcaggcggggacacagatcagggtgtcgcaccacttggcgcggggcatgatcttcttcaggtcctcggcgaatttcttggtctcggtggcggtcatgttcatcttccagttgccggcgatgacagtcttacggtatctgcggttcataactcttttttctccttttgtatctttgataacgatgatcggatcgtttcggagggccgtcagggcggtccgaaaaaggctcgacaataaaacttattattttatagcgaaaacgaggggatttgtcaagtatttttgaaaaattcgactgtttttgcgaaaatatcgtatggaaagcggcagaatgctctgctgctttgtgggatcgaactatgtggagatcctgattttgccggacagcgatagcgggcaaagcccgctgcgctgcaattacttatccagcaggcaggccacgccgggaagctccttgccctccatgaattccagggaagcaccgccgccggtggagatgtgggtcatcttgtcagcatagcccagctgttccacagccgcagcagagtcgccgccgccgatgatggtgatggcggaggtcttgctgagagcctcggccacagccttggtgcccacagcaaaggcggggaactcaaacacgcccataggaccgttccagataacggtaccggcatcggccacagcgtcgcagtacagcttcacggtttcggggccaatgtccagaccctgccagccggcggggatctcaccggacttgactaccttgctgttggcgtcgggagagaaggcgtctgcgatcacggtgtccaccggcagcagcagctttacgcccttggccttggccttttccagcatttccagagaataggcttcccagtcggattccagcaggctgtcgcccacctgaccgccctgagcggcagagaaggtgtaggccatgccgccgccgatgatgatggtgtcggcgatctccagcagattgttgatgacgccaatcttggaggagaccttgctgccgccaaggatagctaccagaggccgcttggggttagccagcgcgccgccgatgacttccagctccttctcgatcaggaagccggagacggcggggagataagccgccacaccggcggtggaggcgtgagcccggtggacggcgccgaaagcgtcggacacgtagacctcggccatggaagccagcttttgtgcgaaggcgggatcgttcttggtctcgcccttttcaaagcgggtgttttccagcagcaggacctgaccgggctgcagggccgcggccttagcctgagcatcctcgcccacaacgtcgctggcgaagatgacctcctgtcccagcagctctgccagacgggcggctacgggagccagagtcagcttcttctgctccttgctccaggcgtcctcagtgagcgtagcggggtctttgcccttttctgtctgctttttgacccatttgtcaaaatctggctggggctttccaaggtgagagcaggcgatcaccgccgcgccctgatccagcagataccgaatggtgggcagagcagccacgatgcgcttgtcactggtgatggcaccggtctttttgtcctgagggacattgaaatcgcagcggagaaggaccttcttgcccttcacgtcgatgtcgcggacggtctttttctggtaattcataagcaaactcctatacgatcattgatttgcagtgattaaggggttttcgccatttcccccacacccagcaggccggggaaatcattttgccgcagcgcctcgtacacgcatacggccacggtgttgctgaggttcagactccgggcctcatcgatcatgggcagacggatgcagcggtcccggaaacgctctcggagatccatgggaagtccggcggtctctttgccgaagaagatccagctattcggggagaaccgggcttcctgataggatcggggggcttttgtggtggtcagccagcagtcctgcgcggccttcggacgcttttcaaaaaagtcatccaggttttcatagtcaaagacctccaccagatgccagtagtccagtcccgcccgcctgacagcccgctcggagatgtcaaagcccagcggccggatcagatgcagacggctgccggtggcggcgcaggtgcgggcgatattgccgcaattctgagggatctcaggctccaccaatacgatattcagcacagatattccctccttttggctcgaatggatactattgtaatcctttaccgatagaaattcaactgttttgtggtgaattttgcgattctttgggcggttgaatggtttgcgcggggggagtgggtatgtattctcaaaaaattgaggttttttagttaatttgctgaatttccggtgtctttgataaattcaaacagaaaaggacgaaagatttggaggaaattaccttgaactttttccgggaaggggtggatttccctaaaaagtttggtataatgacagtgataagattccggtcgctatgcggcctgacggacaggagggacttaccatggatcacacgtgtcgtgctgtgtttattctggaagaggatcactctattcctgcaggtcacaaaccgctgatgctggaagccatattgcaccgcccaatcatggagcgggccgttgtgcaatgtttggcggatggcgttcagcggttttttgttgtctgctcgccccgctttgctgaggaggcggctgcctgcttcccggagggaacggatgttgtgatctctgagcagcatgccgagcttttggatttcctggacaatgacgaggacaccctggtcctctgccgcgcggctctgcctatggctcaggccggccccggctttgcctattccgcacccggacgggaactgcgggaggtctggaagaacaagatgaccaacgctgtatccggcgcttcgctggtgtctggctggctgccgatcttcggaccggagaccatcgctgagctggaaccggttttggcgaagatggaacacgaaccgtaattttgaaattttgaacatataaaatatacagaaaagagaggaaaactcctatgatttctcacgggaaggacatcaaagttttctgcggcaacgcaaaccagcctctggcggctgagatctgccagatgatgggcaccaagctgggtgaatctgaggtcaagagcttcgctgacggcgaggtctccgtctccctgtacgagaccgtccgcggcagcgatgtgttcgtggtccagtccacctgcaagcctgtcaatgacaacctgatggagctgctggtgatgatcgacgcgctgcgccgcgcttctgccggccgtatcactgccgtcatcccttatttcggctatgcccgtcaggaccgcaaggccaaggcccgcgatcccatctctgccaagctggtggccaacatgatcaccgctgccggcgctgaccgtgtgctgaccatggacctccacgcctcccagattcagggcttcttcgacatccccgtggataacctgctgggcaaccccatctttgtggattattatgccaagaagttcggcgacaagtgcgaggatatgatggtggtctctcccgacgttggctctgtggcccgcgcccgcgccttcgctcagaagctgcacatgcagctggccatcgtggataagcgccgccagaaggccaaccagtgcgaggttatgaatgtcattggcgacgtgaagggcaaggactgcatcctctttgatgacatggtggataccgcaggctctctgtgcaacgctgccaaggccatcgtggaagtgggcggcgccaacaaggtctacgcctgcgccagccacggcgtcctctccggtcctgccattgaccgtctggagtccagcaacattgaggagctggctctgctggataccatccccgcccatcccgaagcggtccgggcacggatcaagtatctgtccgtggcttccatgttctctgaggccatcgagcgtacctatcaggaggtttccatctccaagctgttccggtaacgatccggcccaaaatcagcgcattgagtgtaatataaaaaacggggaagcagacttgcttccccgttttctttggtatatgatacaagcaaacaaggaggaattccctatgatctttgaaaaatccggcggggcggtggactggcttatcgtgggcctaggaaaccccggtcagaagtatgagcatacccgccacaacatgggctttctcacggtggacctgctggcggagcagctgaacgtgaaactgaacaaagtgaagttcaaatctgcctataacatcgtccgcttcgggggccagaagtgcctggtgatgaagccccaaacctatatgaacctctccggcgaagccgtccatgaggcggtgcagttctataagatccccgccgatcatgtgctggtgatctacgatgatgtgtccctccccgtgggtaagctgcgggtgcggcccaccggctccgccggcggtcacaacggcatcaagaatatcatcgcccatctggggactcaggagtttccccgcattaagatcggcaccggcgccccgtccggcggcggtgcggagatgatcgattgggtcatcggcgtgccctctcaggcggagcggaagatcctggtggagagctttgaaaatgccgtcaaggcagcggaggatatcatcgaaaacggctgtcaaaaggccatgaacgattataactgaccggcctgacgggcatataatatagaaaacagcggcacaccctggctaccaaggccggagtgcgcccgtttgcgcgtaaagcatgacttttgtcaggaggtgtcggatggacgcatttctgaaaactctacaaacgctgccggaggtggctgagctggtgagacgggtggaaaacggtggatgccccgctgtccttaccggcacccagccggtacagcgggcctgcgtcggcgcggcggtggccgccggagccggacggcccatggtgtttctctgtgccgacgagcgggaggcccgtcaactggcgggtgacctgcaaagtctgaccggtgaaatgccggtgacgctgctggcgagagaatggcagttccggcccaacgccgtttcctcccgggagtgggagcggagccgcttggcagcgctgcaccagatggcggcgggcaatgcgccggtagtggttgccacggtggacgccctcttggcccggaccatgccgccccatcggctggcggagctgtccatgacgctggaggtgggcggccgggcggacctgaaggaactgacggaccgcttgttacaggcggggtatagccgctgcgatcaggtggagggcgtgggccagttcgctctgcggggcggtattctggatgtgttctcccccctgatggagcagccggtgcggtgcgagtttttcgacgatgagatcgactctctgggactgttcgaccccggcacccagcggcggacggaaaatgtatccgccgcactgctgctgccggcggcggaagttctgccgggattgacccccggcgggcttacccatctggcggagcagatcgaaaagctggccgtcaagtacgctaagaaagaaaacggagagaaaattgcccagactcttcggggggacgcggagcgcttccggaatggtgcggaggtcaatggcctggaccgctatctggatttgatctatccggacgccgccggaggtgcggagtatttgcctccggacgccgtggtgtttctctgcgaaggagggcgcgttgaacagcgggtgaaaaccgtgctgcttcagctccatcaggacacggaggctctcatggaggccggtctgatggtgggggacgcggcggaggtctgcctttccggggaggcgctgttcgcgcggctggcggattttccggtggtgatgctggacgcgctgcccacctcccggcacccgctaaagccccgcggcctgctggccatcaacgcccggcagctcagctcctacggcggcagcttggagactgctgtcacggacttggagcactaccggaacaccggcagtgctgtgctggtgctctgcggcggtgaggtccgggcgaagaacctgctgcggctcctggaggagcggggaatccctgctgtgctggatctgaaggggaccgctatgccgaagcccggcgagctgcggatcaccgtgggagcgctgtccgcgggctgtgagtggccgacgctgaagctggcggtgctgacagagggacagctaacggcccccacccagaaaaagctgaagctgaaaaaggattccaaccgccaaaaactccaatcctacacggatctgtcccccggcgatctggtggtccacacccaccacggcatcggccgcttcgcgggcatccaacggatgcctgtggacggcgtggagaaggattatatcaagatcgactacgccgggggcgactgcctgtatgtgcctgtgacccagttggacctggtgagcaaatacatcggcggcggtgaggatcaggagcggacccggctcaataagctgggcggaacggagtgggccaagcagaaaaccaaggcccggaaagccgccaaggatctggcagcggggttgaccaagctgtacgccgagcggcagcgccgccccggctttgccttctcgccggattccccgtggcagacggagtttgaagaggcgttcccctacgcggagaccggcgaccagttacaggccatcgcggacatcaagaaggatatggagcagtcccggcccatggatcgcctcctttgcggcgatgtgggctacggcaagacggaggtggcgctccgggccattatgaaatgcgtcctggacggcaagcaagcggcaattttggtgcccaccaccgttctggcccagcagcactacgccaccgcctgcggccggttcaaggacttcccggtgaagatcgaggtcctttcccgattcaccaccgccaaggagcagaaacgcattttggaggctgcccgcaccggcggtctggacctgctgatcggcacccacaagctcttgcagaaaaatatggagttcaaggatctggggctgctggtcatcgacgaggagcagcgcttcggcgtgacccacaaggagcggctcaaggagatgagccgtcaggtggacgtgctgaccctgtctgctacccccatcccccggacgctgaacatggccctctccggtctgcgggatatgtctaccattgaggagccgccagccgaccgtcagccggtgcagacttatgtgctggagcatgactgggggatcctggaggatgccatgcggaaggaattggcccggggcggtcagatctactacctacacaaccgggtggagaccattgacctcactgcctcccgcatccagaagctgctggggccggaggtccgggtggtggtgggccacggcaagatgggcgagcaggaactgtccgccgttatgcaggccatggtggatggcgaggcggatgtgctggtgtgcaccaccattattgagacgggcatcgacattcccaacgtcaataccctcatcatggaggatgccgaccggttgggccttgcccagctccaccagatccggggacggatcggacgcagcacccgccgggcttacgcctacctcacctaccggcaggggaagatcttgcaggagaccgccgcgaaacggctggcggccatccgggagtacgtggaattcggctccggctttaagatcgccatgcgggatctggagatccggggcgcgggcaatctgctgggaccggagcagtccggctacctgatgagcgtgggctatgacctgtatctgaagttgctggaggaggcggttctggaggaacggggcgaggaaaagaagatcgagacggaatgtgccgccgacctgaccctgaatgccaatatcccggaacggtatgtgacctccccggagcagcggatggatctctaccgccgcatcgccgccatccgtaccaacgacgacgcctccgaccttatggacgagatgattgaccggtacggcgagccgccgaagtcggtgctggcactgctggatgtggcgctgctgcgcgccgccgccgccaaggccggggtgtccgacatcacccagaagaaggacgcgctgcgcttcaccttggcggtgttccgtccggaggcgctggtgcaggtgtgcggattgacaaagtacaaattccgcctgaccctctctgccggggagacgcctatgctgacgctgaagctgaagcccggcgcagatgttctggaaacggcgctggagctggtggaggatctgaagctggcaacacaggcgctggagaaagcgtaaagttctgctttgccggatggtgcggttgcccaaaagaaatatcaaacaaaaaagagctatctgatctcacctgagatcagatagctcttgattcttaatgattcggctttttgaggggtggcttattcccactcgctcctgtcagaagttttctaaacagatttgcttatgggatttagctcagattattggtattcttttcattattcagatagtagaggctatctgatcttttgttgccatagtgttgccagaaaaacggattcattcatcctcagaatctgcactttcaatattatcgcgcaaatcactgagggtgactccatcttttgtaaaataccgccatccattcacatggacattatcggaccaaccatatcgctctgtaagaagcttaccagcaagcccagtgacagaatatctttccccctcaaactctacctgatttttcctgtcaagcacccgtgcaatgatggactcatcgtaaagaaaggaaatttcctcacccacattgatgtgcagtaaagtgaaagaattatttgaacgctttgttcttctctcagcaagttcttgctcctgcgcctgtccctcggtaggcacatacagcttcaacttgtcctgatcacctctcagagccgctatattcttaaaaatacgataagccctttcaggggaaatcttgaaaaattcccgctcacgcattctaccgttgtcgagctgctcccgggcatggagagagtcatccacttggtcaataatgctatgtatattttcttcaaccattgccgggttctccacctcataaacggcgtagcaccgaaatgaaagcggaatattggtcggcgcattgagttcctgtaatcttctctcgatgtcgttacgtcccgtcatgccaatcttaacccatccttcaaggcatgggttagtaagaatgtaaacaaggccttctgacatagcacaatctctcctctacatctatatcaaatatcaagtctgtttcttgagcaaaaattcatcaaagtgacttattgtatgtcgacttattgtattcattattgtaccatttatgttggaggtttgcaagtatggatattgtaaaggtttttggagacaacgtgaagcgttatcggcagaccctggggatctcccaagaggcctttgcagagaaatgtggtcttcaccgaacatatattagcgcaatcgagtgccatcgtagaagtatatcacttgaaaacattcaacgtatagctgatgcacttgaaattgaaacatataagctatttctggaggaataagcatggcacgaaggaaaatatatagcaacttaaataaaataggtcagtatcgcccacatcatgttgatggacaaactctttataaagtatttcaatgtctcaatcccgattgtacggagatgatcactgtcaaaaaagatgatatcgacgaagattattctattatttgccccaaatgtggatatgaacattattctggtggagagcaacacttgtttgatttttctatggatgttaataatgataatggagaggctgtttctgtgcaagaaggagagtttgtcgtctctcatgatgaatacatagaaaatgctccactgtataagtactgtttaatttgcaatacccttaaacctattgagtgcttccacaaacacgctgtcctgaaatctggaagacagggtgagtgtataatgtgcaaaacaaattataacgctattaaaaacggaaccagaacttctgatcagcactttgaatcttctcagaaacgccgtctcttaattgaggttgctggcacaactcgtgtgagccgcaaggcaattgaacgaaaatatggtcttagatgtttcaattgcggagaggatttgagtggcgtaacttccaacaaggaaaaaccgatagatcatacattgccagtctactatttgtggcctgcaacaactgactctggaaccttgctctgtcgtgtttgcaatggcaataagaccggcaaatggccttctgaattttatactgatgctaaactgcaccaattagctgtacatactggctttgactatcatttgctggccggagaaccacaatataatccagaagctcttaggagattgcaaaatccagctgatgtcgatgcactgcttgtgaaaaattctggacatatggacgaagtatgcaaattgagaaatcgcatccttgctgatacaggaatcgatttcttcaagtatgcgactgctctatcagagtcctggattacctatgcaaattcactcataaaatgaactctacaaatgaggcgggcattaatcccacctcattttttttgtaggaacaaatactgatgctctacagttactcctttatctttgataccgtgcttttcgatcgttctgacatcttctccagccagataaacaagatcaaaccaagatcctgcacgctttgaaagctcagcacccatatctgtggttttagttttaccaagatgcaaaattacctttgcattgtcatttaaaacatcagcacacatttcaaagaaactgtaataaagatcgaagtttttttcttgtagcttatctaagaatttttcgtcagcttttttataatctttcggctcccatccacaaagccaaagccgcatccaattttgcatataaaaccgaatagagtctgcaaaaggaggtgaacagattataaaatctgctttgatatttttagctgctagatctttgtaatcaccatatacagcacggcctcgcgttatttgagactgttcaagttttgcatagctagcattaactttctgaacaaccttttcaattacacttttatactcgaattcccccgtaggcgcatacggtgttaatggatgtgaatgccgtgaaagcgcatagggcctatttccatgtaacacgtgtaaaagcgcggaaaaaaccattgcttcttcgggcgaaattgaagaaaatctgttaaggaaaaaatcccttgcgcacaaaatttctttatatgtctcatgctcgaaatattgtggaagtttcccgttgaatccgaaatcctcatattctgtgatagatttgctacctttgttgtttttaatgtaatcatctagttgacatataacatcttccacaccactataattaggcttttcaactttggctttggtaacaacatacgccaactcgcttaaatcatttcctatcccaactcgcccttgcagacaagcttcaaaaggaatagtacccactccacataaaggatctaaaaccacatcaccttcgcttgtaaattcagaaataagccaatgggctatcgctggtttcaatttcccgtgataagaacaaagtgagtgccaggggtgtccccagtttctattcccgtagggagtttgcttatatggcagacaggaaacgaattcttctgctttttttctaaacgctatatccatcatttctccaatctgtatctcaacaatctttgtgttaagatcatgccattcttggaacgtcttttacgtaatatttcttcatcatataaggagaacccatactggacgcaaatgtttgaaaggatctgatgcgtcggaatgtgtaccccggcaaattgagaatccccaatatccattgtaaataggccaccaggcttgacggatttgcttagtttttgaataaccgtatccatatctctgaaatatcctgcaaccattttgggaattcgatcatcgtaagaaaccggttgtaactgttccaaatatggctctactactggcaaaatcgtatctattactgttcgttttgaaacgttgttgattcctgctatgataccttttgaatgaaagcggggtaaatcactttcgctcgttataaaatcattcaatttaagttccaactttgtgttgcgaatgtaatttgttccattaagatatgggggcgaggtgataacgcaatcaaaagcattaacatagtcattatcacgggcatcatcgctaacttttactgttccacatttgataatagatttatgatgttgaatatcaaaaattatttcatttaccttatcagcaaaacactccaacacattttcttcacggtattccttttctgtagcatagcgaagatcgcctcgtctgatcatttttgaaactttaacaacgatggaactcaacgctaaagcaaggatgttttttactgattcattatcttctttgaaaatgagtccttttatggtcaacaattcatttaactgcttttctccaaagaatttttcaaagccgttccaagatgagtgattttcaaccctgatggtattgattaaagtaagatattcaatcaatttagggattacagtatcttgatcaagatttcgcacacaattgatttttgtctcaatgactgattgcatgaaaggatttgattcgctataaaaagattttataccgtgagttgctgcaacaagagaagtcgtacctgtcccgcaaaaaggatcataaatggttttgatatctggttgcaatgaaagaagcatcttaagttcttcagcaattaaacaggatgagtatccttctatataagaataccatctatgtataggttcatttttgttcagcgaaaaagttccgcctttttctctaattaaagcattcattttgattctcctttggatgattcgaccgtgaatgtcatgatatcttctatggaacaagacaaagcacagcaaatcttctccaaagtatcaagtgaaactgattcatttcttcctaatttagcaattgcgtttgtgctgattttcgccgcttcccgcaactgagatttattcatatgtttatcaattaacaacttccaaagattagagtaatctacagccataacgctccctccttgtatgcataagttattgtaacacatatatcttctaaaatccaacatattcttgatatatatcaagaatatgttgataatcaagtagcactcccgcgcttatagcgtatatctgacaataaaagtcagtctattgccgacttatggatcgttatgtttttcaggtatttgctcagctcaccattcaaaatcagttcggcataggacagcggatcattatagatcagccagtccagttctgaccgctggtacatactgttcgctacctcgttctccacggcggtgcagtcgatggacaacagggttccatcttccatgcacagctccacgcaggcagtgtccgggttgaactcacaggacaaaatctttctcatactcgttacctcccaatacttgaatttcagttgattttccgcagcggcacaagggccgtttcggttgttttagatacaggcaagcaatgcgtgtggatagccacacacaaatccggcaagcaatgcgtgtggatagccacacacaaatccggcaagcaatgcgagtgttaatacacactcacatttcctgccgtctgcttgttgagggcagcgcccccaagccccttctgaacacagaatttcattctgtggctgcgcgttctccgaacgctttttgcccctgtacccggtgccctgtttcggggcatagggtgtcgtgaatcgcgacattctctgatacttttagggtgccctaaaatggggcatcctccttgaagatggggtggcaaaataccaccccatctttttctttccgcgacggttgcgacggtcgcaacggtgctgggagtacacctcaaaacaccgtcgcgaccgttgcgagcgtcgcgctttactcgattacttcaaacgcagctgcttccaccaccatgtaagtcagtcggatacgccgcccggcgtgcttggttttgttctcgtactttacctgatgttcttccaataggcggctggcattcacattcagatgcttggtaagccgattcaccgccatatccgtttgaatcgcttgggccagctcggtggggctgccttcccattcccggttgtcagcagatacgatcttcgccacagcctccagtaccgggtccggaggctgcttccaaagctcattctctgcatggtcgagatcccaaaccaggttctcttggtctttgctcagatacagccgctgatccggctggtctctgcctaccacctccaaggttgccctgctatccgtccgcttctccttctgcatcagaagcgccccatccgcacagcccagcaggccggttgtaccggaaatcatctcaaagctgtctcccgcaggctgctttctggtgtggtggacgatcagaacgcagacgccataccgatcagcaaattgcttcagcttgccgattacctcataatcgctggagtagctgtaactatcgctcactgcctcccggactttttgcagggtatctacaataatgagtctggtgtcactgtgttcccggacgaacttttccagctgttcatccaggccaccgccgatcatcttagcgttggtggcgaagtgaagggagcttgtcccctccactccgaacattcggaacatccggcgctgcaaacggctctcgtcatcttccagagcaagataaaggacggttccctggtggactttgtagccccacaggtcttgcccggtactgacatggtgggcgatctgtgccaccaggaaggacttgccgattttgggcgctccggcaaggatgtacgctcctgtataaagcaggttctcaatcaccgcagacttaccctcgaacacattgtccatcagctcgtccagggtcacagtatgcaggtaagccgggtcgctcatgcggcgcatcttccggtaaagttcctccaaatctctttccggggaattgcttttttcgtccgagtctggtatagtggtcttggaattttgagagattgactgcccatcatctgcgccaacagatgagccctgggcggtcattttctttttctcatcgatcataggcaaagtcctcctgcatcccgttcataatggtagcaatcatctggatggtgtccagcagctcatcgtttacgccctgcccggcctcgatccgccgcagctcgtccagtacagcggccagctggtcccgcagtgctttatagaccctggggttgccctggaccaccacatcccggcaaagcagccgccggatgatataatcctgcttagtcaaaccggtgagcttcaccgccgtttcgatctgagcatcctcctccggggagacccgaaaagccacggtcttgttcctccaacggttgtgcttgtccatattctttgctgacatttttaattacccctttccatgttcagtttatctgccatttccgcctgcttggacggaaacaggtgcgcatagttataggtgatgtcaatgctctcgtggcccacccggtctgcgatggccgtggcggagaagcccatgtcgatcagaagtgaaaccgcactgtgacgaatatcgtggattctgatgcgcggtaccccggcttctttggctccccggtccatctcccggtggagatagctcttggtgacggtgaacatccggtcatccggcccgatcccgtagagcatcttgatgtaatcctggatttcctcggccaggaactgcggcatggtgatgacccgattgctcttttccgtcttaggggtggtaatcaggtcctcaccgttcagacgctgataggacttgttgatggacacagtgcgcttctcaaagtcaaaatccgctggggtcagggcaagcagttccccctcccggataccgcaccagtagagcatctcaaaggcgtagaaggacagtggcttgtccatcatcacctcggcaaatttcaggtactgctccttggtccagaacatcatctcccggtttttcttcttgcccatgctgcctgccttcttgcagggattttcccgaaggttgtagtaccgaaccgcgtggttgaagatggcactgagctgattgtggaccgtttttaggtacaccggcgagtagggcttgccgttctcgtccttatggttcagcatctcgttttgccaggtaatgatctgctgggcggtgatgttacacattttcagcctgccgaagtagggcagcagcttggtacggatgatgtggtccttggtggcccaggtgttttccttaagccgggttttcatatccgccgtgtagaggtccacgaagctcttaaaggtcatatccagatcggcgctggtcttgttgagctgttcccgctcccaggcctgcgcctctcgcttggtcttgaagccccgcttctgggtctgcttgcgctcgccgttccagtcagtatagcggtagaccgcccgccaggtgtttgtcttttcttccttatagactgccatgattagccctcctttcccgtcttgccgtagcaaaacttctccatgaaaaagttacgattgacccgcccggaaatggtcagatagcccttctcccggagctcagcgttgagcttatggatcaccttgtaggcgtgggacttggagatgcccagctcctgggccacttcctccacgcgcataaagttttgtgcctgcattgaaaataccttcctttcctcgttgatggctgctgcggctggatattgtgttccataaatgcctcctcactttcgtccgtcacttttttcccggatgtataatcaggggttgcggcagttcttttttatttattgattctaagctattatgcttagtctattgccattatactaagcaaaatagcttgtgtcaattggagtacgcaaaataaattaaataaaattgtttaggattctcttgactttactaagcatttctgctacgcttttcctaaggacaagcaacgattggagttgatgatatggcgattggcgaacggattcactttttccgtctcctgcgggggatgacgcagaaatatctcggtatggcgctgggcttcccggagaagtccgctgatgtgcgcctggcgcagtatgaaacaggatcaagaaccccaaaggcagacctgactgctgccctggcccaggtactggatgtctcgccccatgcgctctccgtcccggacatagactcctatgtggggctgatgcacaccctgtttaccctggaggacaactatgggctcaagatcagcgagatggatggagaagtctgcctgaaagttgatgtacggaagaacaaggacgccgcccagctgcacgagatgctctgttcctggcagcaggccgctgccatgctggaggcgggcgaaatctccaaagaggattacgataagtggcgctaccactatccggagtttgacaagacccagaactatgtgaagacgccgccccaggatctcgcttgaccctctcacttgtaggccacgggagagggcgtttgttgcacaggacaataataaaaagaaaaagagagctaactgactaatcaaaatcagttagctctctttttatgaataatgaaaaatgttgccaaatcgttgccacgaagggctttaacccctcaaaagcccagtcatatcaggcttttccgggcctctgaaattattcccattcgatggtgccggtgggcttgggagtcagatcccacagaacacggttgacgccggagacctcgtgagtgatgcggtccacgatgtgctgcatcatgccgaagtccagctgggccacctcggcggtgacggcatccacggtgttgacggcccggatgatgaccggccagtcgaaggaacgcttgccgtcgatgatgccggtggacttgatgtcgggcactacggtgaagtactgccagaccttgccctccaggccgttcttggcaaattcctcgcggaggatggcgtcggattcccgaacggcctccagacggtcacgggtgatggcaccgatgcagcggacgcccagaccggggccggggaagggctgacggtagaccatgttgtcgggcagccccagcgccttgcctaccacacggacctcgtccttgtagagcagcttcaccggctccaccagctcaaactgcagatcctcgggcaggccgcctacgttgtggtgggacttgatgccgtcggattccagaatgtcggggtaaatggtgccctgagccaggaaggagatgccctccagcttctgagcttcctcagcgaaaacgtcgatgaactccttgccgatgatcttgcgcttctgctctgggtcggaaatgccggccagcttgtccagaaagcgatccacagcgtccacatagatgaggttggcgtccatctggttctggaacacctcgatgacctgctcgggctcgcccttgcggagcagaccgtggttcacgtgaacgcagatgagctgcttgccgatggctttgatgagcagagcggcgactacggagctgtccacaccgccggagagggccagcaggactttcttgtcaccgatctgctggcgcagttctgtgagctgctggtcgataaagctctctgccagagcgggggtggtgatgcgctccatggttgcggggcgaacgttgcttgacatggtaggttcctccttgtattttgaattgaatagattctgttgaaaaaggggaggcagcgtcatgatgcgccgcctcccgcggaatggtgaggacgatcagtcgtcgtcccggaacacaatgttgccgggctcggcggattcaataatagccagagacttcagattgacgccggcagcgcgcagacggtcgccgccgccctggaagcccttttccacggcgcagccgatgcccatcagggtggcgccggcggcggtcacgatgtcgcacagaccacgcatggcttcaccgttggccatgaagtcatcaatgatgaggaccttatcgtcagaggagagccactccttgcttaccagcagggtgaccttcttcttgtaggtataagagtagatgtcgctctgatagaggccgccctcgatgttgtcgctcttggccttcttggcaaaaatcatgggcttatggaaataggtggccacagcggtggccagagcgataccgctggcttctgccgtgaggaccatggtgacctcgtccatattaaaatacttgccgaattcctcagcgatccgggtcagcagtccggtgtcgatgcggtggttcaggaaaccgtccaccttgatgatattgccgggcagaaccttgccctcttttacgatccgctccttcagctcctgcatttgatgctccccctttgtgctttctatttatataatcgtttttttaagtagagactgcctttattatcccggatttctactgcttttgcaactgtttttccccacaaaaactattgccgggaagttggtgactttgtgaaaatgcgtgccgcaaacggacaaaaagccgtgaaaagccgcaccatggaaaaacacggcgcggcttcccttatttttcagccagacggtcagcgacggtcttgagccaatcaccctggaaatcctcgatactgccggcgtccgtcagggatgccagagcgggatcgatgggcatttccgccagaagaggcaggttgtgcgcggcagcggcttgagccgttttgccctcgccgaagaggtagatcttcttgccgcagtccgggcaggccacatagctcatgttttccaccagacccacgatggggacattcatcatttctgccatcttgacggccttttccaccaccatgccaaccagatcctggggagaggccacgatgatgatgccgtccagagggatggactggaacacggacagggacacgtcgccggttccgggaggcatatccacaaacagatagtcgcagttccacagaacatccgtccagaactgctggaccacgccggaaatgacgggaccgcgccagattacggggtcggtctcgttctccagcaggaggttgatggacatgacctggatgccggtcttggataccgaagggatcagggcgttttccgtgcccatggcccggtcatgaatgccgaaggccttggggatggaagggccggtgatatcggcgtccagaataccgacctgatagccccggcggtgcatggtaacagccagttggctggtgaccatggacttgcctacgccgcccttaccggatacgataccatagaccttgcccacatgggcgtcggcatggtgggccttcagcagggactgaggctcccgggaagcacagctctccccgcagttggagcagtcgtgcgtacattcactcataagcttgaatctcctttttctatttcaaatctcactataaataatagtatgaccgaaatgatcagaactatcttatacccattccggtcagttcgtcaacaccttgatcataaatgagagcgtcgataaagcggtaaattcactgcaacggtaaggaagggtatgtgcgggaaacccaagaagggtgtcctgcgccattgaaatcccaggttttcaaaacttttataaagctctgaaagcttgttcagtgaggcgaaaagactttttcgacacgctgaataaataaccggtcatcacagacgctgaacggccacttccaggtctccggcaaagaaatcggcctcccggctgtggcaggtgaacaggaggatctgccgatgggctgctgcctgcttcagccaccggagggcggcggcgcagcgctcgtcgtcgaaattggtgagagcgtcatccagaatgatggggatggacttttccgatggcagtaccagctcgcagatagccagccgggcggagaggtagagctgatctgcggccccggcggacaaaagctggatgtcccggtcaatggggtccccggcggggcgggcagtgaggtgaaagctccggtccagagcggcggcggtgtagcgtccctctgtcagctcctggaagatctccgccgtccggcggctgagctggggggaaaatcggttttgcaggacggcgttggcaccggtcaaagtgtccatggccagacgcagggcgtcatattcctcctgaagctgaccggtctggctttgcagagattcgacggaagcccgcagcccgtcaggatcccccatagcgtgaaactgaccggtcaggcggtcggcggcggaacgggcggcggccaactggacctgcgcctgtgccagcgcatccgcgacggtttcccgactgcgaagaggaggagacaattccatatcacagctgtccgggatgccttgctgaaccaaaagatccagacggacctgagcttctctggcggcggtctgggcctcggacagtgccttgcggcgctgtgcggcctgccgcaggacctgatcggcggtggggatgtcaaaggcggcgggggcaaagcgccggacctc

SEQ ID NO: 12326 - DNA, 1571 bp, Unknown
  gut microbiota DNA sequence
cggcggcggtataggcatccgcaaaggcagtaatctcgttggtatccgtggtgccgaaccgcttcatgagggcgatattgcacagcttttttaaagcgtgctgtcggtactggcgggaaatataggtgccggctgctgccacaacggctgccgccagtgcgggaagagcccagggcaccaactgaaagaggggcagagaaaggacggacaactgcgagtacagcagggcaaagatgccgcctgccgccgcaagaaacaaaaagaaaatcgccagctctcgaaaagcgatagggccggggacccggtcggatgaagtgccttgggcttccttccgggcgctctccgccgtctgaccggcaaaggggctgtcattgacgttcttttccgcccggaggagggctttcatggcctcgtcccgatcagtgcgggctttctctacgttcttacggacagtttccagattgacgatggcgccccgcagccgtccgatggtctccatgtccgggacccggtcttcctccaactgctgggtcaaactatggactcgctgggcggcggtgtcggcatcggtggttaaggcggctaattggcggcgcttttgagcggcttcccattggtcgtgctgggccaattcatcggagagggcctgcacatcggactccaacgactgagaacgttccagagcgtctgcgagctgctgctgaagctgaacggaggagtccaactgctgctggacctccgcaagctccgcttccaaggccgggagctggccgctcttattgaaacggcgacggttcaactgctttttcaaagcgtcataggcctctgtatatgaggtatcctcgtcgccggaggaaatgagggacgctacgcggcgctccaggccggcgtcctgcgtgatggccagtccactttggcggatgaaggcgctgcgctcaaagacctcccggctgacgcccagcagcgtctccccgcaattcgtcccggtcaatccatcgacaggggaggcggtgctggtgtagacagcttgaaagtccgccataggggcggtctgccgccgggtagcccgggtgatggtgaggtcggcgccgtcagcgtgacattccagccgtccggacatggagccgccgtcccacggggcgtagcggtttttgtcggcgatgaaaccggccttgtcccgttcgcggctgttgatgccgtagagcatggcggtcagaaaggcacaccaggtggattttccggtttcattgggggcttctatgatattaagaccatcctggagctgcaaggtctcattccgtagccgtccgaagacggcggacatacgttgaatcagcacagtgatacctccgcagagcatatataatatggtgtcagtatagcatatcggggctgttttgcacagattattttcggcactgttaaggtgatagtaaggaataagaaatactaataattaaaatcaaaaaaacttggaaaaaaccgttgacaaacggggaagtatctggtattctaactaagctgtttgacggcgatgaagtgaatgagtcgggtgcttgaagatctgaaaa

SEQ ID NO: 12327 - DNA, 146 bp, Unknown
  gut microbiota DNA sequence
ccatcactccgcctcctccgctctcctcggcctccattcctcgtcccgcacctgaaacgcatcccccaactgcaccgtctccgggtagttgtgctgtgtggtctggatggcgtatttgtcgatctcggttgcgtagtaggcagtaa

SEQ ID NO: 12328 - DNA, 314 bp, Unknown
  gut microbiota DNA sequence
tcaaagacatcgtgctttaacggcactcttttccggaaaaacctgtcccggtactggccgctgtggggcctggcctccttcggcggggccatgttccctctggcgatgttgctggagctgctgcacgacgggttccggttctggtcgcctctggagaccagacaggcgtattacactgtgctgtcctatggagtgccggttatttccatcgtgtacgccattttgtgtgccatggcggtgtggagttatctttacaacgcccgcagcgtgggaatgatgcacacgctgcccatccgccgggagggactgtttgt

SEQ ID NO: 12329 - DNA, 241 bp, Unknown
  gut microbiota DNA sequence
ttcgccgcatcagcccgctccacgatcaactctgccgctgtgtggcgatgaacggcataatgcagcttgttctgcacggtctggaaaaacagacgagtggtccttgcatccttgtcgtagtcgaaatctgtagcgtagaagtccgtgaccttttgatcgaatttccgctcagccagccggatttcacggatgtactggagctgacgctcaaagtattcatctgtgaacatatgtccttttt

SEQ ID NO: 12330 - DNA, 433 bp, Unknown
  gut microbiota DNA sequence
tccagatcgtagtcaccatagtcgctgtcaccgtagtagaacttgttgctgctgaggctggaacgggtaaaggcagtctcattccgcttaccgtaccgggaatagagggtaccggcattgttgaacgcgctgtcgggccggctgaactccacatacttgagagtgccggagcagctgctgttgttgtagaacttctcgaaatcgtcatcgtcaaaggcgacctcgtctccggccttcaccgtataggtgatatcacccttggtcgtggacgaaccagtcttaccggtggcaatgaccagagtaccggtgacattctggttggtccgggtaccggtgccgccataggcggtaaagctcagctccacgctgccggagaaggtccgatccgccacaaagctcagctcgtccagatcgtagtcaccatagtcgctgt

SEQ ID NO: 12331 - DNA, 188 bp, Unknown
  gut microbiota DNA sequence
atcggcggcaagggcggacggtccacccccatcggtctgggcggctggaagcccattgtgaccatcattctgttcatcttcttcatcgtcggcatcatcatgccggtgatcatcctgattctggagagctgcatgctgaaggagggcacctattctctgtccaacttcacgctgtactactggatcgg

SEQ ID NO: 12332 - DNA, 618 bp, Unknown
  gut microbiota DNA sequence
ggccggtaaggccgcagagcgtgccgccgccaaggacggcgtgagccttgcgggggaagcacgcgacatggagaccgggaaggacgcgctcgcaggcgatgaccccgccaagtccaccaagtcgcgaaccgggcaggatatcgcccagtagtacagaggaaagaggtgacagttcatggtaatcgaggtgctctacaagtccttccgctacgagaagttcgactcatccgcccagacgaactccgagccgttccgcgcgaagggaacgaacatccttaccgactggaacctctacctcggtgcccttgaggaaaacggcatcattctcgcagagcactggtatgacggaaatccgcagcacgcaggcggacaggtgacccttgagggcaccaaggttcccgccgccacccgtcaggtcgggagcgccatgctcctcgtctcgccagatgagctggacgatgtagtctggctcaagaaggacggcgaaaagctcctgtggcgggagggcgatgagctgataaacggcgagcggttcttcgccatggagcagctgtgttactccgatgccacagtgcaatccatcaaccgtcgcgccatcgccgtgttcgactacttgaa

SEQ ID NO: 12333 - DNA, 188 bp, Unknown
  gut microbiota DNA sequence
catccgcgatgcagaaatctctcaggacgagggtttcgtggacgatgacggggaaggtcaaaacgaggaagacaacaccggggctatcggcggatatgacttcggttagagatagaacgaaacgagaaacgcagttcaaacgaaccaccaacgaagctacagaaaaccacgcaaacaaggaaggagaa

SEQ ID NO: 12334 - DNA, 308 bp, Unknown
  gut microbiota DNA sequence
gcacgggagccgccaacaacgccgcccaggacctcagccagctcctcagccagcttgatgccgccctcgacatccttgctgatgccgcggcccacagacacgatgaagtcagcgccgatcaggtccaccagcttcttagcggccttcaccacctcggtaacgtcggtgtggatgtcctcggcagtcagggtgaaattgggctttacgatctccacagcgttggccttggcctcgtcgaaagcgttcttcttcataacgccgggacggacggtagccatgcagggacggaaacgggggcagatgatggt

SEQ ID NO: 12335 - DNA, 278 bp, Unknown
  gut microbiota DNA sequence
gtcacgccgaacagatcgtacttcatggcgccgcacagggccgcgcagcccagcgccaccgccagcattcccttccatgtggtcttgaacacccggggcgttttcgccagcagcatggacgccgcgtaatagcccacggcgccgcccgcgatcatgcacaagatcatgggcaggagcgcgaagtactggccgttctgaaaactctcccacagcagggcgtacagcagccgtccgcccagaatggcggcgtagacggcgcagccgtaccggaacaccgg

SEQ ID NO: 12336 - DNA, 936 bp, Unknown
  gut microbiota DNA sequence
cggcgcttctttttgaatgtaatccttatcgtcgataatggtctgatgcagcgtccggacctcctcgatgagggcatcatcctttccgggggtcaggtaatagttgctgccggcggcgtagacgttcaccagcttcacgctgtccggcgcggggacccgccgaaccacgccgaacaggtcgcacttcatggcgccgcacagagccgcgcagcccagcgccaccgccagcatccccttccaggtggtcttgaacacccggggcgttttcgccagcagcatggacgccgcgtaatagccaatagcgccgcccgcgatcatgcacagaatcatgggcagaaccgtaaaataccggccgctctggaagctgtcccagagcagggcgtacagcagccgtccgcccagaatggcggcgtagacggcgcagccgtaccggaacaccggcttcatccagcccacggccaccacgtccccggcgctctcgctgcggcgtctgcggtacagcagccacgccagtcccagcagcgccgcgcccgcggcggcataggcggcgatgagccagccgttttccagcgtcacggaggtcagcacactggtctcataccgctgaccgcccagccgatccgtcacccactgggtttcgtaggtgctgttgggagagatcttctgcacgaggtataccacggggctgagccactccacggtaccggaataactgctgttcaggccaaagcagaagccctgcgccagcaggttcaccatgaagtccgtcagcacggcgataaagttcagcagtccgtaaagggcgggcagcatgaacacgttgcccacgatgaaggcgcagagggtggcaaggccgaagaagaacaaactctcccccataacgcctaagaccgtcaccagcacgcccatcggctcaaagccgccgaacagcatcgt

SEQ ID NO: 12337 - DNA, 2308 bp, Unknown
  gut microbiota DNA sequence
gaagttcagcagcccgtaaagggcgggcagcatgaacacgttgcccacgataaatgcgcaaaaggtagcaaggccgaagaagaacaggctctcccccataacgcctaagaccgtcaccagcacgcccatcggctcaaagccgccgaacagcatcgtcaccagcaccagcaaaacgccggtcacagcgtaggggatagccatcatcgtcaggccggacagcacgttggtaacaaacagtccctcccggcggatgggcagcgtgtgcatcattcccacgctgcgggcgttgtaaagatagctccacaccgccatggcgcacaaaatggcgtacacgatggaaataaccggcaccccgtaggacagcacagtgtaatacgcctgtctggtctccagaggcgaccagaaccggaacccgttgtgcagcagctccagcagcatcgccagagggaacatggccccgccgaaggaggccagaccccacagcggccagtaccgggacaggtttttccggaaaagagtgccgttaaagcacgatgtctttgaccgcataatccgcacctcccaattcgtaaataaagatctcctacagcgtcagggggatggcgtccaccagcagcgggctgtaagccatcagccgctccgtggcctcctgcgcgttcatccgcatgatgagggtatgcacccggccgagcttcgaggcatgaagcaccggcagctccgccggaacgtcctccatgccgtcgggaaacaccacctgcaatttcaccatgttatcctgcaactgggccaggctccgctccagcagcacatggccgtggtccatgatgcccacatggtcgcacacgtcctccagctcccggaggttgtggctggacaccagcaccgtagtgccccgctccgccacatcgcccatcatcaggctccacacctgacggcgcatcaccgggtccagaccgtccacaggctcatccaggatcagataatccggcatggcggacagagccagccagaaggccgcctgcttctgcatacccttggaaaaccgccggataggccgcttttcgtccagttcaaacacttcccgcagcttttcataccgctccgtggaaaaattgggataaaatcccttgtagaaccgcatcatgtccccgatgcccgcggaattgaaatagtaccaatcatcgggaatggcggcgatcttggccttcagcgccgcgttttcccacacatcctcgccgcccagccgcacggtgccgctgtcctgccggaaaataccggtaagatggcggatgatggtggatttgcccgcgccgttaggaccaaccagcccgtagacagccccggtgggcacgctgatggtggcgtcattcagggcggcaaagccgtcaaaggtcttgacgacgtttttcacttcgatcattgctcgtatacctcctcgatgagcgccgcagcgtccgcttccgtcacgcccagataccgcagctcattcagcagttttttcacatccgcccgaagcgtttcccgccgggcagcgtcggcgtccgccgtaccgctgacgaagctgccctttcccgccacggagtaaatatagccttccgcttccagctcgttataggcccgctggatggtgttgggattgatggacagctgggtggccagcgcccggaccgacggcagcttttcgtcctgagccatggccccggtgacgatcatccgccgcaggccgtccttgatctgttcataaatgggacgggaatcccggtaattcaatgtcagcacatgtgcctctcctttctgaggaatgttcgatcagcggtgcaggatcaccgctgtcagcaaaataaccagcagtaccgcgcctgcgataccaagcaaaaacagcgtactcattgcatctgccccgttctcagggctgcagggccacggacaccagaacaacagcggcaaaaatcagacccacgatggcggcgatccccgcaaaaccaaacagcatcatgtttcgtctcctttccggcccggcttcaaaaccacgcccaccgtcagcgccgccagtgctcccagcaccatcagggcggctactaccttcttgatgaccttcataacgttcctccgaactgtaccaactgtactatgtgtgttagtacagttagaataacacggccgtttctctctgtcaatcccctttcaaaaaaatattttccgcctcttttccccactccttttataaaaacaaggaattttttgcatttttctctttacaaccgcacattcctatggtaaacttgttcagcacgtgaatttgtgcgca

SEQ ID NO: 12338 - DNA, 392 bp, Unknown
  gut microbiota DNA sequence
gcctccacctgatcgtgggtgacgtagatgatggtggtgccggtctcgtgatggagccgcttcagctcggcgcgcatatccacgcggagcttggcgtccagattggaaaggggctcatccagcagaagcagtctgggctcggaaacaatggcgcgggcgatggccacacgctgctgctggccgccggacagctcggtgggatagcgcttggcgaattcaccgatctgcatacggtccagagcgctggcgacctttttggcgatggtctcgctgttttccttgcggatacgcaggccgaaggccacgttgtcgaacacggtcatgtggggccacagcgcgtaggactgaaacaccagattcaggttgcgcttgctgggcggggcgaaagaagc

SEQ ID NO: 12339 - DNA, 221 bp, Unknown
  gut microbiota DNA sequence
aacacgcgcaaggccctttttcactatattgtgtcaagggaatcaatgattttttcaaactgcttccgtttgatctggatgcggttgccgttcaggatcacccagccagcggtggggttttcctcggcaagccgacgcagtttgttttccccgatccgaaaatatttggacgcttcctcaatggtaagcgtgtatttttcccaaataggcacatcgttatt

SEQ ID NO: 12340 - DNA, 300 bp, Unknown
  gut microbiota DNA sequence
ttcagcgccgcgttttcccacacatcctcgccgcccagccgcacggtgccgctgtcctgccggaaaatgccggtgagatggcggatgatggtggacttgcccgcgccgttgggccctaccagtccatagacagctccggtgggcacactgagggtcgcgtcattcagggcggcaaagccgtcaaaggtcttgacgacgtttttcacttcaatcattgctcgtatacctccttgatgagcgccgcagcgtccgcttccgtcacgcccagataccgcagctcattcagcagttttttcacat

SEQ ID NO: 12341 - DNA, 203 bp, Unknown
  gut microbiota DNA sequence
ctggacgtggatgtgcccaactacatccagttcctgcgtgagtcctccactctggacgttgactccatgaagtgggatatggaggaccgtaacctgaagatgacccgtcctgctttcggcggtcacctgatggctaccatcatctgcccccgtttccgtccctgcatggctaccgtccgtcccggcgttatgaagaagaacgc

SEQ ID NO: 12342 - DNA, 5360 bp, Unknown
  gut microbiota DNA sequence
ctccttttcgttatgctgttttcggctctgtgaggtattcgacagcgactccttggcgggtatccgctttgtaatgcggatgcctcggcactgccgggatctccacatagccaacaaagcggtagtagatcacgatccgctgggtacgattcttgccgatcccctccgtttcaaacacatcaatgtggtcgatcagctctcgcagcagcggcgctgtcaggtaatccatctgcataaaccgccgcacagcaaggatgaagctctcccgctgctgttgctgctttccggattcggacagcttcttgcgaagggcggtgatcttacttttcagcgccattcgctccacctcatatttatgggacagctgcataaaccactcatcactgacctttcgtggcgttgtcctcatagagtttttcatagagccgggaaacggtgtcgttccgggtcatcgccttttgcagttcctcctcacagcgcttttgttcccttaaaagttccttgtcgctctttctggccagcagttcggcaaaggcatcttcgtcgctcagatattctaccacctacaccaagggcggctccatcatttccgcttatccggaggaggccaccgtactcatgcgggccagcagcgaggacaacttctacaaggccggctggtggaacggcatcgacgatcctgaggcgggcctgaagggccacgccctggctatcgactatcaggccaacgggctggatatgacggtgttctgcaccagcatcaccaacaaggcccaccggaccgacgactaccgtctggctaccaacgccatttacagtaagctcctgggtaccgatttcaccgtggagtccgacgagccccctgagcccacccccaacccggataccaagcccgataccggcaaggatacccagtctccggagaccggcgacggcatgaccgttaccgtgtgggtcatggcagcgaccctgtctgtggccgctgtgctggtgctctccgccaagaagcgtgaggatcgattttcttcccaaatagccacataacctgaaaacagccccctccgccttacaggcggaggagactgttttttcggcgggttgccggaaatgggaaaatgtggtatgatactaaaaaacattttccccggaggtgcgttatgacccaactgcaaggcttttttgagaagaacttcaccctgtccccggattattgcggggcatcggcccggatgtcaccgctggcggccttcaccatgtttcaggccattgccgcagagcacgccgagcgcatcggcgtaggcggcgcagccatggcgcaacgtggcgccttctggctgactctccacagtcgggtggacttttttcaatggcctgctctggcgcaggaggtgacggcggccacatggccggagcactgcgaggggagatccctgcgctgcttccgcagctacagcctgcggcagggagatcagctgctggcgctgggtcgcacccagtgggcggtgctgggggagaaggggcggctcattccctttgcccagtctggcttcccggaggatttcccctttgtggagcgggagggcatcacggaggcccccgcccggttccgggacgacctgctgccggaggagctggtgcagcggcatacggtgcgctccacggacatcgacatgggccgccacatgaacaatgtggcctatgtgcgtctgttgctggactgcttcccggccagcgtgctggcggacgggaagatcgcctccatggaggtccactatgccgctccctgcctcgagggggaggagttgtcggttctctgccgccgggagggcggcatctgccgcatggcggtgcggaagcccgacggcaagaccgccgtactggctgccgtccgctttcacgaaaagtaagtgagcatacaaaagccccgcgggaaacgcttccgtttcctgcgggggctttttgcttatccgaacacgtggaggatgacgcacagcaggatcaggcacaggcccagacacgccatcagtagtgcaaaggagagacttccctccatccgctggaaggtgtccagtacggtacctacgtgatccgccgtctcctcttgggagtacttgctgttgtgggacatggcccgcaccacagagctatggggcgagcggcggacgtggtcacgggtatcccgcagcagggtgcggcgcatcaccagcaccagcagatccagcaggtcgcatgccacccggcacagggtcatcagtacccggatgagccaccggaagaagggcttgtagacgctctcctccaagctgagccacgccggccacagggagcggtagcggacctcaccgtcccggcgctccatgagaaggggccggatcagcaggaagtataccagcataccgatggatagggagatgaccacgcccttgaggttctcccaagccagatagtggacagcatgggagaagtcatgaccgccggagaaggagagggtagcggcggcgagcttctccgacagcccatggggcagcagacccagcatcggcagcggtatcgctgccagcatcagcgccgccacggagaggggcgttccccagcgccgggaggcggcgtgggcatctgccggtgccgtctgccagaataccgccacatagatcttggtgagataggccgccgtcaatccgccggatagcaggaacagccactctaccgccgtaatggcggcgctgccggtctccaccgccagctccaccaccgcctcgtggaccagcgtcttgctgacgtagcccagaaagccggggataccggccagggagcaggctccgcacagaaacagcccgtggagcaggggcttgccccgcccgaagccacggatgcggttcagatccagctggtgggtgttgtaatacaccacaccggcaaagagaaacagggtcagcttcaccagcgagtggttcagcatatacagcaccgtaccgtgggcggccagtgcgttgtgctcccccagcagggtcagcatggccacgcccaccagaatgaacccgatctgggacagggaggagcaggccagaatgtacttgaggttggtggagaacaccgccattacggcgcccagtaccatggtgatgcagcccagtatcagcaccagaacgccccagctacggttgcccggcagcaggtagacggtgacgaccagaataccgaaaatacccgccttagtcagcacacccgacagcagagcgctggcgggggccggggccaccgggtgtgccttgggcagccagatgtgcagcgggaacacacccgccttggcggcgaagccgaagaacacgcacagagccgcccaccacagggccgtgcggtccgttacggcggcgcaggccgccttcagctccgacagcaccagtgtccccgtcagatgctggagcaggaacagccccatcagcgtcacaagaccgcccagaacagcgatggtcagataggtctttccggcgtccagcgcctccggtgtctcctcctgtaccacccacacataggagccgaggctcataagctcgaagaacagaaaggtggtcttgaggtccgccgacaggaacacgcccagcgtaaagctcaggcaaatgaggaagaagaaatagtaccgccgcaggtggtgatggccccggaaatactggggcgacagcatggcgcagatgagccacatgaagcacaccaccagcccatagagccgctggaagccgccaaaggtgaaggacacccccactacgggggagacgatgactgtccctaccggcaggcggcacagggccagcatggtccccagcgccagcaggactgtcaggatgacaagctcgcctgtccattgggaggacggctccttctgccgggggatggcgatgccgacagctatgacggcgggcagcacaaacaaaatcagcagatagaacgtggtcacagtgtcaccgcctctcgaatcagatccagcagtccctgaggcatcaggcccatcagcaggcaggccgccgccagcaccaccatgggtaccagcatctgccaccccgcctcatggacggagccctccggaatggccggagcgctgtgccgggggaaccatgcccggactgcgatctggaacatatagatagctgtcagcagcgccgacaccagcagcacgccgaagccgatgatgggcaggggctgataggtgtccaccgccgccagagccatgtaccacttgctgacaaagccggtgaagggggggacgcccgtcagggcgcaggccgccaccgtgtagcacacgaaggtcacgggcatccgcttgcccagcccctccagctgatggacgtactcccggtgactgtaatgcagcacggctccggcagtgaagaaggccaggatcttcaccacggagtggacgatgaggtgcaggaaggccgccgtcagcgccggaagggtcataatggtggcggcgaagaggatgtacgacaggttcgacaccgtggagtaagccagccgccgcttgaagtgccgctgcttcaccgacatacaggaggcaaacagaatggtgataagggtcagagtcatcaccgcctgctgcgcccacgtccccaccaggatctccgtgccgaaggcgtagtagatcaggcggatacaggcgaaggcaccggatttcaccacggccaccgcatgcaggagcgccgtcaccggcgtgggggccaccgccgcagcgggcagccatgcgtgcaggggccagatggccgccttaacgccgaagcccacaaaggccagcacgaataccgccagcagcagctgccgatcgccggtgtagcccgtcagatgaccgcccagtgtgaagtcctgcgcatcgttgacaacgagaaaaaccagcccgataaaggccagcgccgccccgctcatggagtagacggcgtacttgacgccggctttccgggcggtggtggacatgggctgcatcaccagcggcagcgtggccagtgtcagcagctcatagaacagatacatggtcatcatgtttccggcgaaggccactcccagcgtcacaccgaaggagacggtgaaaaacgaccagaacatggacagatgcttctcgtggctcatgtagtcgaaggcgtacagcatggtgaagggccacagggtagcggccagccccgcaaagagccgggaagcgccgtccatccgcagggtaagggtcagctcctccgtgaagcgcagcagctggaagctctcgctgccgcagcggagaatggagagccatgtcgccgccgaggtcaggcagatcagcaccccatagaacagatggcggctgcgagtgctggggaagcggatcaggtacgagacaagcc

SEQ ID NO: 12343 - DNA, 35238 bp, Unknown
  gut microbiota DNA sequence
aaaacccagaattagcaagggttttcgaggggacgaaattcccagatcccgccgaaatttcgagtcagtcccgttatgaccacttcgatatcgctccgtgtctatttccgcctgccactctcgtcgtttccaaagtactcaaaaatcctttggagagaaaagcaggagagaaaacataaaagtattcgatttggaattttgaaaacccagaattagcaagggttttcgaggggacgaaattcccagatcccgccgaaatttcgagtcagccctgttatgaccacttcgatgccgctgcgtatggaggcttcgacccatctatcataccacaaattttcccgccgtgcaacaggtattgccgcatatttttctttgccgccgcatgagatgatagggaggagggaatcgctatgaaaccgaagatctatctctatgggacaagcggccaatacggcaactatctggcggcactgacggaggcgggagcggagccggtgctgagccgggacctgttccgggcttgcggctgcgacgggctgctgctgcccggcggcggggacatcggggtcacgctggaggccacggacagctttcttatccggtcctttgccgacagcggccgccccattctgggcatctgccgggggatgcaggcactgaacgtctttttcggcggcacgctccacgcccgcatccccggacaccagcaggtgcagggagatctgatccaccccacacgggccagaggactgctttcgcagctgctggggccggctccgctggtaaccagcaaccaccatcaggcggtgcgggtgctgggggaggagctgtgccttttgcaacaggcggccgacggcaccatcgagggtttctgccatgagacgctgcccattttgggcgtgcaatggcacccggagcgccagagcggcgcccgcctgcgggaggatgcggtggatgccgggccgctgctgcggtattttgtgggccaatgcagttgcaaatctgcgccgggactggtacactgtgagaaaaggggggaggctgatgaaagccatcacacgggaactaaatctggagctgggacggcccacggcggatgaagccctacgacggctggaggcggagctggaagcggcccgccatatgaacacgccgctgctgaagctgatccacgggtacggctcctccggcaagggcgggcgcatccgtacggccagccggaaatatctgctggcccagcaggagaaggggcgcatcgccgctgtggtgccgggggaacggtttagcatcttcgatgagaccacccgccgggccttgcagcagtatccccatctgcggcaggaccgggatctggagcgggagaacatgggcgtgaccttcatcttcctgcgccgcttctgaggaaaaaccgctataccacatatatttaatacggaggaatggatcatggaacgtacctatgcagaatacgccgcccggcaggccatggaactgctggccatcgatagccccacgggcttcacggcccgtgcggcagattgggtgcagcgggcctttgaagagctgggctataccgcccggcgcaccgctaagggcggcgtgctggtggatctgggcggccggggcgagggcctgctgctggaggctcacgccgacacgctgggcggcatggtggcggaggtgaagaatagtggccgcctgcgcctgacgcccttgggcgggatgcgggcggaaaacggcgaggcggagaacgtccgggtctatacccgtggcgggcgggtgctggagggaaccttccagctgtgcaacgcctccgtccatgtcaacggccagtacggcgataccaagcgcacctttgacagctgcgaggtggtgctggacgaggacgtgaagtccgccgaggagacccgcacgctgggggtcgaggtgggggacgtggtgtgcttcgagccccgtacccgtctcactgcctctggctatatcaagagccgctttctggacgacaagctgtcggtgggcatcctgctgggtctggccaagtaccttaaggacaccggcacagtcccccagcgccatgtatacctccatgtgacggtatacgaggaggtgggccacggcggcgccgccaatgtcccgcagggggtgacggaggccatcagcgtggatatgggctgcgtgggcgaggggctgcaatgcaccgagcggcaggtatccatctgcgccaaggactccggcggcccgtacagctatgaggtggtgggcaagcttatcgatgctgcccgccgcaccggggcggactatgcggtggacgtgtacccccactacggctccgatgtggaggctaccctgtcggcaggccatgacctgcgccacgggctcatcggcgccggggtctacgccagccacggctacgagcgcagccatgtggacggcgtgtggaacaccctgaaggtgctggcgggctatctggaggcggacggtgtccggtaacaccttcccgccccggccccaccttaccaccccacgcctgacgctggatgccctgaccccggcagactgcggggactatgccgccctgtgccgggatgcccggcgcaaccgctggtggggctacgactaccgggaggagcagccccatcccccggaggagtggttcctgcaggcgtcggaggaggactacgccgccgggcgggagctgggccttgcggtgcggctccggggccggtgcatcggggaggtggtgttcacccacttcgacggccgcggcacggcggagctgggctgccgcatcgctgccgcctatgccggccacggctacggcaccgaggcctttgctgccgctctggcgtggggcctgaagggctgggatctgcggcgggtgacggccaaatgcttccgggagaatcatccctcccggcatatgctggcagcctgtatggaccccaccggtgaggacgagacgtacttctattttgagaaatgtatacaaaattagaatgatatgcatatggatattttatcagaatgaaaaaaatatataattagatgaaagtattgacaaatatagacgagatgtgatatgctccgagtacaccaataaaactatgggggcatctaccgttgtgaacctgtgagagtaaggagaaccctatgacaaacaaaagcgcacttggtttgggcctcattatagctgctgcctacgcatttggactgggagcgggcctcataattcatgtcgggtatgcatttgtactgataggactatttatcctgctgttggaggctattaaagagtaacagcgttacatgaagacggatcggagaacgctcacctcgtgaggtgggcgctctccttttgcatattccccggcagaaattcccatactacctccaaacgcaaggcggaggagacggcatgaaacgggtgaaggatgcatttgacgaaagggcggcggcgctggacggcctgctgggggtggggcgcagcttcgacatgatcgggcggaccctgcggatcggcggccgccgggccaggctatgggtggtcaacggctacgccgacgacacggtgctggagcgggctatctccgcatggctgcccatcccgtcgctggaggacgtggggacattgcaggcctttgccgaccgctacgtcagcgtctgcgacgcagcagtggagacggaccggctgaaggcggtgacgtcggtattcgccggcaagaccctgctcatcatcgacggcttttccggcggcgtggtgctggatgccaagcagttccccctgcgctccgtggaggagccggataccagcaaggtgctgcggggcagccacgacggcttcggggagagcgtcatgaagaacgccgccctgctgcgccgccgcatccgggactcgcagctgacgctggagtctttgcaggtggggacccgctcccggacggacgtggtgctgtgttacatggaaaaccgggtggaccggaagctgctggatcagctgcggaaaaagctggaggccatggatgtgggctccaccgccatgagccaggagagcgtggcggaggccatcgccccaccccaatggtggaatcccttccctaagacccgctacaccgagcggccggatgtggcggcggcctcggtgctggagggggatatcctgctgatgatcgacaacaccccggcagtgatgctgctgccgtgcagtctgttccggtttctggaggaggtcaacgactactatttcccaccgctggtggggacgtatctgcggatcgtccgggtcatcgtgctgtttctcacgctgtttgtaacgcccctgtggtatctgctggtgaagtcaccggatacccttcgccagagcctgcactttctcctgatcgaggacgagtactatgtgccgctgatcctgcagctgctgctggtggagttcatcatcgacgtgctgaagctggcctccctcaacaccccggatgtgctcagcaactccttcagtatgctgggagcactgattttaggagactttgcggtgcaggcccgatggctggtaccggaggtgctggtatatatggccttcgtggccatcgccaactacgcccagcacagctacgagatgggctacgccgtgaagctgtgccgcatggcgctgctgctgctcatctggctgtttgactggtggggattcatcggcggtattctggggattctggccctcgtcgccagtacccgtcccctcatcggaaaagggtacctctatcccctgatccccttcaacggcaaggacctgtgggccctgctgcatcaccgccccattgaccggaataacagctgagggttgcaaaatttccaaaaacaaggccgtcccacttgtcagcggggcggctttgtgctattcttagcatggttttttgtataaagacgcatttctgcggagagaggagagaagatcgtggcgcagctgcgggagaagcgactgttcctgctggatatggacggcaccatctatctggatgagcagctcttcgacggcgtgccggagtttctgcgatacgtccggcgcatagggggacggtatctgttcctcaccaacaactcctcccgtggagtggaggggtacatagaaaagatgcaccggctgggcatcgacacctgccgggaggattatctgacctccgtggatgccaccatccgttatctgcgggcgagcctgccgggaaagacctgctatgtggcgggaacggcgtcctttatggaccagctggcgcaggcgggcatccctgtgacccgtgaccgggagcaggcggaggtgcttctgtgcggcttcgacacggagctgacctttcagaagctggaggacgcctgcatcctgctgaaccggggcgtccccttcatcgccaccaatccggactgggtctgccctacatggtacggctccgtgccggactgcggcagcgtgtgccggatgctcaccaccgccaccgggcgggagcccaccttcatcggcaagccccagccggagatggcgaggctggccatggagcggacgggcttttccccggagcagacggtgctgctgggggaccggctctataccgacatcgcctgcggcgttaacgcaggcattgataccgtgttcgtcctgtctggcgaaggcacgcaggcggatatcgccgcctatcagatccaccccacctgggtgtatcccgacatcggtaccctgtaccgggaactggaggagactgtatgaaactcaactacaagcggatcattctggtgggctttgccttcttcctgatccaggccttctggcaggcgtatgacaataccatccccatgatcctcaccaacaagttcggcatgagtcaggcatggtccggcgccattatggcgctggataatgtgctggccctgttcatgctgccgctgttcggcgccatctccgacaagcaccacagcaagtggggccgccggacgcccttcatcgtggtgggtaccctcattgccgccgtgatgctcattgccctgtctttcgtggataacgcccagctgcaccacatctccgatgtggccgccatcgacgacccggcggcgctggagaccatctacgaccgggaggcggatgagacgctgctgacccccggcggccagaagttcgtgctcagccgccagttcaccaaggaggagttcacccagatccgcagccagatcactgtggacggtgccgccgtcaccaaccccgactacaccaactacgtgatgccggcccggcaggcctgcgcttgggacgccaccgccaaaagcccggtgacactggtgttcttcatcgctctgctgctggtgatcctggtatccatgtcggtgttccgctccccggcggtggcgctgatgccggatgtgaccttaaagcctctgcgctccaaggccaatgccgtcatcaacctcatgggctccgccggcgggatcctggtgctggtgctgggcatggtgttcgccacctctgccgtccgcaactccctgatgagctatatcggctatttcgccgtcattgccgccatcatgctggcggcgctggtggtgttcatgctgacggtgcgggagaacgagtgggccgccgagatgcagcagcagtcggtggagctggggctggaggataaggaggaggccgccaccggtgaacggaagctgtcggtggacgaggtgaagtccctgatcttcctgctgctgtccattgtgctgtggttctttggctacaacgccgtgaccagcaaatattccgtctacgccagcaatatcctccacaaggattataacctgaccctgatcatcgctcaggcggcggccatcatttcctatctgccggtgggcttcatcgcctccaaggtgggccggaaaaagaccattctggcgggcgtcgtcatgctgaccgctgcctttaccactgcctccttcatgagcgccgagagtcccaccatgctcatgaacgccatgtttgctctggcgggcatcgcatgggccaccattaacgtcaactccttccctatggtggtggagatgtgctccggcggcaacgtgggtaagtacaccggtttttactacaccgcctccatggcggcgcaggtagccacgcccatgctctccggcctgctgatggaccgcatggggatgcacgtgctgttcccctatgccgccgtgttcacggcgctggcctttgtgaccatgctgttcgtccgccacggcgacagcaagccagaggtcaaacgggggctggaagctctggatgaaatggaggactgacgccaaatgcctgttgtcattgtactgctggtactgatcattctggcggagctgtttctgctgatgctgcgctgccgccgggagcatcccggctggaagctgctgcggcagtaccgctacgcccaccggggctaccacgacaagccccatattccggaaaactccatggcggccttccgccgtgccattgaacacggctacggtgctgagctggacgtccatttgatgaaggacggccgcttggcggtgatccacgacgccagcctcaagcgcaccgccggggcggacgttctggtggaggacctgacggcggaggagctgaagcagtaccgtctggaggggacgcaggagcagatcccccttctggaggaggtgctgcccctgtttcaggggaaaacgcccctcatcatcgagctgaaggcggagcggggcaaccatgcccagctggcagaggccacctgcaccatgttggatcggttccgggtgaattactgcatcgagtccttcgacccccggtgcatcctgtggctgaaaaagcatcggcccctgatcatccggggccagctgtcggagcagttcctgcgccacggggagtccggcggcggacacggaaggcttaccatgtggctgctggggaatctgctgaccaacgtggctacccagccggatttcatcgcctatcggttctccgaccgggagaatctgtgcctgcggctgtgccataaagtatatcatgtacaggaggtcaactggaccatccgagcgaaggaagaaatggaagctgcggagcaggcggggaacctcgtcatcttcgagtgcttcgatccggaggtgtaagccatgcgagtcatcacaggaacggccagaggccggcggctcaaggagctgcaggggatggagacccgtcccaccaccgacaaggtcaaggagagcctgttttccatcatccagtttgatattgagggccgccgggtgctggatctctttgccggcaccggccagctgggcatcgaggccctgagccgtggagcggcggaggcggtatttgtggaccggcggccggacgccgtgcgtctggtgcaggagaatctggccctgtgcggcttcaccgatcgggccagagtgaagtccggggatgcgctggcgtatctcaaaagcggggagaagttcgacctgatctttctggatccgccctacgccgccgacctgctggagcaggcccttaccgccatcgcttcgtttgacatttgccgggagcatggtataattgtggcggagagcgccgccgataaggtgctgccggagcttccggcgccctatcgcctgtatcgggaataccgctacggaaagatcagactgtcggtgtatcaccgcagcggaaacgaggacgaggccacatgaaaacagccatctatcccggcagctttgaccccatcacgctgggacatctggatatcatccgccgcagcgccccctgctttgaccggctctttgtctgtgtcatggtgaactgcgacaaaaagcccatgttctccccggagcagcggctggagctgattcgccgctcggtggcggacctgcccaatgtggaggcggagctttacagcggcctgctggcggattacgcccggcagaagggagcgggcattctggtgaagggcgtccgcaacaccacggattttgatttggagtatcaacaggcggccatcaaccggggcatctgtccggagctggagacgctgctgctgccggccagtccggcctatcagcacttcagcagcactatggtgcgggagatgatccggtacggacaacctttggagaaatatgttcccgccccggtggcggaggaactgaaagggaggtaaaccttatggaagagaaggatgtgcagcgactgctggatatgctttacagcatgatcgacgaggccaagagtgcggccttcagctcggataagtgcgtcatcagccgtgatgaggcactggatctgctggacgatatccgggccaagctgccgttggagatcaagaaggcgcaggagctggtgcgggcgcgggaggagtatgtgtcctccgccaagaaggaagtggagaagatgctgcgtcaggcggagctggatgccaaggtcatcgtctccgagagcgagaccctgcagcaggcccgccgcaagagttccgagatcattcgtcgggccgaggaacgcagcaaggagctgtaccacgtggccaacacctacaccgaggacgctctgcgccggacggaggaggccattcaggcggcgctggacgaggtgaaggagtcccgtgtccggttccgggccacctccaacgagcagatgcaggccaatcaggagaagctgcgggagcggagatccgcctcggagcaaccccagagcgacgagaatgcttgacgaaattttcggctgatttttgtgcaattttattgaaaaaccacatagcgcaagaaggggcaggtgagagcttgtcccttctgtcgtttgcggaagaaaacgggcgaatatcttgtagtaataaaaaatggcgggtactatatatagtgcccgccatttttgcctctttcggcactgaaacgaatgttctggaaaacggagaaaatgatggaaataatgaaaaaaaccacgggttttgcttacaaaagccgggaaaatggtacttgcaatcggcggagaaatcctgtatactcaacgtagcggtggggaattatggtgcgtttacccatgattgtggtgcaaaagcccacaaagtggagggccattccctaaagtggggcagctgcccacaacgctgagatttgccgaaaaagttgcgggaaaggggtgaaacaggcatgacgggccagtattttcacaatattgatgccaagggacgcctgtttatccctgccaagctgcgggagcagctgggagataccctccacgtgacggtggggcaggacggctgcctgtccgtttattccgataccgagtgggagaagttccagcaaaagctggacgagcgcaactttaccgacgtgaaaaagctccggctgatgtttgcgtacatggcggactgcgagccggatgcacagggccgcatcctcatccccaaccacctgcgccagcgggcgaagctggaaaaggaagtggtggtggccggtatcttcaaccgtgtggagatctggaacgcccagcgctgggccgagctggaggaggaggccttttcctccggttcactggagcaggcgatggaagaaatggggctgtaagagatggcgtttgaccgcaatgccgaggccgatcaggcctacggccacaagccggtgctgctggacgagtgtctggaggcgctggccatccgccccgacggcgtctatctggacggcacactgggccgggccggtcactcactggagatcctccgccgcctgacggcagggggaagactcatcggtctggaccgggacgggacggcgctggaggccgcccgtgtccgtttggcggagtacgccgaccgggtgacgctggtccacagcaacttcagccgtctggcggaggtgctggacgacctgcacatcgacgccgtggacgggatgctctttgacttgggcgtctcctccccacagctggatgatgcagagcgtggtttttcctatatgcacgacgccccactggatatgcggatggaccgcacggcgggtctgacggcacgggacgtggtcaacggctggagttatgaggagctgcggcgcatcctgtttgaatacggcgaggaacgctatgcccccgccatcgcccggcacatcctggagcaccgggaaaaggcacccatcgagactacggggcagctggtggaggtgatccgctccgccatgcctccggcggcgctgcgggagaagcagcatcccgccaagcggagctttcaggccatccgcatcgctgtcaacggcgagctggaggagctgccgcccatgctgcgtgcagcggcgcagcggctgcatcccggcggacggctggcggtgatctccttccactcgctggaggaccgcatcattaagaaaaccatgcaggagttggccaccggctgcacctgcccgcccaatttcccggtgtgcgtctgcggcaagaagccgcagatgaagctggtgagccgcaagcccatcgtggccacggaggcggagctgacctacaatccccgtgcccggagcgccaagctgcgggtggcggagaagctataaacgagagaacgggggcctgtccccctgaccatacagaggatacggaaaggagctgccgtcatggcacaacagaggagacgacccaacacaatggtatatgggaatctggcctacgatctggatacactggccagccagcggcagctggaggaggcagcccgcccggagcggcagtcccagccccagcaggcgccccgccaccggacggcggcccgtccccggcagcgggtgtcccccttggccctgtgtgccgtgggtgcgctggcagccatggcggtggtgctggtcatgggctacatccagctgacggcggtcaccggatccatcagcgacctgcaggagcaggtcagccagctggaggatcagcgggtgagcctggtgatggactatgagcgcaccttcgatatggccaagatcaaggaggccgccgaggcggcgggcatgaagaagcccaccgccggacaggtggaatacgtggagctgggcggcggcagcaaggcagaggtctatcaggccgagagcgacagcctgctgagccagctgacccacagcgtgaaaagcggcatcggggcgctggtggaatatttccgctgagcgacgccatatagtggaccatacgcaaggagtaagaaggtgacttcttgctccttgcctgacattgcggcggcgcagaccgcagggagcggagcatggcagaaaacagaaggaaaagtgaaaacatccggcgggccaaccgggtcatccagacccgtacctttgtgctgatgctggtgctgggcgtggcggtgtttctggtgctggccctgaagctgtatcagctgcagatcaagcagcacgactactaccagagcaaggcgctggatcagcagacccgcagcactgtggtgacggcctcacgaggcaccatctacgaccgcaacggcaacgagctggcggtatcggccacggcggagacggtgttcctctctcccaaggaactggcggaggagctggaaaagccggagaccaagtggaccaaggagagtctctccgccggcctgagtcagctgctgggtgtgacgcaggagagtattctggagcagatggagcgtacctactcccagtacgaggtggtgaagctccgggtggacgaggacacggccaacgccgtccgggagctcctcaatgacaacgaggtccacggcgtgtatctggagaccgatgccaagcgctactatccctatggctcgctggcggcccacgtcatcggcttcgtgggaacggacaacaccggcctctatggactggaggcccagtatgaggaggagctgcagggccagacggggctggtggtcagcgccaaggacaacggcggcaacgccctgccctatgaatacgagcagtactacgcctcccacaacggcgacgatctggtgctgacgctggataccaacgtccagtactatctggagaaatacgtcaaggagatggcggaccagttcgaggctgccaacggtgccaccggcatcgtcatggacgttaagaccggcggcgtgctgggtatggtgtcctaccccaactatgatctgaacaactactctgaggtgtcggacgcccgcctgaaggcggccatcgaggacggcagcgcatcgttggcggatcagcagctgcgccagtggcgcaacaaggccctcaacgacacctatgagcccggctccaccttcaagatcctgacgctgtcggcagcgctggaggagggcgtggtggatatgagctccacctttgaatgctccggctccatcaccgtcatgggccagaccatccactgcagcaacaccagcggccacgggcatcagaccctgaaggaggccaccggcaactcctgtaaccccgccttcatcaactgtggcctggggttgggaacggataccttctacgagtatatgcgctccttcggtctgctggatggctccggcatcgatctggccggtgaggccaccggcatctttatggcccagagcgacttctcccagctggatctggcctgctatgccttcggccagaacttcaacgtgacccccatctccctcatcgccgcacaggccgcctgcatcaacggcggctacctgtaccagccccatgtggtggagcaggtccgggacagcagcggcgctgtggtgtatcagcacgacaacacccccctgcgtcaggtagtcagccagcagacctccgccacggcccgtgagtgcctggagtatgtggtctccgatggcggcggccgcaacggacaggtgaagggctaccgcatcggcggcaagaccggtacggcggacaagggcaagaccggcgacgtggtggtgtccttcgtggcctttgccccggcggacgatccacagatcatcatgctcatcgccatggactcccccgcccgtgacaccggcacctacccctccggcggcgccatggtggctccggtggccagcaagatcatggcggagatcctcccctatctgggcatcgagcccacctacactgctgaggagctcatgggtgccgacaccaccgtcccctatgtggtgggcatgacccgtgaggaagcccagcagcgggtgaaggatcgtggcttcggctgtcagatcgtcggcgacggcgataccatcaccgaccagacccctgccggcggggccatcatccccggcaacgccacggtgatcctctatgccggggcggagaaagccacagagctgtgtactgtccccaacctgctgggccggacggcgtcggaggccaattcgctggccagcaacgccggactgatcctgcgcttcaccggcgccaccaacagcacctccggcagcatcgtggtactgaatcaggatgtggaggccggtgctcaggtggagcccggcaccgtcatcagcgtgcagctgggcgataccagcctcaacgactgagccaaaacagagcagaaaggaagtcttttcgtggatctcagggcgctgctggcgggacttacctccgccgccgtgccgcaggtgccggaggtcaccggtgtctgctgcgattcacagaggatacgccccggcgacgtgttcgtagccattcccggcttccgggaggatggccgctgccacatcgccgaggccaaggcacgaggggccgtgtgcgtcctgagccgggagccggtgcaggagctgccatgggccgtcgtgcaggacccccgccgtgcgctggcggaggtcagcgcacgcctctaccgccatccggaccgggagctggcggtggtgggcgtcaccggcaccaacggcaaaaccaccaccacctgtctggtgcgccacatcctccgacagacgctgggggtgcgggtgggcctgataggcaccatccggaacctgatcgacgagacggagctggagacggagcgcaccaccccggagtcctgcgacgtctaccgcctgctgcggcagatggctgatgccggatgccgctatggggtgatggaggtgtcctcccatgcgctggcgctggagcgggtacggggcatcaccttccgggtgggagcctttaccaaccttacacgggaccatctggactttcaccgcaccatggaggactactgcgatgccaaggcgcagctgtttcgccagtgcgaggccgccgtctgcaacggcgacgacccgtggacgccccggctgctgcgagaatgtgcctgccccgtgctgcgctacggcaccggggatagcagccgcctgcggggggagaacctccgcctgacggcccggagcgtggcctttgacgcccttctggatgggcggcgcatcccagtgaccgtctccatccccggccgcttcaccgtgtataacgcactggcggcgctgggcatctgccatatgctgggcgttccgccggagcagggggcagcagcgctgcaaacggcctccggcatcaagggacgcatggaggtggtccccacgccgggcctgccgtgtaccgtcctcatcgactacgcccatacgccggacgcactggaaaacgtgctgacagcggtgcggggctttgccgagggccgggtggtggcagtgttcggctgcggcggcgaccgggaccgggagaagcgcccgcagatgggccgcatcgtctcccggttggcggatgtggcggtggtcacctccgacaacccccgctgggagcagccggagaagatcatcgaggatatcctgccgggcctgaccggccccgccgagagcgtcgtcatctgcgaccggcgggaggccatcggctgggcactgaagaacagccgccccagggacgttatcgtcctgtgcggcaagggccacgagacgtatcaggaggtgtgcggcgaaaagcggcacatggatgagcgggagctggtggcggcatacaccaacggataacaccgccctgcggggcgagagggagagaagaatatgtatattatactggcaggcgttatcagccttatcgtgacactcatcgcaggaaagctgctgatcccggcactggtgaagctgaaggcggggcagagcatcaaggagatcggtcccacctggcacatgaacaagcaggggactcccaccatgggcggcctcatgttcatcatcggcatcggcgtggccattctggcggcgggctggccggagatgctggagggccgcttcacccacctgtatgtctacgcctttgcactggtgttcggcgtcatcggctacatcgacgactatcagaaggtgaagcaccatcagaataccggcctgacggcccctcagaagttcattcttcagctggcggcggcggtggccttcctgtgccttatgcgctacgaggggatgctgagccccaacctgtatatccccttcttcaacacccacatcgtcatgaactgggtggtgtatatgatcttcgctgccttcgtcatcgtgggtacggtgaacgccgtcaacatcaccgacggactggacggcctgtcctccagcgtgacgctgccggtggcgctgttctttgcggtgatgggtgccgtgtggggcggcttcacgcagctgggtgtctttgccggggccatgttcggcggcctgctgggctttctgtactataatcgctatcccgccaaggtgttcatgggcgataccggctccctgtttctggggggtgccattgcggcgctggccttcgcctacgatatgccgctgattttgctgctggtgggcttcgtgtacctgtgcgagaccctgtccgatatcatacaggtggcctacttcaaggccacccacggcaagcgcatcttcaagatggcgccgctgcaccaccacttcgagatgtgcggctggaacgagaagaagatcgtggcggtgttcaccgccgtcagcgccctgatgtgcctgctggcctactggggcgtggccgatcgcttctccctgtaacgcttcactgacattctgtgggaaaggagggatccctatgcccaatacggtacgccgccccgacgacgacagacgccgccgggaggcccagcgccgccgccagagagaggaggcagagcgccgggagcagatacgcatcagccgggaccaccggcagcgcaccacacagatggagcgccagtccctcatgggacccatggatcttcccttcctgcttctgacgctgctgctcaccggcgtggggctggtgatggtgttttccgccagcttcccctcggcctattatgagaccggcgacggggcatactacttcaaacgccagctgatctttgcggtgctggggctgtttgccatggtggtcatgtcccgcatcaactaccagcggctgcgaggggcctccaagctgctgctgggctttgccgtcttcctgctggtgctggtgatcgtgccgaagaaccctctggccatcaccaacaacaacgccacccgctggctggggacggagggtttctccttccagccctccgagatcgccaagctggcggtggtgatctactttgccgacagtatctccaagaaaaaacggaaaatggagacctggcgctacggcatcgtgccgtatctggcggtgctgggcctgatcgccattttgatgatgctggagcctcacctgtccggcaccatcctcatcgtggggacgggcattgtcatgatgatcgtgggcggcatccagcgctggctggtggccgctggtctgggcggcgtgggcatcgtggcggtgctgtatgtgcagctggtggaaaagggcatcattcaatacggtaagggccgtatcgatacttggcgtgaccccttcaacgaggcgtggttccacggcgacggctggcagatcagccagagcctcatcgccatcggctccggcggcctgctgggtgtgggactgggcaagagtcggcagaagttcctctatctgccggaggagcacaacgattgcatctttgcggtggtgtgcgaggagctgggtctcatcggggcctgcgtggtgatgctgctgtttgcgctgttgatcctccgtggcttctggatcgccctccacgccaaggaccgcttcggcaccctgatggtggtgggcatcatgaccctcatcagcctgcaaacctttttgaacattgcggtggtcacgggactgattcccgccaccggtatctcattgccgtttttcagctacggcggcacggcactggcgctgcaattatttgaaatgggcatcgtgctcagcgtatcccgtcagatcccggcgccccgcaacggttaggaggaagctatatgaacgtgatctttacctgcggcggcacggcgggccatgtgaacccggcgctggcgctggcgggctatatgcaggagcggcatccggatctgcgggtgctgttcgtgggaacgccccgtggtatggaacggggactcatcgaaaaggcggggtacgacttccgctccatcgaggtctccagctttcagcggtccctgtctccgtcaggcatcgcccacaacgtgaaaagccttaaaaatctggcgctggccggctccagagcccgtgccatcctccgggacttccgccccgatctggtggtggggaccggcggctacgccagctatcccatggtgaaatacgccgccaaggagggcatccccacggcagtccacgagtccaacatggtccccggccttaccactaaaatgctggagggctatgccgggtgcatcatggtgggcttcgaggagtgccgccagcactataagcacccggagaagatcgtggtcaccggcacgccggtgcggggcgacttcttccgccagaccaaggagcaggcccggcagaagctgggacttaccgacgaccggccgctggccgtctccttctggggcagtctcggcgcacgattcatgaacgagcatatgctggacttcttccgcttggaggcgagggacggaatgccctttcaccacatccacgccgccggcaagggcagttgggataccatgcgccagacgctggaggcagagcagctgacgaagacaccgggactggatgtccgggagtatatctacgacatggcggatgtcatgcgtgcggcggatctggtgatctgccgggcgggagcctccaccgtcagcgagctgacggcgctggcagtcccggcggtgatcgtcccctccccctacgtgaccaacaatcatcaggaaaaaaatgcccggatcctggaaaaacacggcggcgcacgggtcattctggagaaggatgccaccggcgaagccctctaccgggccgccggagagatcctccgctccccggagctgcgccgcagcatgagcgccggcatggcggagctgggcatccccgacgccacggaacgcatctatcggaccgtcatggccctgcggaagtaacaccacacattgtccccctgcataggatggcgaaaacgctaagaaaggcgggggcatatgagtgcgatcatcatccggggcgggcggcccctctccggcagcctgacggtgcagggggccaaaaacagcgtgctgcccattctggcagccacccttttgagcggggaggtgtgccgcatccggcactgtccccgtctgcgggacgtggagacggccatggagatcctgcggcatctgggctgccgtgcggactggcagggcagagacctgctggtggacgccgcagacctgacccgttgggatgtgccggatcacctcatgagccggatgcgctcgtcggtggtgtttctgggagccattcttgcccgctgcggacaggcggaaatgacctatcccggcggctgtgagctgggagcccggcccattgatctgcaccttgcggcgctgcggagcatgggggcggccattcaggagaccggcggacggctggcctgccgccgggagcgccttaccggcacggaaatcgtgctgagcctccccagcgtgggagccacggagaacgccatgctggcggcctgcggcgcagaggggactaccgttatcgctaacgccgcccgtgagccggagatcgtggatttgcagacctttttgcagaaaatgggcgcccatgtgcagggggcgggcagctccaccgtggtggtggagggcggcgcgcccctccatggctgcgtacatacggtggtggcggaccgcatcgtggccgctacctatctggcggccgccgccggcaccggcggcgatatccggctggagggcgtggactaccgtcacctctccgccgttgccacgatgctgcgtcaggcgggatgccgcctcacctgcggcgagacctccatccgcctgcaggctccccggcggctgcaaagcgcaggccccatccgcacggctccgtatcccggctttcccacggacgcacaggcggtgctgatggcgtcgctgctgcgatcggagggagccaccgtctttgtggagaacatcttcgacagccgctaccgccatgtgccggagatggtgcggatgggagcggatatccgactggagggccgggtggccgtggtatgcggcgtagaccggctccacggagccgctgtccgggccaaggagctgcggggcggcgcatcgctggtgctggcgggccttcaggcggagggcgagaccgccgtcaccggcgtggagcacattcaacgaggatatgaagacctgacgggggagctggcgcagctgggtgccgacatccgtcaggaggaacgataaaaggagagcacttatggccagacgcagcagaagaaacagacggcgcagccggggaaggtttgccttcctctatcggttgctgtgcttcgtgctgatctgtgccgccatcgtgggagcgttggtgctgtttttcaaggtggataccatctctgtcagcggcaatgaccgctactcccgtgagacgattttggccgccagcggcgtctcggagggggataatctctttctgctgaataagtacgatgcggcggcgaagatcaccgaggctctgccctacgtagagtcggtgcggctgagccgcaagctgccggggactctgcgcatcgatatcgtggagtgcagcgacccggcgggcattcaacaggacggccattgctggcttatcagcccggagggcaagctggtggattcccccgccgaggccccaaacggctgccctatggtcgtgggcctgtccctgacagacccgcaggtggggagccttgcggcggtgccggaggagcagtccggggatcttgcccggctgctggagctgctgcgccagctgcgctccaagggcatgaccgcccagatcggagagatccgcttcgaggagagcggcatcgtcctgcggtatcaggaccggctggacgtgtatctggaccgggaggatgatttcgcctaccgcctgagatatctggcggcggtgctggagaagctggaggaaaacgagaccggcaccatccgctgggatgccgagggcagcgcccggtttattcccggataagggattttttcgggaaatcccgtcggaacacttgacgggacaggtaaaccgtaatacaataaacaaaatactgtatcttgggtatacggacagaaaacgtgtctttgacatacaaattacggcaggaggaagcgtcatggcttttgggtttgaaacaggaccggagaacgtggtaagtatcaaggtggtgggcgtcggcggcggcggcaataatgtggtcaaccgcatggtgcgctccggcgtaaagggcgtggatttcatcgccgtcaatacggataagcaggcgctgaatacctccagcgccggatataagctccagatcggtgagaagctcacccacggacagggcgcaggcgccaatccggaggtgggccagaaggccgccgaggagagccgcacccagctgtccaaggcgctggaggacaccgacatggtgttcatcaccgccggtatgggcggcggcaccggcaccggcgcagcccccgtggtggcggagatcgcacgggaacagggcgtcctgacggtgggcgtggtcaccaagcccttcggcttcgagggccagaagcggatgcgtgcggcggaggccggcattgagcagcttcgcggcaaggtggactctctggtcatcatccccaacgagcggctgaagtacgccaccgatcagaagatcaccttccgcaacgcctttgaaattgccgacgacgtgctgcgccaggcggtgcagagcatctccgacctgatccgggacaccggctttatcaatctggactttgccgacgtcaccgccgtcatgaaggatgccggccttgcccatatgggcgtgggccgtgccgccggcaagggcaaggccgaggaggccgcccgcatggccatctccagccccctgctggagacctccatcaacggcgccaagggcgtcctcatcaacgtcaccggctccatggacatcggtctggaggaggtggagcaggccgccacgctggtgcagcaggcggtacatcccgatgccctgaccatcttcggcgccaccttcgacgaggagctggacgacgagatccgtgtcaccgtcatcgccaccggcttcgagagcaatgaccagcaggaagcccctgctgcccccgccgctgccgatacgcagcagcccacgcaggatgatgccgctgcccccgccgccgccccccagcctctggacgagaccgagggcgagaaggcagaggagagcgatgtggatcgttccttcgacgagattttgaagatcttcagccgtggcgataagttctgatgttaaaaaggaccgcagaaagctctgcggtcctttttatgctttctcatggagagaactcccacaagctgattgcttcggattttggcaaggcaactaattcttaattgatatattgcatatattatacaaaatcattgcactatattgacaaatgatgaggggcttgatatattgaaattgtcagtagccatccatccgtggaatagagaggagatgacgatttgtctgagatttctaaaaaggatcgttttacggtgccggcggttatctgcctgatttgcaatgtgctgctgttcatccatctctgcggtgcaggggcttacgctggcggcaatcttcattatgaggcggccaacacgcagatggaacggaatgaggaatttttccatcagtttttcctgtcgaatcatctgatggggattgccgaaacccttgccatggtggctgcgctcattgccttgctgatggtcatccatgtttggtggaaaagtgccgtggagcgccggacaaagctgcgggatctttgcatttttaacggtatcatccttctgatttccgtctatgagctggtggctcacggcggactcaccgcctaccgggatgaaatgccgctgcactatttcggtgggcctccggccacgaccctgctgatttggctgccgtgtctggtactgactctcatccccatgatcgtttacttccgcacgaagcgaatcaccccggcggattaagaaataaaaaccagccccatcgtatccatacgatggggctggtttttgcagagtgcagcaagcaattttcgttacgtcggagcgccgccgctcatcagccccagctgataaaaggccacggcgctggcggcggccacattcagggagtccactccgtgggtcatggggatgcggaccgtgtagtcgcaggcggcgatggtaccgtcggacagaccgtccccttcggtccccagcaccaccgccagcttctccgccgccatgagccgtgggtcgttcagaagcagcgagtcctcccgcagggccatggccaccgtctggaagcccagccgccgcagccgctccggccacggagcctcctccggcagatacgtccatggaacgagaaacacattgcccatgctgacacgggaagcccgccggtacagggggtcgctcccggcggcggtaagcagcaccgcatccatccccagcgcggcggcgcagcggaagatagccccgatgttggtgggattcatgacattctccagcacggcgatgcgccgggcgttggcgcacacctcctccaccgtggggagggccgggcggcgcatggcgcacagcatcccacgggtcaggtggaagcccgtcagccgggtcagcacctccggcgcagcggtgtagacggggatgtcctccgggcagcgctccagcaggggcagggcctgagacgtcaggtgccgtggctccatgagaaaggacaccggcacgcagccgctctccagcgcccgcccgatgaccagcgggctttctgcgataaagagggcgtttgcggggtctgcccggttgaccagctggttttccgtcagacgggcgtagacgtccagctccggggtgtcgaaatcggtgatggagatgatgtgggccatggctgcctcctgcgttttttctctattgtagccgtcaaaggccgctgcgtcaacgggatattgactttccgccgtcaaaacggtatgatacaaggagaatttacgacataggggaaagtacgatggcagagaggatcaccgcacgaaagaggcaggccatggagatgcgccgtcggatccaggagacggcgctggatctgtttgaccgggagggctttgaaaacgtctccgtggaggagatcgcacaggccgccggctgctccgtgggcaatatctatcactacttcaaaagcaaagacgaactggccatccagctgacccagcatgtggacgaggcgtatcaggtgctggagcaggcgtatctggcggacaccgatcgctccggccgagagaagctgctggacttcgtgggccggtcgttggagatcagcgtgggggacgaggtgctgtacaaggccttcatccacgggctgcgctacccggagcagggcgtactgaagggcagcgagaagcgggtatactaccgcctgctgggtgagctggtggatctgtgccgccgggagggcagcatccggcaggagctgaccacggcggaggtggtggaggaactggtgacgctgcaccgagggatgctgtttgagtggcgcatctatgagggcggcttcccgctggcccagcggggccgccgcatggcggagcatctgctggaggggatgcggggatgaaggccctgaccatccgcaggcttcggccatcggacgccgaagcgctgtataggattctgtccgaccggcaggtgatgcgctatctggagccgccttatgaccgccttcaaacggagcagttcctccgggaggcggggcttgcggagccgccccttgtgtatggcacggaggagggcggccgtctgctgggctatgtcatctaccacgcctatgacccggacagcatggagctgggctgggtgctctccccggactgctgggggaagggctatgcctcccggctgacggaccggctggtggagctggcccaccgagcgggaaagacggcggtcatcgagtgcgtcccggagcagaccgccacccggcacatcgctgagaaaaagggctttgcctatgtgggccgcaccgatgggctggaggtataccgtctgccgcccaacgaatagtgatcccagagaggagccattcggctcctcttttctgcgtttccaccagcttccggcggagaattttgtgggctttgacgggttttggaaaattccccgccggacattgacaaaccggcggcagactgccataataaaatcattcattaagtaattcggtgaaagacatcaccgggagagggggaacggatgaaggtactggtcatcaatcccggcgctacctccaccaaggtagcggtgtttgaggaggaacgggagcttctgaaaaagagcatcatccacacggctcaggagctggagggcttcgaccgggtcatcgatcaggcggagctccgccagcgggcggtgctggaggcggtggcggagggcggcttccgcttggaggatttcgatgccgtgtgcggccgtggcggcctgtaccgccctattccctccggtacctatgccgtcagcgaccgggtgatgcaggatgtggagcaggccccctacggcgagcatccctccaatctgggggcgtatctggcccggcgcattggtgatctggtcggtatcccggcctttttcgtggacccggtgtgcgtggacgagatgacggaggtggcccatgtctccggctttgcggagttccggcggctgagccagttccacgccctgaaccagaagtccgtgggccgcaaggcggcccgccagctgggcaagtcctacgaggaggctcggctcatcgtctgccacttgggcggtggcgtgtccgtggcggcccatgaccatggccgtgtggtggacgtgttcaacgtcaaggatgagggggccatgggcatggaccgtggcggcggcctgccggtgaatcagctcatcgactactgttatgccgggcgcagccgggaggaggtcaagcggacgctgggccgccgctccgggatgctgtcctatgtgggtaccacggacttccgggagatctgcgccagggtggtgtccggagacgagcggttcacggcggcctaccgggcgctggtgtaccagctggccaaggacatcggcgccatggcggcggtgctgcatttcgaggtggatgccatcgtctacaccggtggcatggcctatgagcagtttttctgtgacgatatcaccgcctatgtggggcggctggcccccatcctgcggttccctggagaggaggagatgcgggcgctggcggagggcgccctgcgggtgctccacggtgaggcacaggcggaaacatattaaatacatcccggcatagtcatgttgataccaaccggaacagaaaggtggaaaaccatatgaagcatctcatgagcggcaacgaggccacggccagaggcgtgtacgaggcaggcatcaagatatgctccgcctatcccggcacccccagtacagagattttagagaacctgcccccctatcagaaggacgtctactgcgagtgggcgcccaacgagaaggtggcggtggaggtggcctacggggcctccattgccgggtcccgctccttctgcaccatgaaaatggtgggcctgaacgtggcggcggatcccctgttcaccgccggctatatgggcgtaggcggcggctttgtggtggtgacggcggacgatcccagctgtcactcctcccagaatgagcaggacaaccgccactatgcacgggcggccaagatcgccatggtggagcccagcgacccgcaggagtgcaaggacttcgtggctctggcctgccagctgtcggaggagttcgataccccggtgctgtaccgcaccaccacacgggtctgccactccaaggggctggtgcagtggggggagcgccgggagcatacggcgccgccctaccggcgcaacgtccgcaagttcgtctgcacccccgcccacgcctacgccaaccacccgctggtggaggagcggctgcggcggctggaggagtacggctgcacccgtgcgctggaaaacggtctgaacaagagggagctgggcgacggtaaggtgggcgtcatcacggcctccgtggcctatgaatacgccaaggaggtgttcccggaggggacgtccttcctgaagctgggcctgaccttccccctgcccatggatctgatccgggactttgcctcccgtgtggaaaagctctatgtcatcgaggagctggagccctttatggaggatcagatcaaggccgccggcatcccctgtgtgggtaaggagctgacgggccttctgtacgagctgaatacccagctgctgcgggagcgggtgctgggtgagaaagcagatttccgcaagaccgatgtgaccccggccagccgccctccggccctttgcccgggatgtccccaccgtggcttcttctataccctgtccaagaacaaaaactatgtcgtcaccggcgacatcggctgctatacgctgggcagcgccgccccgctgaactgcatggattccgtggtgtgcatgggcgcaggcttctccgccggcatgggtattgccaagagctttgagcgggagggcgtcaccgataagaccatcttcggcgtcatgggcgactccaccttcttccacagcggcatgaccggcgctgcggagatcatctacaacaacggccgcatgatcccctgcgtgctggataaccgcatcaccggcatgaccggccatcaggataaccccggcacgggctataccctgctgggggacgaggcccccatgctcagcgtggagaaaattttcacggccatgggctttgccccagtgctgacggtggacccgcaggacctgacggctatgaaggagacggtggaccgggccgtggcggcgctggagcggggcgagcatcccgccatcgtcacccggaggccctgcctgctcatcaagcgggataggttccaaaagggaatgtgccatgtggagccggataagtgccgcagctgccgcagctgcctgaaggtgggctgccccgccgtctccatggaggagggcaaggcggtcatcgaccgcacccagtgcgtgggctgcaccgtctgcgctcaggtctgccccttcggtgccatcgtaaaggaggaagtgtgatgtctggtgtgaaaagtgcgctgctggtgggcgtgggcggtcagggggccatcctgatctccaaaatcatggccaacggcttcatgcaggcgggcttcgacgtgaagcagagcgaggtacacggcatggcccagcgaggcggcagcgtctcgacgcaggtgcgctggggcgacaaggtgtacggccccgtgttcggcaagggcgaggcggacattctggtggcgctggagaagatggaggctgtgcgctatgccgagttcttaaagcccggcggtgtggcggtcatcaacgactacgccatcaagtccaccaccattgcctccggggcggagacctacccggagggctgcgtggaggccatggaaaaggtgttccgcaccattgccgtgccggccagcgacatggcgctggggctgggcaaccccaagtgcatgaacgtggtgctcttcggggctatgtgtgacagtctgggctgcccccagatcgactgggagcaggtggtagcggacaccgtgccggagaaggtgcgggagctgaacctccgggccttccgggcgggccgtcaggcggcgcagcagcgctgaacaaacggaccaaccactccgggcaggcggctctgaccgaagaaatcttaccggatccgcacgatgggatcggttgccgaatggtttttggcaaagagctttctgggcaaataagctttgcggcagcggaattttacgcgaaagattttttgaaagcagggcatcggcatttctgccgatgccctgctttttcatggcaccgtttttgggtacttcggttttgcagcacggcattttgccgatgccatttttatttctatggttttctgaccgacgccaacctttctgcttttttgatactctatttcacacatcgcagctttgacgatctcgttttgtgccatggcggttttcaaggcccgccggacatgggacgctttcaaaggtcgaggtggacgtccgatggacatttttccggacggatctgtacggctggacagagggtaaaacgtcctgtttggacacgccggacggggggagaaagtactcctgccgtagccaacgaaggcgatggggggttgacaaatttttcacaacactatataatatttattgcaacaaaaagccacataatatggcttgcaaaacgaaaataactaatattttatattacataacaggagagagctatggatatttttcagaaatgctatgagccgtctctggcgaaggaattgaaggcggcgggggtgtatccctatttccacgccctccagtcccggcaggatgtggaggtgatgatggagggtcggcgccgcatcatgctgggttccaacaactatctgggtctgaccacggccccggatgtggtggaggcgggcatccatgccctggagcagtacggaaccgggtgcagcggctcccggttcctcaacggcaccctccagatgcatctggagttggaggaggaattggggaagtttctgcgtaagcccggcatcgtcaccttcggcacggggttccagtccaacgtgggtatcatcagcgcactggtggggcggcacgactatgtgatctgcgaccgggagaaccacgcttccatctacgccgggtgccagatgagctacggcaagatgctgcgctaccgccacagcgatatggcggatctggagaagcagctgcagcgggtgccggagcagaacggcgccctcatcgtcaccgacggcgtattctccatgggcggcgacatcgccaagctgccggaaatttgtgcgctggccaagcagtacggcgcacgggtcatggtggacgatgcccacggactgggcgtgctgggtgagggcggtcgtggaaccgccagctacttcgggctggaggatcaggtggatgtgtacatgggtaccttctccaagtcgctggcatcgctgggcggctacatggcggcctcggaggaggtggcggagtatgtgcgccacgcctcccggccattcatcttctcggcgtccatcccgccggccaactgcgccacggcactggcggccctgcggcatctggagcagcacccggagctggtggaccggctgcggagcctgagcctgtacgcccggaagggcatgacggaccgggggttgaagatccgggagtcggccctgaacgcacctacgcctatcatccccatttacacctacgagacgtatcacacgctggaggtggccaaggagatctacgaccggggcgtgtacgtcaaccccaccctgcccccggccacgccggagggagaggccctgctgcggaccagctacatggccacccacacggaggccctgctggatgaggccatggacattatggcggaggtgctggtaaagcatgagtaaggtagcagttgtcaccggaggaacctccggtatcggaaagcagacggctctggcgctgaaggcggcgggctatacggtatatgagctgagccgccgggcgcagggcgtagagggtctgcaccatctggtggcggacatcacccgtgaggagctggtggacgccgccatcggggaggtgctgcggcaggagggccacatcgacgtggtggtgaacaacgccggcttcggcatcagcggcgccatcgagttcaccaagacggaggatgccaagcggctttttgacgcagatttcttcggcatggtcaacgtgaaccgggcggtgatcccccatatgcggcaggcaggcgccgggcgcatcgtgaacctcagttctgtggcggcggcggctcccatcccgtttcaggcctactactccgctgccaaggcggcggtgaacagctacaccatggcgctggccaacgagctgcggccctacggcgttacggtgtgcgccgtgcagccgggggatatccacacgggctttaccgccgcacgggaaaagaccatcgacggcgacgacgtgtacggcggccgcatcagccgctccgtggcccggatggagcacgacgagcagacgggcatggatccggccaaggcaggggccttcatcgctaaggtggccatgaagcagcgggtaaagcccatttacaccatccgctttgactatcagtttttggccctgctgacccgcattttgccctaccggttcctgaactggctcatcggcgtgatctacggaaagtaagcaggctttgtatttccctataaggaaacgccccatcggcatggccgacggggcgtttcagtgtgtcaaaaaagcctcgcagagtttgccgcccgcaggcggcaaagaatggaaatcattttctctcacgatagatgcgtgagagaaaatacttctcaggctgcaagtgtggaatttgtgcgcctatggcacacaaattatgcgcacagcagactgcaagccttttgtcggaaaaacccggaggttttttcgacagtctcaaacgccccatcggcatggccggtggggcgtttttgcccggagaaggggggctgtgtggtgcgctgatctcagggcggggggcagacctccgtccgaagagcctctacgtttggggcgggtcagcttttcagtgccagcgtcttttcataggcggcaatgacggcctccatggccgccgagcggaagccgccccgctccagcgcccggaccccggcgatggtggtgccgccgggggagcagacggcgtccttcatagtggcggtgtgctggtcggactggagagccagctgcgccgtacccagcaccatctgggcggcgtagcgccgggccttgtcacggggcaggccgcaggtgacggcgccgtcggccagcgcctccagaaacaagctgacgaaggcgccgccgcagccggccacggcgctgccggcgtcgatgaggtgctcctccagcggctccagccgtccggaggcggacatcagggtcagaaaggcggacagctgctcctccgtcacctccggggaggggacgtacagcgtcaggcccgctcccacggcgcaggcagtgttgggcatgatccgcagaatggggcaggagagccccgccatctccctcaagcgctggagagtcaggccggcggccatggacaccagcacgaagccctcctgccgccgggacaggatgggctgcagccgggccagcaggtccgccatcatctggggcttgacccccagaaagatgtagtcgcaggtctgggcgatggtttcattgtcggagacggtggcccccagctgctgggccagagcctgtgccttctccggggtgcggttggacagcagcagctccgccggggcgggggactgggcggcggcatgggccagtgcgccccccatattgccggtgccgataaagccgactttcataacatgatacctccttgcggaaattgcggggcctttgccccgtgattttttactatcttacaccaccagaccctccggcgcaagaaaaataaaaattgtcaatccggggaagggtatggtataatgaaccgacaaattttatggctcccacagggagcggaaaggagcttatcatggaattgaagggaagcaagaccgagcgcaatctgcgggaggcctttgccggggagactcaggctcgcagcaagtacgactatttcgcctccgtggccaagaaggagggctatgagcagatcgcagccattttccaggctaccgccaacaacgagaaggaacacgccaagatgtggttcaaggctctcagcggtatcggcaccacggcggagaatctggcttcagccgccgccggagagaactacgagtggacggatatgtatgaccgcatggcgcaggaggccgaggaggagggcttcaccgtgctggcggagaagttccggcaggtggggcgtattgagaaggcccacgaggagcgctatcgggcgctgctgaacaacgtggagatgcagcgggtctttgaaaagagcgaggagaccatgtgggagtgccgcaactgcggccatctggtcatcgggaagaaggccccggaggtctgtcccgtgtgcgcccatcctcagagctatttcgaggtgcggaaagagaattattgatccggaaagaccggcgtagatgcggcgggcaggaggacgatccccctgcccgcctgcgggtatagagaggagcgatgcttatgtacagtccggcagaggtggcacggcgctatgtggagacgggaaagagcaaggcggcgctgccggcggggaggatgctgctgctggggatgctggcgggagccttcatcgctctggcggggggatcggccacctttgcggtgagttacggcggaaggctggccggggcggcggtgttcccggcggggcttgctatggtgctgctggcggggagcgaactgtttaccggcaactgcctgctggtgatcccgctgctggagcggcagctgacgtgggggcggatgctccgcagctggggcgtcgtgtatctggccaacgtgctgggggccgggttagtggcggccctcaccgtggcggcaggcaccttcgacggggtatacgagtccgtggtggccacggcggcggccaaggcgggcctgccgttcctgacggcgctgctgcggggcgtgctgtgcaactttctggtgtgcatcgccgtgtggatgagcctctcggcccagtcggtgccggggaagctggcggccatgtatctgcccatcttcacctttgtgctgtgcgggtttgagcacagcgtggccaatatgttctatctgccggcggggatcctggcggcgggaaggtacggcgtggcggcggaggggctgagttgggcctctatgtggacgggaaatctgctgccggtgacgctggggaacattttgggcggctgtctggtgggcgtggtctactgggcggtatatctgcgaagggggcggcgagcatgagtattttggaggacatccgggccttcgttcccggctgcgagcaggagcagcgggaccgggaagctatgcttcgatttctggcggttcatgaggacgccttcctgcggacaaatctcacggcgcacatgactgcctcggcatgggtgctgagccgggaccggcggcgggtggtgatggtgtaccacaatctgtaccgctcgtggtcgtggaccggcggtcacgccgacggcggccgtgatctgctggcggtggccatgcgggaggtgacggaggagacggggctgcggcggctggcgccggtgacggaggggatcttttcgctggagtgcctgacggtggacggccatgagaagcggggggagtatgtccccagccacatccacatgaacgtgacgtacctgttggcggcggaggacgatgccctccgggaaaagcccgacgagaacagcggcgtggcgtggttcacgccggaggaggcgctggcggcctccacggagccgtggatggtgcagcgggtctaccggaagctggcagaccgtgcggcggcgtacatgaaaacctgagagaagcaccctccggcgatgccgggtgtatgtaagacagtattgcgccgagatcgacgaagcggcacgaaaccgcatgaagctgatcgtgcggtcactggcagagcaaaacggcgtgaccga

SEQ ID NO: 12344 - DNA, 306 bp, Unknown
  gut microbiota DNA sequence
cgttgacaaggggaggggagtgtggtaaagtaaacaagctgttcgccgggaggtgagcggcgggggaccgaagcgaaaaagtttgaaaagagccgaaaaaagttcttgacaaacgccctcgtgagtggtatcctaaataagctgtccgcaagggcggtaaccataaaggctttcgataaaaagtcaaaaaccttgaaaaaagttcttgacaatgtaaagcgtttgtggtaaagtaatgaatgttccgcagaagcgggcgtgtatcttgtaaattaaacaatgaacgaacaaaagcaccagacggga

SEQ ID NO: 12345 - DNA, 152309 bp, Unknown
  gut microbiota DNA sequence
acttcggcagattgtagttcttgccgacttccagtccgcattttctctttatctgagaaatataaaggttggaaacctttaacccggtatgctccaaaacatactccttgatctgcggataggttgctccatcttggaactcggacatatccatatcttccaaagagaactcaacccgaacctttttcgagtcgatctctcccttggaaagcaagacaaccgtctccacatggcgagtgcgggggaagaggtccacggccacggcacggcgggcgaggtagcccatctcggcaaagcgcttcacatcccggcccagcgtgccggggtcgcaggagacatacaccacccgccggggagccatggcggcgatggaggcgatgacctccggggccagtcccttccggggcgggtccacgcagatgacatccggccgcagctgccgcagggccaactccgccgccacgtcggcggcgtccccctccagaaactccacgttctccacgccgttgcgccgggcgctggcccgtgcatcccggatggcctccggcacgatctcgccgccgatgacatggcgggcctgccgggccagcacctgcgtgatggtgcctgcgccgcagtacagatccaccgccagctccgtaccggtgagaccggcgaactccagcgccttgccgtacagcacctccgcctgggggtggttcacctgataaaacgacggcaccgacagccggaccgtccgaccgcacagcacgtccgtcagggtgtcctctccccaaagagtgcggtagcgatcccccagaatggcgttgccggggcgggtattgacccccagcaccacgcccacggtctgtggtgccgcctgacgcagcagggccaccagttccgtctcgtaggggaggctttcgccgttcaccagcaggcacacaaggctctcgcccttacagttggttcgcacatacaggtgccgcaccagcccccggccggtggtctcgtcgtatcccggcacatgatactgcgccagatactgccgcagggccgccgccagtgcatccgcctgcggcttctggaggaggcagtgctccacctccaccacctgatggctgcgggcccgataaaagcccaccctgccgtcggcggacaccgggtactggctcttattgcggtagcgcaggggctgtgcggcgcccaagatttcctccacggtcacgtcgctgccgcccaatcgggtcagggcctcctgaacccgctggcgcttggcccacagctcctcggcgtagtccagatggcggaagtcgcagccgccgcagcggccatagtagggacagtccggctcctgccggtggggggaggtgctatggcgcaggaccggcttgccgaaggccacgtttttcagcaccttcatcaccagaatgtcgcagtcctcgccccggacggcgtcgtggacgaacaccacctgcccgtcgatgcgggccacgcccagcccctcgctggagtagccctcgatggtactgcggtatatatgatttttctccaatgcgggcatagcggccctcctttgatatggggattttcttcttatttccgacgggtgacttggcgactccttgcgagattgagtgcccatgggcattacggattcccacggccagcttgtgaaccggccgtgggaatcatgcattcagagaagataccgtggtgcaggggccatgcggctcagcagaggccatcggcagggcggtcaggtctcagcggtgaccatccggcagcaccggctggcccagacaccaagctccccgtctgcatggacactgcctcctatccggccaccggtgggccgttaaaactcaaacttctcgatcagcttacgcagcgactcggcaaaggcggccagtgtcttgttgtcccggcccttgctgcggcgaatgaggcccagcagggcatcgcccagctgcaccagccgctgataggccgccgtggtgcggggtgcgccctcgaaagcgggcttcttccgctccggcaggtagcctgcctccagctggcggcaggtcagcaggtcataggactccgtatactgcggtgcatgggcggcaaagcccagctgtgtcactgtttgggcaaacaccggcgccacctcccggtcgccgtggaccacgaaaacgtgctggggcttgggctccttgaactggctgatccaattcaccagatggtcgtggtcggcgtgggagctgaggccctggaaattcaccaccttggcccggacggctacctcctcaccgaacagcttcacactgggagcgccgtccagcagggtacggcccagcgtaccgggagactggaagcccacgaacacgatgctgctctccggccgccacaggttatacttcaggtggtgccggatgcggcctgcgtcgcacataccggaggcggacaggatcaccttgggggtgcggtccatattcagcagcttggactcctccaccgtctccgtcaagtgcaggccggggaagctgaacatatgggtgccgtcctgcaccagcgccagcgcctcctcgtccagatagccccgcaggtcgccgcagaagatggtggtggcccgcttggccagaggactgtccacatacaccgggaagtccttcacggacttcaccagattcttatccttgatctcccggataaagtacagcagctcctgggtgcggcccacggcgaaggcggggatcaccacgttgccgccccggcccagtgtctcgtcgatgatctgggccagctcgtcggtatagctccacacctccgtgtggttgcggttgccgtaggtactctccatcaccacatagtctgccccggtgaagaactgggggttccggatgatgggctgatccacgttgccgatatcgccggaaaagacgatggtcctcgtctcgccgccctcggtgagggtcaggcggatgctggcagagcccagcaggtggccggcatcgatgaacacggcgtctacaccgtcgcagatgtggatctgttggccgtactcgcaggtatccatgaattcccgcacccgcatggcatcctctaccgtgtacagcggctcctccatggggcggcccgcccgctggttcttgcggtttttatactcagcgtcgctctcctgaatgtgggcggagtcctgaagcatgatatccagcaggtccgccgtcaggcgagtggtgaggatacggccctgaaagccctgcttgatcagcagagggatacggccggaatgatcgatatgggcgtgagtcaccagcacatagtcgatctggcccggatggaagggcaggctggcgttatcgatctcgtcccggccctgctgcaggccgcagtcaatgaggatgtgcttgccgcccacctccagacaatggcagctgccggtgacacattgatctgctccgtaaaagctcagtttcatggcgttgttcctttcttgtcctttcttgcgggccgaagcccggttttgtgtttcctccgacgggtcgttctatcttgctctattttgtctgtgttttatccggttcacggcggcccatgaggttctgtcctaccgtccggatgccgtgtccggcggatcgtaggccctgccccgccgccttcatcagctcatccttcacgtcgatggccagccgcccgaatatctctgtcaggatctgcttctttctttcgtcggctccggcatactccttccacagggccgcccagccggagaacccgcccttacgcagatcctcgaaggtcttggcacggccacccatggagaggatgctgtacagggcgtcgcagaaggcttcccggtcctcctgagacacggagtccagccactcccgcagcacgtcgtcggacatctgccccagctgggagcgctggcccagatgcacaaaccggttccccatcacctgccacgacagtgcctcatgctgcatggcggcgtggctggtgctgtcaatgacgtcgtagtcctcggcgtgaaccagcagcacccccacgatggaggattccgggatataagtgtggagccgatcctccacccgccggtaggcgggggtatccagcaggtcggcgtggaagcccggcccgtcgttgttataggccgccagcaggcgcttgccctgaagcttctccggcagatggaccgccgcccacgccgccagattcccgcccttggagtggccaccgatgcggtagggacggtgcttgcaggcccggatcacctcctgagcgtactccgtggcacgggcctgtgccggcaccgtctccagatagctcatgttgaagttctccttccagcccaccagactggtatccgtcccccgataggcgatgaacacgctgccgtccggcagcaggaaggacacggcggcaaactgcatctgcttcgcctcatcattgcggctctcaaaggcgaacagccgggtatcccggaaccgctccgtctccgccgccgcccgcatcaccgggatatagtccagcgacgacaagcccagctgttcatccgccgctgtcagccgggcgcatacgtccccgatgagcatggcgtccttggggttcttgctccacaggcggtcgatcttccgaaggttgatgtaggcgatgatgcacagcaccagattgtccacctcattgaaggggtcctgctgcaacgtcagatctcctctccactggagatagtcgaaaaccgtatattcgttctttccggccatagcttccctcctgcccgtataatggtacaggataaagtataccacactcccactcccggcgcaagcagaaggatgacttgtctttttccggcagcgggagtataatgcgtcgtatcctgtttatttctgcgaggaagctatgtatcgtgatatgacccgtggcagcatcacacgggggctgctgctgtttgccctgcccatggcagcgggggcccgtgtggcgctggcctatgcgccggcggggccggtgggcgtcaacggcatctgggccgctatccctatcggctggtttctggcggacgccgtgggatacggctactacttcctccggcgcagagcgctgctccctggggagagagagacggctgattcgaggaatcaaaaagagcggtgcgtcacctatgaactgcaccccatttgctggacagtatggtatactgtccaacaaatggggtgtgtttatatgccaaagggaataccacagaatcaaattaaaactaaacggcctgaaccctgtgcagtacaggattcagaccgttcaggccgcttaattcttgtttttgtctaacttttgggggtcacttccgtgcgggtgcggctcttttattattttacttcttcagggcttctcactacacgtctttaagggccactttgagagaaacgcttttcttccgcttccccgtcgtgcttgtgcagctgcttttgcagcaccgggatcagcttggccatatcaatgggctttgccacatggtcgtccatgcctacctccagcgcccgttgacggtcctcggcaaaggcgttggccgtgatggcgatgatggggatattggcccgccacgggtccgtcagccgccggatcttctgggtggcctcgtagccgtccagcaccggcatctgcacatccatgaggatggcgtcatacatccccgccggagccttctccagcatttccagacagtgggcaccgttttccgcccgatccaccagcagaccctcctcgcccatgagctcagcggtgatctcggcgttaaggtcgttgtcctctgccagcaggatacgccgcccggcaaggccggtcttatccaaccgctctgcggcacgcttgggcacggcatcctcctgtcgggccagacggcaggggatgtagacggtgaaggtggagccctcccccagcttgctctggatatcgatgctgccgttcatcagatccaccagcttcttcacgatgcccatgcccaagccggagcccgccacgccgctgacggtgctggagcgctctctggcaaaggcttcaaaaatatgctgctgaaactcttcactcatgccaatgccgttgtccgccacggatagttcctgcacgcaccagccctctcggtcgctgggcagctggcggatggtacagcggatatgtccgccatcgccggtatatttgatggcgttgctcaccagattcaggatcacctccaaaatgcgggaggtatccatatacagatagggattgggcgtatgcttctccactgtcatggtctggtgcttacgctccagctctggctgcaccatgacgacacaggactcaaagatgctgccggcctccaccgccgtctcctccagcgtcaccttgccgctctcgatgcgggagagctccagcacgttgtcaatgatggagagcattttctcgccgctgacctgaatgttcttcaggtagccctgcagccgctctggctcctgccggtgcttctccgccagatcggcatagccgatgatggcgttcatgggggtgcggatatcgtgggacatattgaagaggaaggtactcttagcctgattagcggcatcggcggctaccacggcgtcctgcaaaagcacctgctgccgggcctccgccatccgctgccaccgcaggtacaggtagatgctcatgctcagcaacgctgccaccataccgctggccagagccacacttacggtggtctgactacttctcttcaaaaattgataggtggtgttcatggcgatctccacgcacagagcacccatgacctggccattttcatccttcaccgggtagcaggccgtgaaaatgggaccccacgtggtatccactacatcacgagaatacacgggctctccagacagcgccgtctggatatagggggccatctcctcctcgatgcgggtgccggggtaggcaaagtcctccgcccccagatccaaaccgtcgatgaggtagacaggctgcccgtcctcccccagcttggcggtgtagagataccgggtggagttcagggtccgcagctgattgagggtcttttgcagttccagatagcgaggcgaggtcatgtcgctccagatggcggggtcgtcaaaatcctcccgtgtgaactcgtcggacaccagccggtggatggcatcggcgcaggtggtatcacgggtcagcgccgcctccagcatattgcggctgaaattctgatacagcacataggtatacaccgagatcagcagcaggaccatcaggagcaggaggcccacggtggcccccagctgccggaatttcttcgtcataataccgccctcatagttccgcttgcttgcttgcttgcttgcttgcttgcttgcttgcttgcttgcttgcttgcttgcttgcttgcttggaaagtttagcttgcctctccatggcctgtcaacctccatcggcataccgctgcccctttgacaaaaagggagacttatgcagaaaaacagcataagtctccacccgaaatgacactcactgcacttttgcttatgataccacgtatccccatggagtgcaaggaaaaaatgtaatttcgccccatgtttctgcggtagctccggccataaaaaaggcggcttacgccgccttttttcgtcttttattcatagtcccacagcaggaacatgggcttgatggccactacctcgtcgtactcctcctgctctacctgcacggaggcgttcagggccttcagatcctttttcatgacgttcagggcctcctcaacgctctgggcacggccctcccgcagcacccggatcatccgctgcagcaccacagggtgggcgtaccgggccggcaccgggaagtcctccggcagcagggcagccacgtcggagatggagcgctcccactcctgggcgatggctttcttgttgttcttggcggtaggcagcacatgggcgccggaaaagaagaagatggccgccagaccgaacagggcgaagtacacgcccacattctcgccacggatcagggccataatgccgtacaccacggcggcgatgcccgctacgatgatggccagcgccacccagcgataggcgggattgctgcggtcattgacccgcttggccttagccgccgtggacagcttcgccgtctgctccgggtactcctccagcagctgctgggcctgctccagtgtctcccgggcggcctgcgcctgcggcgtcagctgcttgagatagcgcttggcctcccgctcggccttctcccgcagacggcgctccgcctccacgctgtggcgggggatatccgggcagacccgtgccatgtgggccagcagaaggtccacgtcctcctcgtgcttgaagttgcactgcttctggctgccgtcgtccagctccaccaccagataggggatggagccgaaggcccccttgccggtgaagccgcccttgctcatggccacccgcttaaagacacggcgcacggactccagtgccacatagtaccgccggtcgatgaagaagctgttgagatacagcgcttgctcccccacgccgcaggggccgtagcgcttgcaggacttcttgtctgccttcagcacctccggcggcagagtggtgttgcccagtttcacaggtgtaaacatcgtgtgtccctccaaagtgcgaaaagcagtgggagagcgtgccccccccactgctttgcatgaaaagttacttgcccagcgtctcatagtgaggctgcgtatggcgctttttgatggtatacaggaagatacccaagaacagcgctgccacagcgataccaacgggatacgccacagcggtattgtagatgatggtgccgtcagcggccttgtggttgataagctggcccaagcactcgttgcccagcaagaagtaggtggcggacacggcgctcatgaaggtagcggggacagccgtcagccagtagttcttcttgtcatagaacaggtacatggaggcggcccacagcacgatcatagccaaagtctggttggtccagctgaagtaacgccagatgatggtgtagtcgatggcacccagagcattacccacgcccaaaatagcgccgatacccagcacgggcacacacagcagcagacggttcttccacttcttctggtccagcttgaaccagtcggccagcaccagacgggcgctgcggaaggccgtatcgccagaggtgatggggcaggcgatcacgcccagcatggccagagccacgccgaccttacccatggtcttgacacacacatcgtagatggcggcagactgaccgttggccagaatctcggccagtccggtattcaggccaccggtgacctcatacagggcgcatccggcagcggcccacaccagcgcaatgataccctcggaaaccatggcgccgtagaacacgaagtgaccctgcttctcgctcttcatgcagcgagccatcagggggctctgggtggaatggaagccggagatagcaccgcaggccacggtgatgaacatgaaactccacacgggcgttcccttgggatgcatggaacggaagttggtccacagctcgggaatggtgtactcaggcttgacaaagataccgatgatcacgcccaccgccataacgatcaggcagataccaaacaggggataaatcttgccgatgatcttgtcgatggacaggaaggtggcgatgaagtaatagaccagcacgatgatcagccagaacagcgtggtggtgacgataccgttggagccgccgttcttgaacagggtgacgatcaggccggcagggccaacagcaaacaccgtacccaccataatcagcagcaccacgctgaacacacgcatgacgttcttcatgaagccgcccagatagatgccggagatctcggagatggaggcaccgttgttgcgctcgctcatcataccggagaaatagtcgtggacgccgccagcgaagatggtgccgaaggtgatccacaggaacacgatggggccccacagagcaccctgcaaagcgccgaagatgggaccgaggcccgcaatgttcagcagctggatcatgaacagcttccactggggcaggaccacatagtccacgccgtcgttgatctttacggcaggcgtttcacggtcgtcggggccgaaggtgttctccacgaccttgccgtacaggaagtagccgccgatcagcaaagcaagacagatcagaaaactaatcatattgtctcctccttacacaatgacacaaaaggttttcccggctgcagtccgggtgcggcacgggggaactcccgctccgcaggtacattttttcgcacaaatataacggccattactgacagaaaacgtttccgcctccgtcatacgacattatcatatctcttttgtgaaaaaagtcaacaatcagaatcgacaaaaacatcacaaaatttttttgcaattttcacagaaaattcacgttttgcttattaccggtaacgataccgaaaactcagaaatcactgttttccttgaaatatggtactttttggctaccttggtttcccctgacacgttatttcgtttcgttgaatgaaattatttaaattccgtcatatgctctgccgttcggaatagccgacgtctgttcgcagatttttcggggatatgccgggatgcagagggtcttccggatggtacaactcttgctcccatcaggggtcttttcgttgtgtgcttctgttcagcaaggctggaaatatgataacaatttgaaatatatgcatcgaattatacggtttgttttcgccgtacggcaactcatgcaaaggtattacgggttcccacggtcggtctgcggactgatcgtgggcatgacagtgctatatttatgttgatagccttcagcagcctatgatgcttttcgcttttattgtctcctgcgggtaacttcgatgggaacgtgtctccggcggcccgcttttcccagcagccggaaaagtgggctatcggagacaagggaaaaatcttctgaacaaaacagcctccccgcagcaaaagagggacacgcccgccagcgtgtccctcttttgtcccttccatcgagatcttctatccaatattccgcctatcagtgccgggacacacggtcccagttctccggatcctcgtacagcagctcaatgtcctccatatactccgaatccagtgggttgtccagcgccgcccgagcctcgtactgctccagcatccgccgggacttctccggcggctgaaccgtaccggcgcctgcgatgcagccgccagggcaggccatgccctccagcagatagccgtcgtatttgccggaccgggccacccgcagcatctggcggcaggcccgcaagcccgcagcgtacaccgtcttgacctcccgatccggattcttggtctggatcaccttctccacggccttagccacgccgccggaggcagcaaagcccacgccgggagccgacgccttatagtgagcctccgtatcagggatttgggagaagtcgatatccttggcggcgaacattccccgcagctcctcaaaggtcagcacgaagtccacctcgctgcggacgctgcggcggctggcctccagcttcttggcggcgcaggggccaataaaggcgatcttgcagtcggggtgcttccgcttctggagtcgggccgtcagcaccatgggggtcatggtcatggagatgtacggcgcaaagccggggaactccttcttggccatgacggaccatgccgggcagcaggaggttgccataaagggctgtctggcggggacgtgctccatgaactcctccgcctcctccacggcgcagaggtcggcgcccaccgccacctcctccagtccttcgaagcccagctgcttcatggcggtgaggatctggccgggggtgaccttttcaccgaactgaccccagaaggccggggcgatgatggcgatgaccttctcccccttcttgatggcgtggatcagctggaagatctggcccttgtccacaatggctccgaaggggcagttcaccagacactggccgcagttgacgcacttatcgtagtcgatgtccgcccggccgtactggtccttgccgatggcgttcatgccacaggcctcctgacagggccgcaggaacttgatgatggcctgataggagcaggcctccttgcagcggccgcacttgatgcatttggtctgatcgatgcgggcccggccatgctccagctcgatggcgcccttggggcaggactgatagcagtgcttggccaagcacccctgacaggcctgcgtcacctcgtagtgggtgtccgggcaggcgtgacaggcgtacttgatgatgttgatcagcggtggatcgtagtacttttcggagatggcgctagcctccacgccgtcggagatcatgttctcctccgtcacgtcccgcagcggcagacccatggccagccggatgcgctcaccaacgatggcccgctccagaaaaatggattcccgataggtccccacctcaccggggatgatctcatagggcagcttctccatgcgggagcagtagtccccaccctcataagccagctttgccacagcggcaaagacctgcttacgcagtgcctccacgttgcagtacaaatttctcatgtgttccctcgctaagttcccgttaagttccaaatgcaccatgctctgccggcaacccggcacttttcacgcatattatagcagatgtcctccactcttggcaatagaagcttctgttttattattaaaataataaataatcattacagcctgaatatcccctcttgacggccctgctgccagcgtggtaagctaatccataccatggatacagaaaaattctcccctatggaggtgccgctatggacattcgggaatatacctcccccaccctgccggtggctcaattcgtggagcggtatgtggataccgaccactatgacgccgggtgccgggggtgtgataactacgggcaggtgtgggtatgtcccccctatgatttctccgtctccggctactggagcggattccgggaggtgcgcctgcggggcgtgcagctccggttctccccggaagagcaggcccgcagctatcatccggaggagctggcggagcgactacggcagctgttctcccggacggcccggcagatgatcctccggctgcgggaggagtatccccggtcggatatcctcaccgtgggcgggtgccatctgtgcgagcactgcacccggccggaaggccggccctgccggtatccggagggcatcggctatacgctggagtctttgggctgcgacgtgtccactgcggcggagcaactgctgggctggccgcttctgtggagccggaagggatgcctgccggagtatatggcgctggtctgcggcgtgctgatacggtgagagacggtcttaccatgatcgccgccgagggtaaaaataaagtccggaaacaactggtttccggactttaattctataatacagaagaaactcaaaccaggaacttcgccaatcccagcaccagcggcatagtgatcatggacagcagcgtctgcaccgccaccagcgatggagccagagacacatccttgtcgaacttggcggcgaacatccccagcagcgccgccggaggcgtactggccgcaatgaccaccgccagcgtcacgccggagtccagccgcatcagcatacacacccccagtgccagcagcggcaaaatcaccagccgcagtgccgccgacacccagaagctggccccgtgcagcgcccggcggaaatccgcctgagacagctggtagccaatgaccaccatgggcaggggcgtattcatgtcggagagatatgtaatgggggatagaatgatctccggcagagtgatctgcagcaggtacagcaccatggcgatagccacgccgaccacgccggggttcagcagcagcgtgcgccatgagaacgccatcttgccgcccttcaccagctggatgcccagcgtccaagtcaggacggtgaacaccagcagataggccgagccgtagaacacacccagcgaacccaggatagccgtctgcagcggcactgccatgaagccgcagttggagaaaatggcggaaaaccggaagaagctctttcgcatgggatcccggtcccggatgaccagttcactgaccagaatattgatgccgtggatcaccagcgccgccagcagcgctacccaaaaattgtggaaggtctccgtctccagcggccgctggaacaccacgatgaggatacagggggacaccacatacatcagcagattggacatggacaccgcacccttgtgggtgatgaggtgcagcttccccagcacgaagcccgtgccgatcatgaggaacaggatcagcacctgtgtgcctaccgagagaaatgattcgatcataccggattccttcccgcccacagggggctgcgtacacacacagccgggacagacggcttgcgccgtctgtcccggtgggtcacgctgtgattttttctatctgtattttagtccttgttgtagctgtgcgccagcgccacataggtctcatagcgggcatccgcctccacctgagcctcggcaaagagcttggccgccgtctccggatacttgatcttcaggccggcatagcggacctcgccgttgaagaactcctccacaggcacagagggcttcttatagtccagagagaagggcttttcggtcttgttgggatcgtagcggtacaggggccacaggccgcagtccacagccttcttcatctcggcctgcacgttgttcatgccggccttgatgccgtggttgatgcagggggcgtaggcgatgacgatggagggacccttgtgtgccacagcctcggtgacggccttcatcagctgagcgggattggcgcccatggccacggaggccacatacacgttgggataggtcatcatcagacggcccagatccttcttggcagtctttttgccgccgtcagcgaacttggcggaggcacccacaggcgtggccttggaggactggccgccggtgttggagtacacctcggtatccaccacaaagacgttgatatcctcgccggaggccatgacgtgatccagtccaccgtagccgatgtcgtaggcccagccgtcgccgccgaaaagccataccaccttcttgcccagctgatccttgttcttcagcagcttctcggccagctcggcagcctcaccggtgagggaggcggactccagagccgccgtcagcttgcgggcatcggcatcgttggcatccagattgtcgaaggaggccagccatgcgtggatggcaccctccagctccgtgccggagaccagcggcagcagctgctgagccacctgcttgacgtaggcccggcgctgcttggtagccagcaccacacccagaccgttctcggcctgatcctcgaacagggtgccatagaaggcagggccacggccctccttgttcttggtatagggcagggacgggaatgcaccggcccaagccagagagcagcccacgccgttgacccagtaggtcttttcgccgtacagctgggtgatgagcttggcatagggggtctcgccgcagccggcgcaggcgccggagaactccaccagcggctggctgaactggctgcccttgagggtcttgcggtcgaacacaccgggcttgtccttcagggacagggcatagttccaattggtttcatcatacatagtatcatccacaggctgcatcgtcaaggccttatccttggcaaggcaggaagcagcgcagctgccacagccggtgcagtccagcgtgctgacctgcaggcggtactgcaagcccttggctcccttggcgggaacggtggtgaaggcggcgggagccgcagcggcctcctcctcgtccaccagataggcccggatggcggcatgggggcagacaaaggtacactggttgcactgcaggcacttgttgctgtcccactggggcaggaaggcagcaatgccacgcttgtcgtacttggaggtacccagcggataggtgccgtcctgatagggcaggaaggcggatacaggcagatcgtcgccacgctgacggttgcaggggaccacgatgttcttcaccacatccggcaggctctcgtccacggtgcggtcgtcggcggcattcgcccagtcagcgggaacgttgaccttcacagggctgttgataccggcgtccacggcggccatgttcatgttgaccaccttttcgcccttcttggcgtaggtcttttgcacagcctccttcatatggcgcacggcgtcctccaccggcatcacaccggagagcttgaagaaggcggcctgcaggatcatgttggcgtggttgcccaagcccagctcacgggccagacggttggcgtccacgatgtaaaattgcacgttgtggcgggcgatgtactgcttgacgtcgccgggcagcttctccgccagttcctcctcggtccaagaggtgttcagcaggaaggtgccgccgtccttgatctcgtggatcatgtcgtagcgagtgatgtaggactgggagtggcaggccagaaaatccgccgccttgatgagataggtggagcggatggggctcttactgaaccgcaggtggctcttggtgatgccgtaggacttcttggagtcgtactcgaagtaggcctgcgtatacataccggcgtagtcgccgatgatcttggcggagttcttattggcacccaccgtaccgtcggagcccagaccccagaacttgcaggacacggtgtcggcggactcggtgatgagaggctcatggacatccagagacagatgggtcacgtcgtcgttgacaccgatggtgaacaggtgcttgccgccttcatccttcatgttgtcgaacacggccttcagctgggcgggtgtcacgtccttggaggccagaccatagcggccgccgtagatctccggagcatcggcacggttggcaaaggcggcgcacacatccagatacacagcaccggcaatggcacccggctccttggagcggtccatggcggcgatcttcttcaccgtcttgggcagggcgttcaggaaatactccatgtcgaaggggcggaacagatggatctgcatcaggcccaccttctcgcccttggcacacagatagtccaccacctcacgggcgcactcgcaggcggagcccatcatcaccatgacacggtcggcatcctcggcaccatagtagttgaagatgtggtagtcccggccggtgatctcgttgatgccctgcatatacccctccaccacagcggggatgctgtcataggcgccgttgttggcctcctgagactggtagtagacgtcggggccctgcacggtggtacgcatcaccggatgctccgggttcatggcgatggcatgatagtcctccagcgcctgacggtccagcagcttctccaccttgtccagatcgatgacctcgatcttctggatctcgtggctggtgcggaagccgtcgtggaagtggatgaagggtacacgggtcttgatagtggtcaggtgggccacggcggccagatccatgacctcctgcacgctgccggtggacatcatggtgacgccggtggtacggcagctcatgacatcctgatggtcaccgaagatgttgttggcgtgctgggccacggaacgggccgccacgtggaacacggcgggcatccggtgaccggccatgatgtacaggttggggatcatcagcagcagaccctgcgaggaggtgaaggtggtggccagcgcaccggcctccgccacgccgtggagggcgccggcagcgcccgcctcggactgcatctccaccagccgcacaggctggccgaacatattcttcttaccggcggcagaccactcatccaccttctcgctcatgggagaggagggggtgatggggtagataccggctacatcggtgaaatggtaggcaacggtggcacaggcctcgttaccgtccatggttttcatgattttcttatcggacattacattgcctcctaacgtatccgtcgcccggcagcaaccggtgcggcatttttctatctgtcggatgctgagttacgccttgatgatagcgccctcgtcggcagaggcagccaccttggcatacagccgcagatagccgttggggatgttcttcttgggcagcttcagcgtcttgtagcgctcagcgatctcctcgtcggagacgtgcagctccagaacgccctcatccacgtcgatgaggatctcgtcgccgtcgtgaacgatggccagaggaccgccctcggcagcctccggagagatatgtcccacgaagcagccgttgttggtgccggagaaccgaccgtcggtgatcagggcagcggacttgctcaggcccacgccgtacatatacttcatggccttgaacatctcacgcataccggggccgcccttggggccctcgtagcggatgaccaccacgtcgccggcctggatcttgccgcccaggatggcctcctcggcctcctcctcgctgttgtagcacttggccttacccacaaagcggtgcatggagggatcgatggcaccgggcttggacacggcggtacgggggcagaggttgccatgcagcacggccacgccgccggtcttggagaagggctcctccaccgtcttgatgatggtgggatcctccgggtactcgtagacgtagccggccagattctcggccagcgtcttgccgctgacggtcatgacggaggtatccagcaggccgcccagatgctgcatgacacgggggataccgccggcccggtagaaggcctccatctccggcttggcagcgggattgaccttggcgatctggggcgtggtcttggtgagggcctcgaactcctccagcacgttcatatccagctccgcctcgttggcaatggcgggcagatgcagcacggcgttggtggagccgcagatggccatggtcaccttgatggcgttgcggatggcctccttggtgaggatctggcgggcggtgatgcccttcttgcacagctccacaatggcacggccggactcgaaggagtggcgcagacggccggcgtaagcagcggggatcagagcgccgccgggcagggtcatgcccagtgcctcggacacgcagcacatggtgttggcggtgccaaggaaggaacaggagccgcagccgggacaggcggtgttctccagagagctgtactcgcactcggtgatcttaccggccttcagcatacccagggcctcggagatggaggtcaggtcggacttacggccgtcgaactcgatgccgcccagcatgggaccgcccacgcagacaatgcaggggatatccagacgagccgccgccatcagcatggcaggcacgatcttatcgcaggaggccagcagcaccagaccgtccagccggtgggcctgtgccatgatctccacggagtcgcagatgatctcacgggagggcagaatgtagtgcataccctcatggccctgtgccacgccatcgcaggcagcgatggtgccgaactccacagcggtgccgccggcggcatagatgccgtttttcacatactcagccaccttgtccagattgtagtggccgggaaccagcgtgttccaggtgttggcaatgccgatcaggggcttgccctccttcagttcgctgtccgtgtagcccatggacttgaacagggagcgggcaaatgcgctgtcctccatgccaaggatcgccttactacggttttccattgtgtttcctccttcaaatatgacatatctctttttcttatgttactggccgcaggctgcggcttggtttggcgattattctataataccgtttaccgttctgaaaatattataaaatccatggtgccttttgtcaataggatatcttctgcttttctaaaaaacttgactgttttccggtattagttgactttatctgtgagaaggtctataatggtctggattagattggttcgcaatgttctatgatacagaacgaacaaggaaggaaaagatatggcaaccacaaaaaccatccagtcggtggagcgggccttctccattctggaataccttcaacagtgcggcggcggagagcgcagcgtcaaggagatcgctgatgcactggagctgaacaagagtaccgccttcggtctcatcaacaccctgaccacgctgggctacctgcagcagaacgcagataaccagaagtatgtgctgagcctgaagctgctgagcttctccaacaccatcaaggtccagaacagcatcatccgcaccgtccacccctatctggagcagatcagcctgaaatacggtgagatcgcccactgcggcgtggctcaaggggacagcgtcatctatgtggacaaggtggagtccagccggtcgctgtctatcaacacccagatcggcaccaaaaactacctccactgcaccggcgtgggcaagtgtattctggcctatatgccggaggatgagcagcagcacatcctcgccggacccctgaaggctctgaccttcaacaccatcgtggacccccgtcagcttcaggcggagctgcggcacatccgggccgacggctacgccatggacaacgaggaggtggaggtgggtctgtcctgcgtggcagtgccggtgttctccgcaccggggcaagtctcctgctccatcagcatctccggcatgaccccccgtgtccgcaccgccctgcggggtggactgctggatgatctgaggcaggcctccgccgacatctcccgcagtctttacggctatcagcccgccggtgacctcctgtaacgggtcctgcgatccaactgtataccgatcgtctcacaaagcggaggggaaacatggtttccccctccgctttcttttgcctcagtgccgcacagcagacggcaaatctcacacggaaggatccattcactccttccgcaattttttaatagcacgtcacgccgccgtcgatgggcaggttcacgccgttgaggaaggacgcctcgtcgctggccagatacagcaccgcattggccacatcctccacggaggtcaggcggcccagcgggatctcgttgagccgggcctgcttcttcaccgggtccgccatcagagccgccacaaagggcgtgtccacggtggcgggatggatggagttgcagcggatgttgtccttgccataccgggctgccacagacttggtcagcagggtgatagcgcccttggtggccgtgtaggcctccggagtgttcatgtggccgatgaggccgcagatggaggaggtgttgatgatggcgccgcccccctgcttccgcatcaccggcagaacatacttggtggccagaaagacgctggcggtattgacctccatcatcttcatccactcgtccttcaccatttcctcgatgggcttgcggatgttgatgccggcgttgttcaccaccacatccagccgtccgctctcggagacgatgcgctctacgatggtcttccactcctcctcgctggtgacatccgccacggcgccgtgggccttgccgccctgacgcttcggctcctccaccagctggtcgatcttctcctgcaccagatccaggatccagacctcggccccattctgggccagcagcttcgcctgtgccgagccgatgccgcctgcaccgccggtgataacgatgaccttattctgtacgttcgtgttaaatccctccctttcatgcgttacgctctggcttccttatccttccacgccttggcggggttctgcacgcccatcttgccgccgctgatctccagcgtggtgccggtgatatagcgggcatagtccgatgccagaaacgccagcgcccacgccacatccatgggctctccgaaggtctgcatggcgatggcgctcttcatggcctcgccgttgctgacggtaagtgcgtgggtcatgtccgtatcgatgacgccggggatatacccgttgactcggatgccgtagggggccagctccgctgccagcgtgttcaccatggactttacggcggacttggtggcggcatacacaccgctgcccacagaggggaacaccgccgcaaaggaggaggccagcagcatgacgccgcccttatccttcatggcctcatacgcaatgcgtgcgcccagatacaccgacttcatgttggtgtccaccgtcttgtcccagacgttctccggggtgtcgatgatgctgtactggggatagacaccggcgttgctgacccagatgtccagcccgcccagcgcttcctcggcgtggcgggcaaagcccttcagggactctccgtcggacacgtcgcaggtctcgccgaaggcggtgatgccctgcgccttcagctcctccagcgcagcagccagcttcgcaggattggtaccgcagatggccaccttggcccccaactggccgaacagctgggcgcaggccaagccgatgccggcggtaccgccggtgacgacggccaccttgttgtcaaaacggatgttcatactcatgacaggattctcctttctgtggttccggttccccggaaaaaagcggccggggacgccccggtgaacggagcgtccccggctgggaatgcacgtttgattcagttacgcagagatcagccaaagacgcctacggcgttaaggatgaccacggcgatcaggcagatcacggaagccacggcgcagggtaccgtgacgtacttcacggactgcttggtattcaggtggaagaactgacccatgacccagaagccggagttgttgtagtggttgcccatcagggtaccactgccgatggccagcacggcggccagagaagacaggcccaggtcgggcatcatgggcagcacgatggcggctgcggtcataccggcggtggtcatggaacccacggaggtcatcataatagcggcaatggcccaaggcaccagaatggcggggatggggctgtcagcgatgagcttggacaggggctccagagcgggggaattcttcagcacgttaccgaaggcgccgcccatagcggtgatcagcagaggagacaggcaaaccaccaagccacgggccacccacttgttgagcatgacctcgcccagctttgccttgggctcattgtaggtgtcggcgtacacgcccagcaccatcttgcgctgcttgtagcccagatagaaggagtacagcaggccgatggacagagcgataaccttgttgccgatggtggtgcagatggtgtagatagcgctgccctcggcggcatacatctgagcgaaggaggacacggagatcagcagcacaggcagcagcaggggcagaaagccctcaccggtgtggggcaggccgggatccttgatgaggatgtcatccacgctgtcggaaccggtctcctccatgccacgaacgaactcaggattgggctcgatccactccttctccgtccacttccgcagcaggaagtaggtgccgaagaagcccacgaagctgatgaccagaccccagacgatggtcatacccagatcgctgccgaacatcagcgcaatggccaggatgccgggggtgggaggcaccagaccgtgggtcaggaacaggcccagaccggtgaaggaagccatggtggacatggagatgtgcttacgcttggagagcatagaggcaatgggggccgtcagcaccatggtgatatccccgaaaacggggatagacatgatgaaggccgtcagggccggagccagctccatgcgcttaccacggaacagcttgataaagaagtttgcaatgaccttggcggcgccagtatcctcgatggccatggaaatgatggcgccaaggatgatggtgatgcccacgctgcccagcgtgccgccaaaaccgttgctgatgtaatccacggaaccggtgacgccgtaacccagggcgataccggtacccagcgcagcaataaacagcgccagcacaggatgcatctttgctttgacgatcatcagcaccaaggctgcgatcgccactactagaatcagaatgaatactccagcagacatagtgttttctccttttcagattttctctctgacttgcagcggactctcggtgctctgcccgcttactcatgcgacaccttctcccttgcgccgcatcggtaagcggatatttccgctcgccgttctacaatgtcgatgcccgtattttattcccaaatgggtcatttgtcaatatcctctgccgtattttgtcgttatttacatatttcttttcttgttttgtacatttcagagaaagttcctgtgggcatactattttgcatacaaaagcggtgtcattgctctcatccttttttgtttctcgttctattatgcagaatgaaaaacgcatcttatgctaaacatcacacaccgaactctgccctccgcactttatgcttcccccccaaccggcccgcccttttctcactgccctaaaagaatacactcctctccttcacgctccatagaatctcgcccctattagaacgccttgctgcactttcttctaccccgctctcccccacgtcgcattgctcagttcttcgctttgtaagaagatgccgcctccgattggaatgtatctccctaaacggcataaaaataaggcgcaagcggtttccgcttgcgccttatctcatactatttcacccttggctgcaccgatggtgtgccgttggggtcacagttcttcgttcaattagtcctggttgatggcgatgacaacaccggaaccgacggtacggccgccctcacggatagcgaaacgcagaccggtctcgatagcgatgggggtgatcagctccacgttcatgtcgacgttatcgccgggcatacacatctcagtgccctcgggcagggagatgatgccggtcacgtcggtggtacggaagtagaactggggacgatagttgttgaagaagggggtgtgacggccaccctcgtccttggtcagaacgtacacctgaccaacgaacttggtgtggggatgaatggaaccgggcttggacagaacctgaccacgctcgatctcggtcttagccacgccacgcagcagagcgccgatgttgtcgccagcctcagcgtagtccagcagcttgtggaacatctcgataccggtaacggtggtctcacgcttctcgtcggacagaccaacgatctcgaccttctcgttcaggttcagcacgccacgctccacacgaccggtagcaacggtaccacggccggagatggtgaacacgtcctcgacgggcatcaggaagggcatatcctccttgcggtcgggggtggggatccaagtgtcaacagcgtccatcagctccttgatgcaggcatactcaggagcgttgggatcggtggactcggagatcagggcgttcagagcggaaccacggatgatgggggtgtcatcgccggggaagccgtagaagtccagcagctcacggacctccatctccaccagctccagcagctcctcgtcgtccacctggtcgcacttgttcaggaacaccagcacagagggcacgttcacctgacgggccagcagcagatgctcacgagtctgagccatggggccgtcagtggcagcgatgaccaggatagcgccgtccatctgggcagcaccggtgatcatgttcttgatatagtcggcgtgacccgggcagtccacgtgagcatagtgacggttggccgtctcatactcgacgtgggcagtgttgatggtgataccacgctcacgctcctcgggagccttatcgatggaagagtagtcggtgtactcagcaccgccctgcagcgccaggtacttggtgatggcagcggtcagagtggtcttaccatggtcgatgtgaccgatggtgccgatgttaacatggggcttgtttctctcaaatttctgcttggccatttgaaatgatcctccttaacagttttgcaaattcttaaagtgcaatgttttgctcgacattgctattttacagtatctgcggcagaaaagcaacctaaaatttaggatttacgcctcatggccgctgcgcttgctgaccagcttctcctgcagactcttgggcagctccacatagtggctgggttccatggtgtactgaccacggccctgggtgcgggagcgcaggttggtagcatagccgaacatctcggacagggggacaaaggcatcgatctgctgggcgccggagcgcatctcgtagccctgaatctggccacggcgggcattcagatcaccgatgacgtcgcccatatactcgtcgggtacgataacgcacaccttcatgatgggctccagcaggacgggatccgcctcacgcatagcctctttgaaggccatggagccggcgatcttaaaggccatttcggaggagtccacctcgtggtaagaaccatcgtacagcgtgaccttcacatccaccacgggatagccggccagcacgcccgcctgcatggcgccctgaataccggcgtcgatggcggggatatactccttgggaatggcgccgcccacgacggcattgacaaactcgtagcccttgccggactcgttgggctccagcgtgatcttcacgtgaccgtactgaccggagccaccgctctggcgcttgtacttggtctcgtggttgaccttcttgcggacggtctccttgtaagccacctgaggagcgcccacattggcctctaccttgaactcacgcagcagacggtccacgatgatctccagatgcagctcacccataccggcgatgatggtctgacccgtctcctcgtcggtgtaggcccggaaggtgggatcctcctcggccagcttggccagagcgatgcccatcttctcctgaccggccttggtcttgggctcgatggccacacggatcacgggctcggggaattccatggactccagaatgatggggttcttctcatcgcacagggtatcacccgtggtggtgttcttcaggcccaccatggcggcgatgtcgccagcatagacggtctccagatcctcacggtgattggcgtgcatctgcagcagacgacccacacgctcacgcttgttcttggtggcattgagcaccgcagaaccggtgttcagcgtaccggagtacacacggaagaagctcagacggcccacataggggtcggtcatgatcttgaaggccagagcagcgaagggctcgtcgtcggaagcgtgacggtcctcctcctcctcggtcttggggttgacacccttgatggcctcgatatcggtgggggcgggcatatagtccaccacggcatccagcagcttctggacgcccttgttgcggtaggaagaaccgcaggtgacaggcaccatttccacagccagcgtggccttacggatggcggcacggatcttggaagcagggatctcctgaccctccagatacatctccatgatctcatcatcgaacatggaaacggcgtccagcagcttctcacgatactcgttggccaagtccaccatgtcctcagggatgggctccacacgcatatccttgcccagctgatcgtagtagatatcagcatccatctccaccagatcgatgatacccttgaaggtatcctccttcccgatgggcagctggatgggtacggcgttgcacttcagacgatcatggatcatgtccagcacgtgatagaaatcagcgccggtgatgtccatcttattgacgtacaccatccggggaacatgatagtggtcggcctgacgccacaccgtctcggactgaggctccacaccgcccttggcacacatcacggtgacagagccgtccagcacacgcagagaacgctccacttccacagtgaagtccacgtgaccgggggtgtcgatgatgttgatacgggtctgaggaaactggttcttggaacccttccagtagcaggtggtagcggcggaggtgatggtgataccacgctcctgctcctgctccatccagtccatggtagccgtaccctcgtgcgtttcaccgatcttatagttgacgccggtgtagtacagaatacgctcagtcgtggtggtctttcctgcatcaatgtgggccatgatgccgatatttcttgtattttccagtgtaacctttctcggcataccgttctcctttttctctctttgcggggattaccaacggaagtgggcgaatgccttgttggattcggccatcttgtgggtatcctcacgcttcttcacggcgctgccggtgttgttggcagcatccatgatctcgcttgccaggcgctccgccatggtgcgctcgctgcgagcacgggagtaagcggtcagccagcgcagacccagggtctgacgacgggcaggacgcacctccatggggacctgataggtggcaccgccgacacggcgggccttgacttccaggctgggcatgatattctccatagcctgggtgaacacttccagaggctccttctcggtcttttccttgatgatatcaaaggcaccgtagacaaccttctgggcaacgccctttttaccgtccaacatgatgctgttgacgagcttcgtcaccagcacggagttgtacataggatcgggcaagatctctctcttgggaacattacctcttctgggcactatgcttccctccttcataaaaatatgatttcataggtactcaacagcccggcggctgttgttcggcctgccaaagaggtagttatataaaaaccttttcggcaaagctcatttcatgcgggaattacttgctcttgggccgcttggcaccgtacttggaacggccctgcatacgaccgttgacgccctgggtatccagcgtaccacggatgatgtggtaacggacgccgggcagatccttgacacggccgccacggatcatgaccacagagtgctcctgcagagagtgaccaacaccgggaatgtaggcggtgacctcatagccgttggtcagacggacacgggcgatcttacgcagtgcggagttaggcttcttgggggtcgcagttctcacggcggtgcagacgccacgcttctgaggggaggacaggttggtctccttgttcttcagcgtattcaggcccttctgcatagcgggggaattggacttgtaggtagcctgtttccggccctgcttgaccagctgattaaaagtaggcatgcaatgaactcctttctaaagatttgttgggatgactccctttattttccacggaataagaaattttattccggaaaaaccgttttagcggctggggacggcggctgcggcggtccccacggcgatgccggcggcccggcccagctgtgacatggtaaactccgtcacggcaggcactcccactgcacggcaggccgccagcagcggctccaccagtgccgggtcggcatcctttgccagaaagacccgtccggcatgaccggcagccaacaggcggcgtgtctgcttcaggcccaccacccggttttcgcaagacaattcttccagcatggagagcctcctcgttgaaatatcgccctgcatggcaaaattcgcaggctccaaacccacgcaattcaggattatagcataaacccgtcccagcgtcaagtagatttccggcaaaaatttgtgcgtttggctgaatttctgccgtgtttttctgggaaatacacaaagcccgccggagcggattttcccctgtactttcccgcctcgacgtggtatcctaatatatattaagaatcgccggatatcatccgagcctatgaaaacaggagggatcgccatgatcctcattcagaacgcccacgtcatgcccatcgtcgggccggagctgcccaacggctgcctgctggcggaggatggccgcatcaccgccgttgccccccacatcgacgccccggagggctgcaccgtcatcgacgcagacggccgtctgctgacccccggctgcgtggaggcccactgtcacatcggtctggacaatgagtgtctgcgctgggagggcatggactacaatgagatcgtggaccccctgacgccgcagctgcgggccatcgactctatcaatcctcaggacggtgccttccccaacgccctgcggggcggtgtcaccaccgcctgcaccggccccggcagcgccaacgtggtgggcggcaccttcacggtgctgaagctggccggtaaacgggtagacaatatgctgctgaaggagcccgccgccatgaaatgcgccttcggcgaaaaccccaagggctgctacggacagggtctgaagaagagtcccatgacccggatggcggtggcagcactgctgcgggagctgctgttcaagacccgccgttaccgggatgataagctggccgggaagaacccccccttcgacatgaagctggaagccatgctgccggtcatcaacggcgagatccccctgaagtgccacgcccaccgggccgacgacatcctcaccgccgtccgtatcgccaaggagttcggcgttaaggccacgctggaccactgtaccgacggtgagcttatctccgacgagctggccaaggagggcctgccggtgttcgtaggccccacgctgggcagcaaaagcaaggccgagctgcgccacaagagcttcaccacccccggcgccctgtaccacgccgggctcaccgtcagcatcatcaccgacgccccggtgatcccgctggagaagctgcccatgtgcgccggtctcgccgcaaacgcaggtctccccatggaggaggcgtggcgggccatcaccatcaaccccgcccgcagtcttggcatcgacagccgtgtgggcagtctggaacccggcaaggacgctgatctggtgctgtggacggcagaccccctgaccaccatcggggccgaggcctactgcaccatcgtggacggcaaggtggtctatcagtcggagtaaactaaaaacgtcaatatcttatcgaaaaccatcaagataatgcagaagaaccgcactgtgaagtatcacagtgcggttcttgttcttcttcggatgctcgttcagcgcagccacagccagcccgccagcgccaactgcaccaccagaatgacggggatgccatagcggaagtaccagtgccgggtcttgtgatgaaagcaccacatccccagcagcgcccccacgccgccgcccacgatggccagcagaaacaatgtcttttccggcacacgccagcacccctgtctggcccgcagcttatcggctccgtacacggcaaaggcagccacattgacggtcagcagatagacgcccagccagtccggcaggaccgccagcagctcctgcatcagcccttcagagcagccagagcgcaggcggtcttggcgcccagaacggcgttattgtacaccagctggatattgctctccaggctgtcaccgccggtgagatccttcaccttggccagcaggaagggtgtggtctccttaccgtggataccctgcgccttggcctcggccagcgcctgctcgatggccttgtcgatgaccttgtgatccatggagtacttctccgggatggggttggtgaccagcataccgttcttcatgcccaactcacgctcggcgtggaaggcagcggccagttcctccggggtatccagctcgtagtccacgccgaagccggacttgcgggtgtagaaggcgggcagttcgttggtgccgtagccgatgacaggcacgcccttggtctccagatactccagcgtcagacccaggtccagaatggacttggcaccggcgcacaccaccatcacaggggtctggcccagctcctccagatcagcggagatgtccatggtggtctcggcgccacggtgtacgccgccgattccgccggtggcaaagacctggatcccagccatgtgggcgatcatcatggtggtggtcacggtgcaggcgccgtcgcttcccttggccaccagcaccggcagatcacggcggctggccttaggcacagcgtgaccggcacggcccagatagtcgatctcctcggcagtcagaccggccttcagacggcccttgatgatggcgatggtggcaggcacagcgccgttttcacggatgagcttctccacattcatagcggtttccacattctggggatagggcataccgtgggagatgatggtgctctccagcgccaccacgggcttgccctgctccagagcctctttgacctcagtggaaatgtccagataacgattcagcatgattcagttcctcctgttgataaattcggtttgtttcgattgaaaatatatgtagttagtaaggaatgacttacagggccatacgccgcagcagctccgtctcgctcatggcgggatggatggtctcggtgctctccatggtcagagaggaggccgccagacccgcacgggccgacctctccagatcgctgccctgcaggtaggcccacgtcagagcggccataaaggaatcgccgcagccggtggtgctgaccatctccgccttgggggcgggcagggtcacactgccgctctgatcggcagcatagacgccgtcggctcccagtgagatgaacacccgatgcagtcccgtctccagcagggtctgcgccgcacggtggaggctgtcggtgtcggtgataggcacgccggacagcagctccgcctccagccggtttggcttcagggtatggagctttcccagcaccggccgcagcttctcggcctttaccgtggacacggggtcggcaaaaatgggagcgtggcagttatccgccagccatgcgatgctctccgccgggaggttggtgtcgatgaccaccacctgactgccctccagcagctgcttgcgccccgccagcacacggggcgtcagattccgatagatgtccatatccgacaccgccagctgcatatccccctgctggtcgttgatgaaaagataggtggaggtgtgaccgccggggatcaccggggactgggagatatcgatgcccagctcgccgcacaccgccgccagcttctgggcgtacacatcgtcgccgaaggctgtcagcagccgcacatccagccccatcaggctcatgttgtgggcgatgttccggcctacgccgccggggctcatccgcacccggccggggttggaatcctgtgccaccagttcctcactgggccagccgccgatgtccatgttcataccgcccaccaccgtgacgtaggggctgcgggtcacgatgtagccctttccggcgatgcagccctttttcatcaggttggaaatatgcaccgccacgctggaccgtgtgatgcccgcccgctccgccagctcctgctgggagatcatgggatccgcttcgatccagttgagtatctgccgttcccgttgggtcatgccgcacctccataagcaaaactttgctttctaagcatatgcttattataccatgtgttcccgccgtgtcaagtccttttccataggcggaaaaactttttttgctcccgatggggcgggctcttgcaaaagtggcgacgggcggttataatctacgttataccgattttagtgcaaggaggaacgcacgatggagcgaatgaagatcgctgccctttttgccgaccaggaacagctggacggcaaggaagtcaccgtgtgcggctgggcccgcaccatccgggatatgaaaacctttgggttcatcgagctcaatgacggctcctgcttcaagaatttgcaggtggtcatgtccgctgatgagctgaataattataaggagatcgccgggcagaacgtgggcgccgctctcatcgtctgtggcgccgtggtgctgacgccggaggccaagcagcctctggagataaaggcctcctccattgaggtggagggcaagtccaccccggactatcctctgcaaaaaaagcgccacagcgtggagttcctgcggaccatccagcatctgcggccccgcaccaacctgttctccgctaccttccgggtccgcagcgtagcagcctacgccatccacgagttcttccagagccgtggcttcgtatatgtccacactcccatcatcaccggctccgactgcgaaggcgccggcgagatgtttcaggtgacgacgctggatctcaacgacgttccccggaccgaagacgggcaggtggattacagcaaggacttcttcggcaaaaagaccagcctcaccgtgtccggccagctgaatgccgagaacttcgccatggcctttggtgacgtgtataccttcggtcccaccttccgggcggagaattccaacacccagcgtcacgccgccgagttctggatgatcgagccggagatggcctttaccgatctggcgggggatatggatgtggccgaggccatgatcaagcacatcatccgccgggtgctggagcgctgccccgacgagatcaacttcttcaacagcttcgtggataaggggctcaaggaacgcctgacccacgtgatgacctccgacttcggccgggtcagctataccgaagcggtggagatcctgaagcagcacaatgaccagttcgacttcaaggtagactggggtaccgacctccagacggagcacgagcggttcctgacggagcaggtgttcaagcgcccggtgttcgtcaccgactatcccgccgagatcaaggccttttatatgcggatgaacgatgacggcaagacggtggcggcggcggactgtctggtccccggcattggtgagatcatcggcggcagccagcgcgaggagcgactggaggtactggaggagcgcatccgccagctgggcatgaacccggaggactactggtggtactgcgatctgcggcgctacggctcctgcaagcacgcaggcttcggtctgggcttcgagcggatggtgatgtacctgacaggtgtcagcaacatccgggacgtggagctgcatccccgcaccgtgggcaatgcggagttctgatgcacttccgggcttttgacggcaatgcaaagcttttgccgttccaataaaagagctgcatcgagggcgctggcgtaggccggcgccctttttccttttgactccaatggatcactcttcccagcagtttttctttttttgtcttgtctccgacgggtgactttctgccaatagcagcagaaagtcaccaaagaacgccagcagaaacccatggtttctgcacttccttcgtcatttgcaagagttgctacctaaaatttgccgaagcagggaattggtctgcttctactcacgctgccgctgcattgggaggttgaagaagcttgctattctatcgtggggcacggattgccacatcaagaaagtagaaggtaattggggccgctggaagttctctcataagataattctgtcattccgagccggggcgtagacccggcgtgggaatccgtactcaaaaccatagacccacacgctccttcgcctgagtgggagcggcagcgggtctgttgctgagtcagttcccgctacggcccataacgaacggtagttcttgaaggtaaagggagtccagagaccattggtctctggcggcgctttttgcatactttttgtcgctgttgacaaaaagtatgccgccggaggcaataaaagaaaaagctactgggaacagtgggccgccggaggtaaaagcctgtgaaagtccccttcccacatcataggcgctatttggcccttccggcatatggcagctgatatttcagcaggaagacactttgtattgcaaaattgtacacatttctctcttctcggcggccccctctcccccgtctgcgaaaaatgcaaaaaaaagtggcatttctctgggcagtctgttataatagcttattatggggtcaaattgttactggccgcatctaatatgcggcacaacataaacttgtaaaaacagatatttcataataggagaagccaatggaaacacagaaaaagcgccggggcgaccgcaaggacggccgcctgatgcgggagctggactccctgcactacgtcaccggcatcctctaccccaaccgatgcgacaacgaggcctacatctcccagcgcatcgacctgaccaacatgaacgcctatatcgccaagaagaatgagacggagacggagtttccctataccatgttccacctggtgctggcagccctgatgaaaaccatcaccctgcgccccaagctgaaccgcttcatcgtcaacagcaacttctatcagcgcaacgaggtatccgcctccttcgtggtgaagaagcagttctccgataagggcgccgaggcgctggccttcctgcactgcaaggacgagtacacgctctccgacatccacgactacatccgccgtcaggtgacggagtgccggtcggacaaggtagacccctccaccggagccatggatatcctcaacaagatccctcgcttcgtcagcaaggccgccatccacttcctcatgtggctggataagcacggttgggtgccggcggacatcatcgccacggacccctattacagctccgtggtcatctccaatctgggctccatcaagctcaagtgcggctatcaccacctgaccaactggggtacctgctccctgttctgcatcatcggggagaaggccgtgcggcccatctacgccccggacggcaccatgaccatgaaggaaacgctggatctggggctcaccattgacgagcgtttggcggacggctattactattccaagtccgtccggctgctgaagcatctgctggagcacccggaggagctggagaaacctatgaaggaggaagttatctatgaatgagacggtacagatcaagaccccgtggctggcatccaaggatcccgaggtaccctctaccctgaactactccaccctgtccatgtgcggccgggtcgaggagatggtacgtcagtaccccaattacatcgcctatgaattcatgggcaaaaccactacctacgccgagatgtggcagaagatcaacgcctgtgccaagagcctgaaggccatcggcatccgggaaggcgacaaggtcaccatctgtatgcccaacgcccctcagaccctgtgtatgttctacgccgtgaacatggtgggtgccatcgccaacatggtccaccctctgtccgccgagagcgagatctccttctatctgcgggactccaactctgtggcggccatcacgctggatcagttctaccccaagtttgaaagcgtccgcaagacggtggatctgccctgcctcatcgtcacctccgtggccgatgagctcaagcccctgctgcgggtgggctatcagctcaccgagggccgcaagaaccccaaggtcccccgtggccccggcgtggtgctgtggaaggattttctcaagcgtggcgagcacgtggagatctaccgcatcaagcgcaaggacaccgatcccgccgccatcctctactccggcggcaccaccggcgtcaccaagggcatcctgctctccaaccgcaactttaacgctctggccgcccagatcgtggccaccaaccccttcttccatccgggtcacaagatgctggccatcatgcccatgttccatggcttcggactgggcgtgtccatccactccatggtggccaacggcggccactgcatcctgatcccccgcttcacccctcagagctacgccgagctcatcaagaagcacaagcccaatctcatcgccggcgtcccctccctgttcgaggcgctgctgcgggtcaaggagatcgagggggccgacctcagctgcctgaagggtgtgttctccggcggtgacagtctgtccattgagctgaagaagcgctttgacaagttcctccacgaccacggcgccaccgtcagcgtccgggagggctacggcaccaccgagtgcgtcaccgccagctgcctgacccccatccacaagcagaaggagggctccatcggcatccccttcccggacacctattacaagatcgtcaagcccggcactcaggaggaggtcccctacggtgaggagggcgagatctgcctgtccggccccaccgtgatgctggagtacgtcaaccatccggaggagacggcccagaccaagcagacccacgccgacggcctcacctggatccacaccggcgacctgggcatgatggacgaggagggctttatctacttccgtcagcgcatcaagcgcatgatcgtcaccaacggctacaacgtctatccctcccagttggagaacattctggatggccacgactacgtccacctcagctgcgtcatcggcgtcaaggatcccatcaagatgcagcgggtcaaggcattcgtggtgctcaagcccggctatcagcccacggaggcctgcaagaaggagctgctggactactgccgcaagcacatcgccaagtacgccatgccctccgacatcgagttccgtgaggagctgcccaagacactggtgggcaaggtggcctaccgtgtgctggaggaggaagagaacgccaaacaggctcagaaggccgtagaggacgctaagcgtgccgaggaggatgccaagcgggccgaggcggcgaaggctgagaagctcagtgccgccaagaagcctgcggccaaaaagcccgcccctaagaagcccgctcaccccacggccaagcccgagcccgccaagcaggctcagaaggccgacacccctcatgacggccagaacaacgacatcaaagaatagtcgctcccatggcggggagcgcaggaggttcctatggacagagagatgaaacgccactacaccctactggtagactttttgggtaaaattttggggccggactacgaggtggccctgcatgagctgctggatgactccaatgagatcattgccatcgccaacggcgaactgacggggcggcatttaggctcccccctcagcaacaagatgctggaattcctgaccagccgcctctatgagacgcaggactatgtgctgcggtttgaaagcacctccgtcaccggaaaaaagctgtgctccaactccctgttcatcaaggatccccacggccgtctggtgggcctgctgtgcatcaactttgacagcagccgctaccgggagctgtccgcccgtgtcatggacctgtgcggcagcctgctgacccccggtgctcccagcggcacccacctcatcgtggaaaacgacgagcacacctatccctcctccatcgccggcgccactgccagcatcgtctcctccgtcattgcggactatcccgtgccggtggaccgtctgacgcaggacgagaagatggagatcatggatgcgctgaaccgcaagggcgtgttcctgctgaagggctccgtgagccatgtggcgcgggagctccacagctccgaggccagcatctaccgctatctgggcaagctcaacaacaaggactaaccgtaaaaatcgggagggacggctgcgccgtccctcccgaaaatttccccttcaccgcatttccccctatttccgggaaattcttccgtcactgttgcaaatatcacggttatttggcagcaggtgtggtatactaccggcaaatataaatagaaaaggagatcttaactatggccatcgtacacgcaaacgcacagaccttcccgcaggaagtgcttcagtccaacgaaacggtgctggtggatttttgggccgcctggtgcggtccctgcaagatgctggcccccattctggaggagctggacggcgtggctccctgcaagatcgtgaaggtagatgtggatgaaaaccgctcactggcccttcagtacgccgtggccagcatccccacgctgctggtgttccgcaatggtcagctggtgaaccgctccgtgggtcttatctccagggaggacgtgctgaagctggtgcaggcgtaagctttttaacgaaaaatgtgcggggcttttgccccgcacattttctcacagcttctccatctcatgggccacctgctcctcacaggagcgcatggcctccagcgtccgctccagcagcatatccagttcccagcccagacgctccgccccttgggcgatgacgtcacgggagcacccggcggcgaacttcttgtccttgtacttctttttcaggctcttcagctccatatcctgacagctgcggctgggccgcatcaacgccgctgccccgatcaggcccgtcagctcatctgctgcaaacagcaccttctccatctcatgctccggagccacgtcgcagcacaggccgcagccgtggctgcacacggcgtggatgatgtcctcgccgcagcctgcctcccgcagcagctccggtgccttttggcagtgctcctccggccagcgttcaaagtcgatgtcgtggagcaagcccacaatgccccagaattcggcatcgtcgccgtagcccaactccttggcataccactgcatgaccccctccaccgtcagggcgtgctgcaggtggaacgcctcctgattgtacctccgcagggcggcccacgccgcctcccggctgatgtgctctctcatgggagatcctcctttgttgctgatgttttccataggatagcaccatccgccggactatgcaagcaccatctgctccaacaggctcagcagttgccgggcatggcgatattccgccgccgacagctcctcccatatctcccgcagacacacgtcctccgtggcctctgccgcctgtgcatagcgcagaccgccgcaggtctcggcgtgatagcgggtccgcagcacctcccgccacggcagacgctccacccgtcctccctgcaaacggggctgatagcagcagcccgtcaccagatagtacacccccatgagacggcgggcgtggctcccctcctcccctgccagctgccgcagcaggcggcgggcagccacattaggggcgcaggcggcataggccagataggccctccggtccgccagctcatcctcgatgaagtcctggatgagccggatgctgcccatggccctgcctgcaaggcagcacccgctctccgccggtgccgccggtatctccggggcagcaggcaccgccgcagcccccgtcctctcctgaatattctctgtcctcggttctctcgatggctcccggcaggcggcccgcacctccgggtacgggtccagctccggtgatacccgctgccagatgcggtcgcagcgctgcgggtccatgtgctccatcttctccatatgcagcccccctttttctcgcattattctatgctccggtgggaaaaaacgtccctgtccattgctttttcccgaaaactctgctaaaatatatgttttgtaaggctttttgtgtcctatcccgtccctttcgacggggtccaatatactccaaaggaggaatcgttccatgctggaactgaaacacatcagttaccgggtgtccacccccgacggggagcaggacatcctcaaggacatcagcatcaccattcccgatgagaagctggtagtctttaccggccccaacggcggcggcaagaccaccatggccaaggtcatcatgggtctggcggagcccacatcgggccagatcctgtataatgggcaggatatcacccacctctccatcacggagcgggccagattgggcatcagctacggcttccagcagcccccccgcttcaagggcatcaccgtccatgacctgctgcttctggcggcgggcaaggaaaagctcaccaaggaccagtgctgccagtacctgacccgtgtgggcctgtgcgccaacgactatctggagcgtgaggtggatgtgtccctctccggcggcgaggtcaagcgcatcgagatcgccaccattctggcccggcagggcagcctcatgatcttcgacgagccggaggccggcatcgacctgtggagcttcgcccggctgacggagacctttgagcagatccatcagcagcaccgggccaccatgatcatcatctcccatcaggagcgcatcatccgtctggcggacgagatcgtggtcatctccggcgggcagatcgcccaccggggcaatacggaggagatcttccccctgattttggcggacaccctgggcggctgtcccgtactggagcacaaggaggtgcagctatgatcaccgagatcgacgccagcctgctggaaaagatcgcagacctcaccggcaagcccgtgggggccttcaacatccgcaaggacatgggctgcgaggcccgtcagtccacggagcatatcgccatcgacccccgtgccgacggcaagcccggtatcgacatccacttcaaggagggtaccaagggagagacctgccacatccccgtcatcatcagtcagacgggcatgagcgacatggtgtataacgacttctatgtagccgatgactgcgacgttaccattgtggcgggctgcggcatccacaactccggctgcgacgagagccgccacgacggcatccacaccttccacatcggcaagaactgccgcgtgcgctacacggagaagcactacggcgaggacgccaagggcgagaccggcaagaacatcatgaacccccagaccattgtctatctgggggagaactccaccatgcagatggacaccatccagatccggggcatcgactccaccctgcgggacacccagttctactgcgaggccggcagcgaggtggtggtgacggagcgtttgctgacccacggggcccagaccgccgaaagcgacatgaccatccagctcaacggcgagggggccaagggccgtgtcatctcccgctccgtggcgcaggacacctcccgtcaggtgttccacccggtgatggtgggcaacagccagtgctttggccatgtgcagtgcgactccatcatcatggggcaggcccacatcgagtccatccccgccatcaccgccaactgtccggacgcccagctgatccacgaggccgccatcggcaagatcgccggtgaccagctgctgaagctggagacactgggtctttccccggaggaagcggaggagaccatcctcaagggctttctggcgtaaacgaatcgtatatttttgccgcaattctaccatttgttatcactcccccataaaatgtcccctcctgccggcgcaggagggggcattttcgtttacaggtcaaattccttgatgcgggaggtgcgctcctccatggggacgtagtggccccgaatggtgacggcccggtaggccggacgcatgatgcggtgaccggtgatgacctcctccatgcggttggcgcaccagcctgcaatacgggcggaggcgaacagcggcgtgaacacatcctccgggatgtccagcatggtatacaccagcccggagtacatatccacgttggcgcacatgggcgtatcgctgtgacgccgctcctgcaccagcgggatgcccagctcctccaccttctgcagcaggtcgaactccgcctcgtagcccttgatctgggccatatgccgggcgtacttcttcagcagcaccgcacggggatccgacatggtgtacacggcgtggcccaagccgtagagcttgccggagcgatccccggcctccccgtccagcagacgcaccagatagtcccggatggatccgtcgtcgtggggatccacattctcctgaatgtagtggaacatctccatgaccttggcgttggcgccgccgtggagcggccccttcagggagcccaccgctccggcgatggcgctgtaagtatccgtaccgctggaggacagcgcccggcacacgaaggtggagttgttgccgccgccgtgctcggcatggagcatcagcatcatatccagcagatgggcctcctcctcggtgtagcttttgtccggacggatcatccgcaggaagttctccgccgtgctgagtccctcctccgggtagtggatgtgcagggactcgccgccgaaatggtggcgcttgacggcataggcattggccacgatggagggaaaatacccgataagctccaccgactggcgcagcagattgtccaccgacagatcgtccggatccgggtcgtaggagtacagcgacaggatgctgcggcccagctcattcatgatgttgccgctggtgcgccgcatgatcatcccctcggtgaagccctccggcagctttctggcccggttcatgatctcattgaagtgccgcagctccccctgcgagggcagatagcccatcagcagcagatacgccacctcctcgaacccgaaggttccctccgcccggtgggcctccacaatgtcgttaagctcgatgccccggtagtagagccttccgggaatggggatgcgctggccgtcctgcagcagatagccctgcacgctgcccaccttggtgacgcccaccatcacaccggtgccgtcgctgtttcgcagaccccgcttgatctcgccgtggtaatactcctccccgatatgatactcctcccggatctgacggctcagcgacccggtgtactcctgaatgacgccgttttccttcatcccctgctcctttccccgtcggcctgctgccccggtgactgtgattttcccgtattgtatcccattttccttcattttgcaagaaaaacttttgtaactttcaaaatatctatgcacaacctatttatattagattatctccggtctgctcacggaaaaattgcaagaatttcattttattcattcattttctcttgcatcctggcttttttgtgttatactgtatccaacaaaaccatcatccgaaaaggggtgcttaccgatgatccaactgcacagcggcagcgtcatgctgcagggcggcgtacccgcaccgatccccgccgccggcagcggccgggataagaccatggcctatcagatcctccgccgtcaccaccgggggccgtgggagggccagcttcacctgaccttcgatagtctcatctcccacgacatcacctatgtgggtatcattcagaccgccaaggccagcggcctgcgggagttcccggtgccttacgttctcaccaactgccacaacagtctctgcgccgtgggcggcaccatcaacgaggacgaccacgccttcggcctgtctgccgccgtgaagtacggcggaaactacgtccccgccaatcaggcggtgatccaccagtatgcgcgggagatgatggccggctgcggccgcatgatcctcggctccgacagccacacccgttacggcgctctgggtaccatgggcgtgggcgagggcggcccggagatcgtgaagcagctgctacgcaacacctatgacatcgccgccccgcaggtggtgctggtgtggctcaccggcacaccgccccacggcgtgggtccccacgacgtggccatcgccctgtgcggggccgtgtatggaaacggcttcgccaaaaacaaaattctggagtttgccggtcccggcgtggctcatctgcctatggattaccgcatcggcatcgacgtaatgaccacggagacggcgtgcctgtcctccatctggcagacggacgatgccgtggcggagtacctgaccatccacggacggccggaggcctatacccggctggccccggaggagggtgcctgctacgacgccatgatctccatagacctctcccggctggagcccatggccgccctccccttccacccctccgaggcggtgacgctgcgggagctgctccacgatcccggcgattatctgcgtcaggtggagcagcgggcggcggagcagttcggcggcaaggccaccctctccctcaccgaccaagtggtggacggcaagctggtggtgcagcaggggatcatcgccgggtgcgccggcggaatgtatgacaacattgccgaggccgccgccattctctccggcggtgacgtgggctgcggccccttctctctgtcggtgtatcccccctccatcccggtaaatctggagctgatgcaaaacggcgtgcagcaggcgctgctggaggccggagtcctcttcaagccctgcttctgcggcccctgcttcggagccggggatgtccctgccaacaacgccctgtccgtgcgtcacaccacccgcaacttccccaaccgggagggctctaagcccggcgacggccagttgtccggggtgctgctgatggacgcccgctccatcgccgccacggcccggaaccacggcgtggtcacctccgccgccgaggtggactatcccgccccggccccggtgcgccgcaccttcgacggcggggtctatggccgccgggtgtacttcggctatggcaaggcccgaccggaggcccccctccactacggtcccaacattgccgagtggcccgccatcccgccgctgggggaggagctgctgctgcaggtggcctccgtactgcgggatcccgtcaccaccaccgatgagctgatcccctccggcgagacctcctcctaccgctccaatcccctgaagctggcgtccttcgccctgtcccgccgggacccggactacgttccccgtgccagagccactcaggcgctggaggaggcccgccgcagcggcgccatgcccccggagctgcaaagcgtgcagaaggccctctccattcccgacatgagccgggtgcagatcggctcggtgctgttcgccaacaagcccggcgacggctcggcacgggagcaggccgcctcctgccagcgggtgctgggaggctgtgccaacctctgctacgagtttgccaccaagcgctaccgctccaactgcgtcaactgggggatgctgcccttcacgctggcggaaggggccaacttccccggccgctccggtgacttcctctatgtgccgcaggtgcgggaaaaggtgacccgtggcgatgaggagttccccgccctgctgctgacggacagcggcatccacgccctgacgctttatctgaaaaataccaccgccgaggagcgggagctgctgctcactggctgtctcatgaaccactatgcggcccaaaatgccgccgaaaaccggaggtgaaccccatggaaaaaatcaaaatgccccaccccattgcggagctggacggcgacgaaatgacccatgtgctttgggggaagatcaaagagcagctgatcctgccctttgtggagctgaacacggagtactacgacttgggcctgcccaaccgggagcggacggcggatcaggtgacacgggatgcggcggaggccatccaccgcctgcacatcggcgtcaagtgcgccaccatcacccccaacctccagcggcaggaggagtacggcctgagccaactgtggaagtcccccaacgccaccatccgggcggcgctggacggcacggtgttccgggctcccatcctcatttcacgggtcaagcccgtggtgaccagctggaaaaagcccgtcaccatcgcccgccacgcctacggtgatctgtataaggccgtggaataccgggtccccggcaagggaaaggcggagctggtcttcaccgatgaaaacggcgtggagacctcccgccagacggtgtatcagttcagcggccccggcgtggtgcaggccatgcataaccgggacgattccattctctcctttgcccggtgctgcttctcctacgggctctccgtgggacaggacgtgtggttttccagcaaggataccatctccaaggactacgaccagaccttcaagctgctgtttcagaaggtgtacgacgaggagtaccggacggcctttgaaaaggcgggtctcacctatcgctacgccctcatcgacgacgtggcggccaaggtcatccgctcccccggcggcatcatctgggcctgcaagaattacgacggcgacgtcatgagcgacctcatcgccgccgcctccggctccctgcccatgatgaccagcgtgctggtctccccggacggcaactttgaatatgaggccgcccacggcaccgtcaccgatcatttctaccgctggcgtcgtggggagaaggtctccaccaatccgctggctaccatggcggcttgggccggcgccctccgcaaacggggcgaatgggacaaaaaccagcgcttagtggactattctgactgtctgaatcaggctggactggacgtgtttgaggaggggtatctgtctgaggatctggctgccctctgcgaccccgccgacctgaaggagatgccggataatgaccgtctgctctccctcatccgtcagcggctggaggtcctgctggcccagtgaccggtcagtcattttcgctctcgcaattccgttagccgcttactttccttccgccggatggcacggcggtgcatccccatccggtcggtgcatcgccattcggctcccgctcagcggccacctggcatctccgttccttctgatggtggtgcgtcatgctgctttgcacagcgttttatctattatattgtacttttccctcaagatataaaacaaaacaggccctgcgtcctatggacgcagggcctgtttcgttttatcgcccacctatttcacggcgtactttctggcatattcccggaagcggcggtcgtattcctcgttgttcagcttgccgctgcgcagcgtctcatggatgttcagattgtgctgggacatatcgataacgctgccggcgatgttggagcagtggtcggaggtgcgctccagatccgtcagcaggtctgcccacacaaagcccgcctcgatgctgcacttgccctcccgcatccgcaggatgtgacgggtacgcagctgctccttcagcagatccaccacctgctccagcggctctacagcggccgccgcctgtgcatccccccggcggaaggcatccgccgaacggtccaggatctccgccacggcggcgtccaacaccttcaggtccgcctgagcggcctcgctgagagtcagtcccttgctttgcagctcctcggcagattccacgatgttcacagcgtggtcggcaatgcgctcgaagtccccaatgaccttcagcagctccgtggcgttctcactgtccgccgccgtcagggtctggctgctgagcttcaccagataggtccccagaatgtcctcatagtgatccgtggcctcctcgtcggcccgcacctgctccgccagcgccggggtatagtccgtcaccgacagcagactgccgcgcagggcctgcacggcgcagtccgccatcttcatggtcacctcacggcactggcccagcgccagagccggggaggccagcaggcgctcatccagttccgtctcgtgctccggagccggggcgtcgtggatgacccgcagagccagcttctccagcagcggggccatgggcatgagaatggccacgcacaacaggttaaaggcggtgtggatcacggcgatgcccggcagagtggccgcctctcccagaatggccggggcaaagatggcccggacgatggaataggccgtcagcagcaccacagaaccgatgacattgaaggacaggtggacaaaggcggcacgcttggcgttcttattggcccccacagaggacagcagcgccgtgacgcaggtgccgatgttctggcccataatgatgggaatggcggcgccgtagctcacctgaccggtgacggccagcgcctgcagaatcccaacggaggcggagctggactggatgatggccgtcagcaccgcaccggccagcaggcccagcgccggattttggaaggtgatgaacagctgccggaaggccggtacatccgccaaacctcccacggcggaggacatggtctccatgccgaacatcagcgtggcaaagcccagcagcaccgtgccggtgtcttttttcttattgtccttgcagaacatgaagaagatgatacccaccagcgccagcaccggcgtaaaggaggagggcttcaggagccgcacccatatgctgtcgccgctgatgccgcccagactcagcagccatgccgtcaccgtggtgccgacgttggcccccatgatgacgttgatggcctgccgcagggtcatgagaccggagttgacgaagcccaccaccatcaccgtggtggccgaggagctctggatcaccgccgtgacgccaaggcccgtgaaaaagcccgccagacggccggtggtcatcttgcccagcagggaacgcaggcggcccccggcccggcgctccagcgcctgtcccatcagcgtcatgccgaacaggaacagacacagccctcccagcatggtcaatacatcaaaaatactcataagcgttttcctctccgccgccaccgggcggcacctttttttacacagtttttcccaaatactctatctaatcagtactttaccggcggcagataaaatccaaaagcggagttttgtaaaatccatgtaaaatcttacccggtggagggcgtcgggacagcaggcggggaagctcgacgaaaaagcaggatttatatctcatatgtgaaaaaaatcacgtctacccccttgcagactttttgcggatgctgtatcatggagaatgtccgggaattggccggacaaaataataaaagaggagagaaaacaatggaacgtatcttccacctgaaggagaacggcacaactgtgaaaacagaaattctggccggtctcaccacgttcatgacgatggcctacatcatcgccctgaaccccaatctgctcaccggcttccagaccgggacgcccctgtggaacggcgtatttctcgccacctgcatcgcctccgccattggcacggtgtgcatggccttcctggccaacaagccctttgtcatggcccccggcatgggcctgaacagcttcttcgccgtggtggcgggcaacgtggccgccctgctgaacaccgactacaccagcgccttccaggcggtactgtgcatcattctggtggagggcatcgtgttcctgctgctgagcgtgttcaacatccgtgataagatcgttcacgccatccctctgggcgtgcggctgggcatcggccccgccatcggcctgatgctgatgaacatcggcgttggctccaacgtaggcgtttatgccgagggcaacggctacaccgatcccttctatgtcatgcgtgacttcttcggcgccatgacccccagcgtcatcaaggatcacatgggcgccgagtacagcaccatggtcctgactgttgtcaccatgtttgtgggtctgttcgtcatcatcctgctggccaagaagggcatcaaggccgccgtgctggtgggtatgctggcttcctccgtgatctactgggccggtgaggccatcttcctgcacgtgaaccccttcgcctccctgcagggcgcctcctttgtgcctcccttccacgacatggctgccaccactctgtttaagttcgacttcaccgacttcttccgcatcggctggtttaccgccatcactctggtcatcaccttctgcatgatcgatatgttcgacaccatcggcacgctggtgggtaccgcctcccgtgccggtatgaccgacaaggacggcaatatgcccaacatgaaggaggccctgacctctgacgccatcggcaccgtggccggcgcctgctgcggtacctccaccgtcactacttttgtggagtccgcctccggcgtggaggccggcggccgcaccggtctgacggctctcaccaccgccgtgatgttcctggcctgcatcttcatcgcccccatcgccgccatcatccccgctgcggccacctcctccgctctgatctatgtgggcatcctgatgctgcagggcctgaagaatgtggacttcaacgatctggatcagatcgtccccgtgttcatcatgctcatcgccatgcccatctccggctctatcggccacggcatcggtctggccatgatctcctacaccatcatcaaggtgttctccggcaaggccaaggacgtgtccgtcctgacctatgtcatcgccgccctgttcattgtgaagttcttcgcagtggtgtaaggcgagctatccccaattaggagggaatacgccgtatggattattatctgctgacggatctggctgcacaggtgggacacggtctcgccatcagcggcgcagagacctttcgggtggaggataccatacggcgtattcttcgtgcctacggcatcgagtgcgaggtattcgccatccccaactgcctgaccatcagctttgaggccgccaacggcaagcccctgaccatcatgaagcgcatcggcttccacggcaacgatctggatgcggtggagcagttcaatgccctgagccgccgcatctgccgggagaccccggaggtggaggtagcggtgcagtggctggaggagacgcaggccgcctgtcggaaatattcgctgccagtatactatctgggccactatctgggggccttcggcttctgctttgtctttggcggcaccctgcgggacagcctgtgggcgggtctgttggggctgatcatcggtcttgtcaacgggtttttgaaccggctggaggtgaaccccttctttcgcaccatcgccgcctccttcttcatggcggctccggcatatctggcggccagtctggggtggatggattctgtggactcttctatcatcggcgcactgatgatcctggtgccggggctgctcatcaccaactccatgcgggatatcatctacggcgataccaactccggcatcaaccgcatcgtgcaggtgctgctgtcggccttcgccattgcactgggtacggcggcggcgtggcgtatcacctccgggctgtacggcctgccggtaagcaccggtgtggtgcatcccttctgggtgcagggtctggcggtgctggtgggctgcgtgggcttcgccatcctcttcaacgtacacggcggcggaatgtggctgtgtacgctgggcggcgtggccacgtggatggtatacctgctggcgcagcagctgggctacggcgtttacagcatgaacttctttgccacactggtagcggccctctatgccgagaccatggcccgcatccggaagtatccggtgacgtcgtatctggtggtgtccaccttcccgctgctgccgggggcaggcatttactataccatgagccttggactggcgggagacttccatgcggcgctggccaagggcctggaaacggcgggcatcgccgggtgtctggcggtggggatcctgctggtgtccaccctgttccgcctgccggcggagtggaaacgtcggcacggcaagaattaagtgccaagccccatataccaagaaacaaggactgcggacattgtccgcagtccttgtttggttgaggggatggttttctgttaggcgtatgatttgcagggtgagggaatcagtccagcagcatcagcagctccttggccttgacggcctgcccctccttcacccggatctcccggaccttgccggcggtgcgggcggtaacggccgtctccatcttcatagcctcgatggtcatgagtacctgattctcctccacggtgtcgccgggctgcacgtggagcttggacaccatgccggggatggaggcccccacctgacggggatcgctctcgtcggcctgcactacctggcgggtcttttccgaagcgttgggatcacggaccgccacctcacggcgcattccgttcagctcgaactgaacgttgatggtgccgtcatcgttgtggtcacccagccccagatacttgatgaccagtgtcttgccgtcctcgatgttgatcttgttggtctcgcccagcgccatgccattgaagaacacatggctgcccatacgggtgatatagccgtactccttgcggtggcggcagaagtcctcatataccttgggatacatggcgtaggagatcagatccttgcgctccgggtcgtcccggaacttccgcacctcctgctccagctggtcaaagtccaccggcggcagcagcttgccggggcggcaggtgatgggctcctcgcccttcaggaccaccttctgcagatcctccgggaagccccatgcgggctggcccatcatgcccttgaagtaggacaccacggaatccgggaaagccagtgccttgccccgctccacgatattctccggggtcaggtcgttctgcaccataaagatggccagatcgcccaccaccttggaggagggcgtcaccttcaccgggtcgcccagcatatcgttgacggtcttgtacatctccttgacctcctcgaatcggtcgcccagacccagcgactccacctggggccgcaggttggtgtactgaccgccggggatctcgtagcggtagatgtcggtggtagaggttttcaggccgtggtcgaagctctcataccgcaggcgcacatccgcccagtagttggacagctcctgcacccgccgcaggtccagcccggtgtcccgctccgttccctgcagggcggccaccagcgcatccagcgagggctggctggtaagacccgccagcggggcgcaggcggcatccaccacatccacaccggcctcggcggccatcagcagggccgccacctgattgccggtggtgtcgtgggtatgcagatggatggggatgccgatctcctgcttcagagtggacaccagcttcttggcggcgtagggcttcagcaggccggacatatccttaatggccagcatatgggcgccacggtgctccagctccttggcaaggtccacatagtatttcagggtgtacttatccttggtggggtccagaatgtcgccggtatagcacatggtggcctccagcagcttattctggttcagcacctcgtccatggccacctccatgctggggatccagttcagagagtcgaacacacggaacacgtcgatgccccgctccgccgcctccttgatgaagctgcggaccagattgtcgggatagttggcatagcccaccagattggagccacgcagcagcatctggaaggggatgttggggatcttctcccgcagcagccgcagccgctcccatggggactcgtggaggaagcggtaggccacgtcgaaggtggcgccgccccacatctccagtgagaagcagtcccgcagaatatccgccacgccgtcagcgcccttcaccatgtcacgggtgcgcatccgggtggccagcaggctctgatgggcatctcgcatggtggtgtccgtgagcagcagcttcttctgctccagcacccactggctcacggccttggggcccttttcatccagcagctgcttcaggccggggcccagcggggcctgaggctgggggaagcggggggtgtcgtactggtggcgctcggcgttgggattggccacttggatctcggcgatgtaccgcaggacacgggtggcccggtcacgggagtccacgatgtcaaacagctccggcgtctcgtcgatgaacttggtgtggcagcggcccgccacgaaatccggatgggccagaatgttggtgacaaaggggatgttggtcttgacgccccgcacccgtacctcgttgatggcacgggctgccttgcggcaggcggcggggaaattatgatcccaactggtgaccttcaccagcagcgagtcgtagtagggggagataacggtacccacgtcggcattgccgccgtccagacggacaccgaatccgccggaggatgcgtaggccgtgatcttgccgttgtccggggcaaagttgttggcggggtcctcggtggtcacacggcactggatggcgtagccgtcgacgtggacatcctcctgccggctcaggccgatctccgggtgactcaggggataccctgcggcaatgaggatctgactgcggacgatatccacgccggtgaccatctccgtcaccgtatgctccacctgaatgcgggggttcatctcgatgaagtagtagccgccgtttttatccaccagaaactccaccgtaccggcgctgacgtaccccaccgagcgggcaattttcacggcatcccggcgcagcgcctccaccgtctcctgcgggacggaccatgccggggcaaactccaccaccttctgataccgccgctggagggagcagtcccgctcgcccagatgatagacgttgccgtgctgatccgccagaatctgcacctcgatgtgcttgggctccaccagatacttctccatgaagatatcgccgcagccgaaggccttctctgcctcgctgtggaccagctcataggcggtgcggacctcctccgggctgtcgcagcggcgcattccacgaccgccaccgccggccgccgccttcaaaatcaccgggaagccaaaggataccgccttctccacggcgtcctctgcatcccgcagaggctccgtgcagccggggatgatgggaacaccacaggagatagcgatctccttggcgctaagcttatcgcccatctgccccagcaccttggaggatggcccgatgaacaggataccgttttcctcacaggctctggcaaagtcggcattctccgacaggaagccgtatccgggatggatggcggtaacaccacggcgcttggccagtccgatgatgccggggatgtccagatacgcccccagcggggacttcttctcccccaccagatacgcctcatccgccttggtgcggaacagcgaataggtgtcctcattggagtagatggccaccgtgtggatgcccagatcgtggcaggcacggaaaatgcggatggcaatttcgccacggttggccaccagcaccttttggatttctttggtctgcatgacccatcgcccctttctgtctcgtggacatttgtttgcacatattataccatagaccttccccgccttgcagagggcaaacagcacaaatcgcctttttgttcactctcacaaggccgccggggattttctccgcaaatttggaagcttttcccacttccgcctgcggtcggcatcaagaagccgtatcaaaagctccctccggcgctttcacggtatcccccagccccgtttttccggcggaacgttcggaatgaatcgtaccgccgggtcggctttttgcacaaacgctctccttcaccgcatctccccaaggccctcaaacgccatcaacgccgcatcccgaaccggggtgcggcgttgatggtaaataaaggaagaaagattagcaaattcagcgccccatcggcgggggcggcggctcagccgcccagatatgccttcttgatggagtcggactccgccagctcatggccggtgccggagagtgcgatctttccggattccagcacataggcccggtccgccacctgcaaggccatttcggcgttctgttccaccagcaggatggtggtgccggactggtgcagctcccggatgatagcgaagatctgtcccaccagaatgggggcaaggcccatagagggctcgtccagcatcagcagcttggggtggctgatcagcgcccggcccatagccagcatctgctgctcgccgccggagagcgtccccgccacctgatcccgccgctcttgcaggcgggggaagcgggtgaagatatccttcagctcctcacgggtgggctttttgtggaggtaggcccccatctccagattctccagcaccgtcatctgctggaagatacggcggccctccggcacgtgagccagccccttatataccagattgtggctgggggtgtgggtgatgtcctcccccagaaactcgatgctgccggtacgggagtgcatcataccggagacggttttcagggtggtggattttccggcgccgttggcgccgatcagggccaccacctcgccggggcgcacctcgaaggagacgttcttcagtgcatggatcttgccgtagtagacgttgatatccttaaccttcagcatcgtccttggctcctttcttccccagatacgcctcgatgacggtgggattggctttgatgtcggcagggctgcccttggcgatgaccttgccgtagttcagcacgcagatgccctcgcagatacccatgaccagattcatatcgtgctcgatgagcagaatggcgatctggaaggtatcccggatgcggcggatgttctccatcagttccgccgtctcggaagggttcatgcccgccgccggctcgtccaacagcagcagcaatggcccggaggccagcgcccggacgatctccagacggcgctgtgcgccgtagggcaggctccccgcctgtgcatgagccagatccgccatgccaaagaagtccaacatctccagcgccgtggcctccgcctgacgctccgccttgcggtagccgaagccgtgggtcacggcggccagcaggttctcccggacgctattgtgcatccccaccttcacattgtcgatgacgctcatatcgttgtacagccggatattctggaaggtacgggcgatgcccatgcggctgacctgatgggtggacttgcccgccgttggcatcccattgatgaggatgctgccccgggtgggctgatagacgctggtgaggaggttaaagaccgtggtcttcccggctccgttggggccgatcagtccggcgatctccgtgcggccgatggtgagagtgaagtcatccacggcggtcagaccgccgaaatcgatgcccagtcggctggcctccagcacgggggtgtagcggacatcacgctccggcaccagcgagcggctggggtacgggaccagcggcgaatccggcagccgcacaccggcagttttcaactctttcatttcttcgccgcctcctttttcgttttctccttccggatccttccaaggctcagcagggttttcagggaccaccgacccttccactccgcaaactgcggggaggagttcagcagcataatgacgatcagcagtacggagtaggccagcattcggtagtctgccacctgacgcagtacctccggcagagcccgcaggatgatggtggcgatgatggagccccggatggagcccatgccgcccagcaccacgatcaccagaatttcgatagacatattatagtcaaacatggcgggcttgatgttggccagcgtatgaccgtacagcacaccggccattccggcgaagaaagccgccagcacgaacaccatcagcttgtaatacgtcacgttgacaccgttggactccgctgcgatacggttatcccggatggccatgatggcccggccatggcgggagttcttcagattcatcatcaccagcaccaccagaaaaatcagcacgatggcaaagggcagcagtgtccgggtatcggcgtagatatcgctggtatccaaccccttggcgccgccggtaacggagaggttattgatgatggtcttgatgatctcgccgcaggccagcgtcacaatggccagatagtcgcccttgagccgcagggcaggcaggcccaccagcaggcccactaccgccgccgccacgccgcccagcagcatggacagaggcatccgcactccgatggggacgctctgcgccagctgaatggagagcaggcagccggtgaacaagcccacggacatgaagcccgcatggcccagcgacagctcacccagcaggcccaccaccagattcagggacaccgccatgacgatgtagcaggccatggagatgagcatattggagatctgccggctggcagttccggagtaaatgagggcagcggagccgccgcagagcagggcggtgatgagcagtgtcacggcgttgccgctgaggcgccgtgcgccggaggtcatattctttcccatagcttacaccttctcactgatacgcttgcccagcaggccggtaggcttcaccaccagcaccgccaccagcacgccgaacacaatggcgtcggcccacagggtggaaatatacgtcttggagagctgctcgataacgcccagcagcacaccgcccaacatagcgccgggaatagacccgatgccgccaaacacggctgcggtaaaggccttgatgccgggcatggcgccggtggtgggccggatgtaggtgtaggccgctccgtagaagatggcggccacgcccgccagcgccgagccgatggcaaaggtgacggtgatggtgcggttgacgctgatgcccatcagctccgctgcctccttatcctccgacaccgcccgcatggccttgcccatccgggtacggttgataaacagggacaaccccaccatgatgatggccgtcaccgccatggtggcgatggtaatgccgtcgatgtacatgccgcccagctccacgctggggatggtgaacagcaccggaaaggccttctgctccgagccgtagatcagcagcgccagattctgcagcagatagctgacaccgatggcggtgatcaggactgccagaggcggggcctgccgcaggggccggtaggccagaaattcaacggtgatgcccagcagggcgcagacggcgatgctgatgaggatagccaccagcggcggcatccccagcgtcagcacggaggtgacaacggcataggctcccaccatgatgatatcgccgtgggcgaagttcagcatcttggcgatgccgtagaccatggtatagcccagagccatcagcgcatagatgctgccgaggctcagaccgctgataagggtctcgatcaatcgggtcataaatcagtttcctctctttcttccagatatccctccctgtccggagggcgggccgggcggcacaatactgccgtgccggagatacaccggcaggcactgttctgccgttcggtagactgggtgctctccggggccgaagccccggagaacacccggtcacttagccaagcaggctggtggtgccgtcggcggcgaacaccatggccttggcgttcttggcgggttcacgggtggcgtcccactgcatggtgccggtgaggccgtccacggtgatggtgtacatggcgtccaccatggcggaggtgaagtcggcatcagcaggggtcttgccgcaggcctccatggccgccttcacggcgtacacggcgtcgtaggcgtcggcggcgaactgatcaggagcggagccgtggagcttggtgaacttgtccacgaaggtctgggtcttggtgtcgggagcgtccacggcgaagggggtcagcatcataacaccctccagcatagtcatgtcggagaccttggtctgcaggccgtccagaccgtcgcagccaaagaccttgatgccgtccagcttaccctgagcctgggtcaggaacacggaggcctcagcggcatagatgggcaggaacaccaaatcgcagccggaatcacggatggcgttgatctgggtggagaaatccgtcttggtaccctcagtgaaggcctgctgggtgacgatggtcagaccccgctgggccgcctgagcagtgaaggtctccaccagaccggcggagtagtcgatatcggactgatagaacacggcgatcttgctgcccagcttgttgtcagcgatatagtcggcagaggcagtaccctgtgccgggtcgttgaagcagacacggaaggccttgtcgttgccctgaatgcacttctcggcagaggaggtacaggtgacgacgagtacgttgtcgttcttggcagcggtgatgacggactgggcctcaccggacagcacgcagcccagagagacgtccatctcatcgtccatcagcttaccaaaggcagagatggcggagtcgggatcgccctgagagtcctcggtctgcagcttgagctgccagccgttgacgccgccggcggcgttgatctcctccacagccacctgagcgccgtcacgggtggaggtaccgtagtgggcatagtcaccggtcatggggccgatgaggcccagcagcagagtctggtcgcttccgccgccgttgctgtcatcgccgcccttgccgccgcatccggccagcaggcccagcagcatggccagcgtcaataccatacatacaagtttcattccctttttcatgtttctttcctcgattcttgtgggttttattttcagccggtgggcttaaaaatacaaaagaaaaacggccttgctcttgcagcaaagccgtcagccaagtctctgtcccggactattctgccggaaaccactcgacgctgcgccttactgcgggatgcgggataattcgtaccagtacgatcagaaccagcagaaccgccagagccaccagtacccccagcagaatggacagcaaaatggacaccgccagaatggcagtgtccagagcaaacagataagaagcggtgcaggaggcagaccgagtggccggtgcgcagcacgcatcggcagcatgagtacggttacaggcggaagtgtacttcatggtgtctgtctcctttccaaaggctggcccacacgggcgggccgcttgatgttgcatagtttaccggttttatatgcaaaagtcaatggggggtatgtcgaatttaccgccccgcagcccggcattttatacagttttcacaaacttgcaggaaacttttatgaaatagagtttcttttcaagaaaatatcattccaatgaccgcatacaacccatgcgatacccacgtaaaaagcgcccctctccatcgggaggggcgctttcgttccgctgtttataggggaatattttacttgctcaccgtgtaccaagtgtcgctgccgtcaacagtggaagtcgtggtgcagccattacccagagtgatcttgccggttttggcattgaccgggtctaccgttgtcacgccgggattatagtttttgaagctgccgccgtttaccgtaatggtgcagccggcggtagcattatcctggtggttcagcacataatacgtcccattgctgggggtggccgtctcgaacttaccgccgttgatggtcaccgtagccttgcttccactgctcatgctggtgtagacgaagatacaggaggtcccctcgctggtgccatagaaatggccgccgttgatggtcagcctgccatagttgcccgcacgaaccgcagaggtcaccttgttggtgtaggtcttatccgagccgtataccgcgccggtctggccctcgctgctgtcattgatagtcaggttgcccttcttgccgccgacataaaacacgctgccgttattaggctttacgcccgccgcatactccagccggatggagtggccgttcagatccacggtcactgtcttacgggacagatagatctcgtcggtgaccacgatatcattcaccagcttgaagtagcccttggcattttccatcttcaacgcctgctcaccggtagccaccagataggggttcgccttggtgccattgccgccgttgaaaacactgctggaggtcaccacagtgaagggggagaaatcatcggtgctgaaggtcagcaggccggtggcagcatcgtaatagtaggtgtcgttggccgccttgaccgcctcggcgctctccgccttggtcagcggtgtctcggagtgatagaacccgatcacgttcagcttcttctccagctgcagggcgatggtaaagaacttgccgtccgctgccgtgaccttgttgccgttctgatcctccagacggacctcggtggtaacagcgtcggtgccggtgacgatctcaatgttggccggagtctgcccttctgtcttgaccagcgtcagctttccggcatcggtgctgcctgcgggaatggtagcgatcacagtggggtccttctcacggtcctggatcaccgtgtcgccgtcggtattcacatcgcccacagccaccacaggataggtggcgttggcatcgtaggtgttgttgaagctgtcgctctccacggtgttctgggtggccaccacggtgatggcgatgccgtcaatagactcgttcatgtagtcgttgccggcggactcctgcatatgacccttgatggtgaaggcagcgccctcttccccggccttcagctgcatctcggtcaggttgatatccgcatcattgatggtccagtcgatgacctcattcagcttggcgctgccgttgatgccggtgatggccaccttgtacttcagggccagattgcccttgttcaccacacgcagctccggcagcttgtaggtgcagcccggctcccacagaatggcttcgttttcagcgccagcggccttcttgaactccagctgcttgccctgtgcatcggcccagctggtgacattgcctttctcgtcccatgcagtggcgtactggagctgaacatccagattaccggcctgaatcttgttgacaccggtgcttgcggtgtcggtgaaccatgcgaaggtagcgcctaccagcatggccaggcacaggaccatggccacgacgctgcccagcaaggcccgtttggtgctcttgcggtttgtcataatatctgcctcctattttttgcgtgtgcgggtcttggccgttgggctttgtgggggatgcggggaatacggattgccgcgtcggggctgcgcccctcctcagaatgacgccttctttgacccctccctatcgtttcagagaaacgatagacgcccatgggcgtcccggcgcgcacttttacgcaggcatattaccacttatatggacgcaatgcaagtccctttttgtcaaaaactgtcattttttctggaattttctgcatcccattccccggtatggcaaaagggccttgctcctcgccgcaaggcccttatttttctgggaacttcgctgccattaccgcagctgcgccgtgaacacgatctcccccggctgagggcattgggcccggatgaagccgtggtgtccctcggcaatgctccgggcgatggagagccccacaccgaagctgccgtcggcggagcgggcctgatccgaccgatagaaccggtcaaagagcttctctgtctccccctcagccagcggcgcacaggcattgctgcaccgcaggacgacaccccgttttcccttctccagcacaaaccggatggccgtctccggcagggcatacttcacggcgttatccagcaggatagacaccagctgccgcacggcgtactcgtcgccgcagtaggtaagccccggcacgatagcaagctccagcggatggccctgagaccgggcaaaatcccggaaggactccgccgtctcctccaccgcctcgctgacggcgaagtccgacagcttcagcggcgattcctcctcgtccatgcgggagagcgtcaccgcggtcctgcggaagcagaaataagcctgacctcttctctcttccctcttttataaatagggcagggtccggctcccaagggaaccggaccctgtcctgttttttgacgcctcacctactcgccaaggctgcgggagaaccccccatcctcacaggatggagagctgtcccggatcctcgtcaccctctgggccagtccagatctctgggcagccccagaatgtagtcggcgctgacgtggtagtaccggcacagcttctccagcttctcgatgcccatctcgctggtaccgtcccgccagcgccggatctgcttggtactgacgccgatgaccttcgccagatcctgcaccttggtgtcgctgtcctcaataatggcgtcaatatttggatactgcttcatgtatgctctcctcgtggtctattgtctatgcttcatcggcgatttttgtcgaattatgtcgaaaattttacacgcaaaatggcacgttcgtcttgactttggacatatatgtcatttataatatgtaaagacatatatgtcccacatttatttgttcgttctgtcctcatcaccgtcattgtttgacattctccacgcaatatgactggaaatttcaggacagttgctctgtttcgacgttcttcatgagcgaaagatgctttaatagttctgcacccgccaagtgctccaagctatctccgggaggaaccccctatgaccgtaaaaaaactcttacagatcatcagcaccattctggtggcgctggtagtccttctggccgtggcgctggtcggcgtccgactggccggcatccgcaccttcaccgttctgtccggctccatggaacccacttaccatgtgggctccctcatctacgtaaaaaaagtagaccccaccaccatccggccggggcaggtcatcaccttcatgctggatgagaacaccgtggccacccaccgggtggtggaggtggtccccgacgaggacgatccctccactctgcgcttccgcaccaagggcgacgccaacgacgccgaggatggcagcctcgtccattataaaaacgtcatcggcaccccggtgttcaccatccccaagctgggctacgtggccaattacatccagcatccccccggcctgtacgtggccatctccgccggggccgtcctgctgctgctgaccttcctgccggacctgctctccggcggctccgacaaggggcagggcaagcacatccgtcaggacagtcaaaaggcatagatccgtcggtcctgccgcaaggctcaccatataatttgttatcattttatgcaggaggaaaaaccatgaaagcaaggaaccgcatcaaacccctgttgaccctgtgctgcgccctgctgctggtagccgccggtgtgttcggcacgctggcctacctcaccggcacagacacggtcaacaacaccttcaccgtcggcaacgtgaagatcacgctggacgaggccaaggtgaccaccgacggcacgcctgtggagggcgctgaccgtgtgaaggccaacgagtaccatctgctccccggccacacctacaccaaggaccccaccgtcaccgtcaagaccggcagcgacgcaagctacgtccgcatgaaggtcaccttcaacaacgccacggacatcatcgccctgtgtactgaccccgagtttgccgaggacggccccaccggcgtggagaacgcctatcccctgatccgcatggtgaagttcgtggaagccaatgcccccaagtgggacggcatcatccccgataacatggtggagacagaggagatgctggccgatgccaagtacttcgcctacgatgcaaaagccgacaccctgacctactatttctattacaacgagaccgttgccgcccccgacggtgatgtggtcctgcctgtcctgtttgacaaagtgaccctgcccgagtgggtcaccaacgaccagctggccactctggagaatttccagatcaccgtggtggccgaggccattcaggccgacggcttcgccaatgcgggcgccgcttgggccgccttcaacggctgatttccccccccggtttcgacggcacatgggctgcgccccacgccgcagaaatagatgttatagtttgtaagaaaggaagaatcaagtatgaagaaaaaaactctggcactggttctggctctgaccctgttggtggccggtgtcgtcggcggcacgctggcttggctgaccgatcagaccgccgaggtgaagaacaccttcaccgtgggcgatatcaacatcggcctcaccgagaccaccacagactacaagatggttcccggcaacaccatcgccaaggaccccaccgtcaccgtcaaggccaattccgaggcctgctggctgttcgtgaaggtcacggagtccgagaatctggacaccttcatcacctatgccatcgcagagggttggacggagctgcaagacggcgtttactatcgtgaggttcccgcctccaacgctgaccagaccttctccgtgctgaaaggtgatgccgtcactgtgaacagcgatgttaccaaggaaatgctcacggctaaggatttcgccaatcccaccctgacctttaaggcctacgccgtgcagaaggacaatgttgcctctgcctccgatgcttgggccaaggtcaacccctaaccaagtgatcccttgcacattctgatacccaaaaaatcaaacaaaaaggagagcaattacatgaaaaagaagatcactgccctgttcctgtgcgtggcgctggccgccatcgccatcgtcggtgcctctctggcctacttctccgacaccgacaacaagaccaacacattcaccgtcggcggcgtaaaaatcgacctgatcgagcagcagagtaatgaggaccataccggctttgttccttatacgggagataaggttctcatgcccatcgtcggctccgctcagggagaaaaataccccaacggccagcccaaggctgcgaactacatcgacaaggtcgtaacgattcagaataccggcaagtctgccgcttggattcgtgcttactatgcggttccctccgatctggatgacggctatgagaccttcaacgccggtgcgaacatcctgcacggcaacttcggcaacaagatcgttgacggcactgtctacaccaccttcggtgcggagtggaactggatgcatgacggcaagtggaactacttcgagaccaccatggacggcgtcaactacaacgtctacttcgctgactactaccagcctgttgcggccaatgagaccaccgagcagctcatttgcggcgtgtatctggacaagaacgtggatatgaaggacggcaagtacatcgatacgcgttaccccaacgccgacctctctatcctggaaggcacggtcaagtatcccgtatttgcggttgctgtgcaggctgacggctttgacactgccgcagctgctatggatgccgccttcggcgccaactacaatccttggggcggcgatgccaccaactggcagtaattcccccccaacaggaagcagatcggcttccctgactctactatctcctccctatttttttgcggcacgggtcctgtgacccgaccaaccccgacacgcctgttaccagcgggtcgtgtcgggtggcagagagcccccctgtaggctccctgccgccccggtgaacctgttaccagcgggaacaccggcggccatggcctcttagaggcccggccaaaccagtgcagctgttaccgcagctgcaccggtttgaccgttgcggtcacccaccttctctgtcctccctatggaggctgaccatagacaggaaaggagcaaccacatgaaacgaaagctgttattactgtcggtgctggccatctgcgtggccacgctggcagccggaacgctggcgtatttcagcgccaacggaacggcacgcaatgtcatcaccaccggcaatgtctccattgctgtggaggagtgggcggatgcggataagacccagcccttcgaggatctgacgggcatcatgcccggcaccaccgtcaccaaaattgccgaggtccgcaacaccggcgaggccgatgcatggatccgtgtacgcctcaccggcgacatccgcctcaccggtgacggcacgccggacccttcgctgataaagcctgacctcaacaccaccgactggacgctggccgccgacggctacctctactgcaacaaagccatccgccccggcgagaccaccgcccctctgtttacctgcgtcacctttgacgccggtatgggcaacgagtatcaggatgccaccgccacagtccatgtggccgccgaggctgtccagactgccaacaacggcgtcaccgctctggaggcgctgggctggccaacgcagggttaaggaggtgcggcacatgaaaaaaatgcggcatatgaagagaaaagcccttgtggcgctggtgctgtctgtcaccatgctgctgaccctgatgcccggtctggtctttggtgtctccgacgatcagggtgacccggacaccgtcagctcctccatcgactaccccaccgtgaatttcaccgacgtggcccccttcctgcccccggtcagcggtgccgccccccggcgctccccggcccgtgccgccggtgataccgatcccagcagcgataacggcaataacggcatggtggtcaacaagacctccgtttataacgaggagaccggcgcctatgacattacgctggaggcctacgccaccggcagcaaggtcatcagcaccgtcaccagcgacatccccacggacatcgttttggtcctggatcagtccggctctatgggggataacttctccaccacaacggcggactcctgggtctcctacggcaagcgtaccaacgacgcaaactataataaccgcatggacagcagtaacaacaagaagaaccgcaacctttactacaagctgtccgacggcggttatgcagaggttcttatggaccgctccgaagccggaaccgtcaaaaagtacacggagtatagcggaaacaactacagctgtaatcacagcagcgataccctctatacagaagtaaacggtcagtatgtaaaagtatctgtttccagcgaatatgattacacttccgcagtgtatatctatacctacacttataccgcccccgacagctcaccggtcacggaaacaagccgtggtccgttcggcgatccccccttccccatctacaaggaggaaaccgtcaccgagtatgcatatacctattcctacaccgtcaacgggacccgcacggacatcggcacctccaccggagcggacacggtatttgaaaccgagttctatcagaagattccctccggcaccaaaatcacccgtctggaagccctgaaaaatgccgccgccacctttgcaaattccgtggaggagaaggccaagggcgctgacggtgtcctcggcaccgaggacgacatctcccaccgcatcgccgtggtgggcttcgccagcaagtccggctacggcgacaatacggagctgctgtccatcgccggaagcaacagcggcaacgtgggcgtggcctatcacaacatcaccgaccagaacctcaaggacgttcttcaggaagtggacacctccgccggtcagactatggtctccaccgccattgatgctctggccgccagcggcgccacccggacggatctgggtctggacatggcccagcgcatcctctccgccaaccccgtgcaggctagtgagaagcgcaaccgtgtggtcatcgtctttacggacggtgcccccaccagcttcaacggctttgagaaggatgtcgccgacaacgccatcacctatgccggcaccatcaagaccaccggagccaccgtctacaccatcggcatcttcgccggagccaacgccaccagtgccggcaccgagcccaaaggcgaccttgatcaggacagcagctccctgaacagcgcctgcaactggttcatgcagcaggtgtcctccaacaacggcacgccccgtactcccagctactacctgtctgcggcggacaccggttccctcagcaacatcttccagcagatctccgacaacatcgagagcggcggctcctcctccaccctgacggaggaatccgtggtccgggatatcatctccccccagttcacccttcctgccggagccaccgcctctgatatcacgctggagacctacgcctgcaccggcaaggacggcgacacctacacatggagcaaaaatgccgacgccatggacgccactgccgcgatagacggcaataacgtcagcgtcacaggctttaacttctccgagaactacgtgggtaccgtcaccaataacggcagcgtcacctaccggggccataagctggtcatccgcttcagcgtcaagcctcagcccggctttctgggcggcaacaatgtccccaccaacgccggggccggcgtctatgaaaacaaagactccgagacccctgtccgggagttcccccagcccacggtaaacgtccccatccagcccgtcaccgttgcagcgcaggactataacgtctatctgctgggtggtctcaccgccagccagctgcaaagcggctccaccgtgcaggtgggcagcatctctctggatctgaccaaggccaccgactccgatcacccctacggcttggagccgtggcagaccgcctacgtggatatcaccgtctccctcacaggcccggacggcagccccgtcaccgacctggcccagctgcgggcggacacttcctacaccgtctccgtcacggtatcccccaaaacggagccgcaggcggattccagcggcacaccggccaccaaacagagcggcagcgctaccggcaaggtcaacgtctttaagccgacgctcacctacgaggacggcaccgtctactacggcgacaccttcgatagggccacgctgcccggttaccgcacctccaccagttggttccacaatggcaccgacgctgccaccgtaaccatgaccggcactgccccggcgctgacctacggctacacctacgacaccacccttctgacggacatcgtgaacaccaagcaggacatccccgtgaaggccaccatctccatcggtgagaccgatatcaccggcgacaccaccttcctgcacacggactgcgccggagagacctggagccacaccagcggcgaccccgccttcctgctccacgtcaggacctgcgccctgaccgtcaccaagaccggcggcgctgacggtgagccctatgtgttcaacgtctaccgtaacggcaacccctacacccaggtcacggtggtgggcagcagcagtgtctccatctatgagcttccggtgggcaaatacaccattgaggaggacaccggctggagctggcgctatgacgccgcctacgaccccgataagccggacggctgcaccctcaccgccggccacaatagcggcagcatcacctgcaccaacaccctgaagaatgaccgctggctcaacggcttcagtgatgtcatcgccaacatcttcggaatccgacactgagaaaggaggaactgtttgtggcacgcagaaaatatccttcgccccggaagccgggagcgctgcttctgacgctggttctgctggcgctggccctcaccggcgccacgctggcgtatctcatcacccatacggaccccgtccccaaccggttcactcccgcccatgtgtcctgcaacgtcacggaggactttgacggcacgaccaagaagaacgtcaacgtcaccaacaccggtgacattgacgcctacctccgggtgaagctggtgacctaccgggtcaatgacgacggccaacacatcggcggcacggcagccatccccgccttcacccccggcgacggctgggtaaagtatggcgactattactactacacctaccccgtggcccccggtcagcagcccgaaaccccgctcattgatagcctgaccctcaccggcagctacagcgatgccgacggcggcaagcaggcgctggagatcatggcggaggctatccagagcgccccggcagacgccttgggtgaggcttggggcgtcaccatcacaccgggccacgtggcccagtatcagtaaggagggaacggcatgaaacgaaaaaccatctgttctctggcactgacgctgctgatgctcctgtcctgtctctgcgccgcctacgccgataccggctccgtcacctatgacggcgacgctcagagcttcgtgttccttcccggcagtgactactctcctaccgatttgttcccggactttaagggcgtcatgcccggcgaccggcttacacagaccctgcgcctgcgaaacgacagcgaccatcgggtgcggctgtacctgcgctctctgggatccgagtccggttccgaggaatttctctctcagatgaccctgacggtgcaggctcccacctccacccttttcgatgcgcccgcccacgagacggcacagctgacggattggacggagctgggaaccatcgcccccagcggcgatctggagctcaccgtgaccctgaacgtccccctgaccatgggcaacgacttccagtccgacattggctatctggactggcagttcaaggcccaggagctggaggaccccacgccccccaccggcgacgtctacgctccccccctgtggccgctgatggccacgctctccatgggcggcatcgccttcctcctgagccgcagaaagcaccgggaggagccgtaattttccgcatgaaaagagactgccgaaccccttcggcagtctctttttctgtctatctccccgtcaagggcatggggaagtccagccatggggcctccttgggcggcagtttggaaaaccgcatggccgccccggtctgtggatgggcgaactccagccgccacgaccacagggcgatgctttccccttcctctcccccgccgtatttccggtcccccaccagtggaaacccacgggaggcaaactgcacccgaatttgatgggtccgcccggtgtgcagccggatacgcaccagcgacagcccctcccggctccccagcacctcataggacagctccgccgggcgcacgtccttccccggctccgccgccacataggtgcgccgccggacgggatcccgccccagcaggtccgtcatcacgcccccctccggcacgccgtggaccaccgccagatactccttgccgaaggtgcggctgcgaatctgctccgacagcagggacgccgccttggccgaccgggcgtagaccatcagcccgctgacggcagcgtccagccggtgtaccgtgcggatgcagggggtccccagttcctgccgcagcagctggggcatcccgccgggctcgtcggtgctcagcaccccggcaggcttcaccgccaccacgatgcgtgggtctgcgtaaacgatctccatggggcatctctcccttaccattcatcttctatcctctatcctaccacatcccgtctccgcttgcaagaaagtcctttccatctgccgccaggcgtgctataatggcaccaaaccatcagaatacaggaggggattgccgtgaaaaagaccgttttgaggaaatatgcccagctgatcgccgcctccggcgtcaatgtgcagccgggtcaggaggtattcatcgccgccgatctggatcagccggagtttgtgaagatgctggtggaggaatgctataagcgcaaggccaagaaggtggtggtggactggagctatcagcccctgcaaaagctccactaccgctatcggaccctgaccaccctctccaagcttgataactacgaggaggcccgctggcagcactatgtggataccatcccctgccgcatctacctgctcagcgaggaccccgacggcctgaagggcatcaatcaggagaagatggccaagagtcagcagcggctgtaccccgtcatcaagaaataccgggatcagatcgagaataagtaccagtggtgcatcgccgccgtccccggcgccgcatgggctaaaaagctgttcccggagctgcggaccagtcaggccattgagaagctgtgggaggccatcctctccaccagccgggtggacgaggaccccgtggcggcgtgggaggcccacaacaaggacctccacgaccggtgccagtacctcagcggtctgggcatccgggagctgcgctacaagagcgccaacggcacggacttcaccgtgggcatgatcccggaggcgcagttctgcggcggcggcgagaccagcctgcagggcatcttcttcaatcccaatatccccacggaggagtgcttcatctcccccatgaagggtgtggccgagggcattgtctacgccaccaagcccctgagctatcagggtcagctcatcgacggcttctggatccgcttccacgagggtaaggcggtggagtggcacgccgaggtcaacaacgacctgctgaccaagctcatcaccatggacgagggcagctgctatctgggcgagtgcgctctggtcccctttgactcccccatcaatcaaacgggcctgctgttttataacaccctctttgatgaaaacgcctgctgccatctggcgctgggcatgggctttgccgataccatccgggacttccagaacaagacgctggaggagtgccgggcgctgggcgtcaacgactccatgatccacgaggacttcatgatcggctcggcggacctctccatcgacgccgtgtgcgacggcggcaaggtggtccccatcttccgcaatggtacatgggctttttgaccgccggccctttcacaaagactgtactctgttttcgtaaatcattgcaaatctgagttgggaagctaaggcctctgaaaaatatagccatcagaatcctcatcgggatcgtcatggtgattctttggagcatcgcttttaccaacgtattgagcgcagagccggaatagggatcgggctgtgcttgggggtatcccttggcatatcccttggctccattttcgaaaagaaggatcaggagaaagaaaatggatgatgcgttcatccaatcattgcagataacccaagggagggaggagcgctgctcctccctcccttgggtttgcttttcgttttttatgctgctttttctcttccacgaaattttttctccgaacggaggattttccaccgcagaaaaaaaccctccgtgggaaaatggctcaccggcgggacaaatttttctatgtggaacaagtcccggtttgggagacggcggcgtgtcccatgggacaaaaacggtattccttcggacgtcaggtcccggtccgatatggggcgagtggacgtccaaaaaatgtccaatctctcagcgctgatactcaaattccagatcgtacatggagacaatatccccgtcctggatccccatctgctccagttgatcgaacaggcccgactggcgcagaaccttatcgaagtacatccggctctcatagtcggaaaaattgatgttgcccatgagccgctggagccacggcccctccaccagccaggtgtggtcgtcccggtggatatccagcggggcggtggtatccacctccggcgggcggggtacatactccggctcatagaccgtcaccggcggcagctctgccaagcggcgggcgatagcctgcaccagctcacgggtcccctgatgggtggcggcggacatggccatgaactcatagcccgcctcctccacatggcagcggaaggcttccagctgctcagggtccgccaacagatccgttttgttggccaccacgatctggggccgctgagccagctccgggctatactgcttcagctcggcattgatggcgtcaaagtccgctatggggtcccggccctcgctgccggagacatccaccagatgcaccagcaggcggcagcggtcaatgtgccgcaggaagtcatggcccagcccggccccctcgctggccccctcgatgatgccggggatatccgccataacgaaggacacgccctcatccacatacaccacgcccagattggggtaaagggtggtgaagtagtagttggcgatcttgggatgggccttgctgaccacactcagaagggtgcttttgcccacgttgggaaagcccaccagacccacgtccgccagcagcttcagctccagcaccacgtcgtggctctcgccgggaaggcccgccttagcgaagcgaggcacctgccgggtgggggtggcgaagtgctggttgccccagccgccccggccgcccttacagaggacgaagggctcgctgtcggacatatccttgatgatctcgccggtctcggcgtcccggatgagagtccctctggggacccggatggtgagactctctccgtccttgccgcttttgcggccgccctgcccatctacgccgggagaagccacatatttgcgcttgtagcggaagtccatcagcgtggacatattgtcatccacctgcacgatgatgctgccgccgtcgccgccgtcgccgccgtcggggccaccggcggccacgtatttctcccggtggaaggccacggctccgttgccgccgttgccggcccggacggtgatgcgggctttatcgatgaatccatttgccataatgctacctcgtttatctgaaaatgtgtattctactccagtatgtcctattttagcggaaaaacgccccaccgtcaagggcggggcgcaggagaaaacaggtgcggcctgcggggaaaactcttgcagatacacggaaaaggaggacaggcgtttgcctgtcctcctgattcctgttttatcacgctcatgccaagggcgttactccagcgcgtcacggctctcgaacacatcacggatagagccgctgcggtcgatctccggctcaggctggggctgcttgctcatttgcagctcctgccacttggccttgtcgatgagcagctggcggggcttggagccctcgaaggggccgacaatgccccgttcctccatctgatccaccagacgggcggcacgggaatagcccagcttcaggcggcgctggagcatggagacggaggcctgtcccgtttccagaaccacctccacggcggcgggcaacagctcatcgccgtcctcctgcgcctcggcaggttcggcagaggtctttcctccgccgcccttttccttctccttcaccgcctgctcgatcttgtccatgacctcacgggagtactccgcctcgccggtggtcttgacgaagcccaccacccgctcgatctcctccggagtgatgaagcagccctgcacacgggtgggctttccggcccccagaggggcatagagcatatcgcccttgcccaccagcttttctgcgccggtggtatccagaatgatgcgggactccagtgaggaggccacagcgaaggcgatgcggctggggatattggccttcatcaggccggtgatgacgtcggaggagggacgctgggtggcgatgaccagatgcatcccggcggcacggcccatctgggccacccggcagatggattcctccacctccttagcggccaccagcatcaggtctgccaactcgtcgatgaccaccaccaccgtgggcagggtcttgagctcctcatcctgccgggccagcgcattatagcccgccagatccttgaccccgtgctcggagaaaagcttatagcgcttcatcatctcgaacaccgcccattgcagggttccggcggcctttttggggtccgtcaccacggggatcagcaggtgggggatgccgttgtagggggccagctccaccattttggggtccaccatgatgaagcggacctcctccggcgtggacttatagaggatgctgacgatgagggaattggtacacacggacttaccggagccggtggtaccggcgatgagcacatgaggaagcttgccgatatcccccacgatgcagctgccgccgatgtccttgcccacggcgaaggccaccggggacttatgctccgtgaaggtgcgggactccaccacgtcccggatgcggacgggggtgacggcccggttagggacctcgatgcccaccacggaaattttattggggatgggggcgatgcgaacgccgctggcgcccagtgccaacgcaatgtcatcggcgaggttggtgatcttggacagcttcaccccctgctccagcgtgaactcatagcgggtgacgctggggccgtggaccacggcgccggggcgggcgtccacaccgaagctctgaagggtctgtgccaagcgctgggagttgctccgcagctcagcccccacctccgtatagttgtcggcggtattctcatccagaagcgtgatggggggatactggtacgcctcctccggctgggccagctcctgctccaccgcagcggccacctcctcggtggcgtcctgcacctcctgcgccgtgacggaaggcttggccgcttcacggggcttagtcacaggggcaggggcagcagacgctgccggtggggacgtaacgggagcggcgggggccacgggggcggcttcctccgcaggctccccccgcagcacctgatccggggtgcggacggcgctgctcttgcgggagaagaagggtttcttctccttaggggcaaaggtgggttcctccggctggggctgcggctgtttggcgggaggctcgtcgtccagggggatatcgatggcggcacggcggcggggccgcttctccgccggtttctccttctcacggacggggggtgtttcctccgggatgtcctcccgctccgcctcccggcgctcctgcgctcggcgaacggcatccttgggggagatgtgcagcgccagacacagggccgccagcagcatgaggaggaacaggatcagagacagcaccttgccgaatacggcggagaagcccacggccaaaccgccggacagggcgccgccgctttgcagggaccggccggagagccacagctcccgcaggccggtgaggcccggctcataggagcgggcgcacagcagcagatgcaggccgcagccggtgagcaccggcaccagcagcgtacatacggagcgcagggtggcgggacagtcccggtgggtcagcagcaggaggcccgtcagcagcagggccggggccgacagccagtagccgtagcccagcagccccttcagcaggccgccgaagaaggtgatgaacagggcctcctcctgaaaataggacacgacggcgcacagggccagcagcaggcagacaccgccggcgatctcccggccgtaggtaggggcaggagggggcggcgtgcgggtattcttttttgcgggttgcgaggttttcttctttttgggtgcagcagccatgcggacttcctttcgtgcaagagaacgggtgttacttgacggcgttcagaatgagggtagccagaccggcggcccagcaatagtaggcgaaggcaccgaagcggcccttgtcagcgatcatcttcagcaggcggatgcacaggtagccggagacggcagccaccaccacgcccgccagatacaccggcagttggctccagtccacgccgccggtgagggcatccttcagactgaggatgttggcacccagcacggcggggatggacagcaggaaggagaagcgcacggcaaacctccgctcgaagcccacgaagcagccggtggtgatggtcatgccggagcgggagatgccggggaccgtggcgatggcctgactgacgcccaccaccaacacatccagcaccgtggcgctgcgggcatccttgcggcccttgcgggcccggtcgctgaaaaacagcaggaagccggtgacgatcagggcggcgccgatgaataccatactgctcttcaggccctccaccgtgtccttgatgggcaggatggcaaacaggggcagcgtacccaaaatgatcagcaggatcaggcggcgggccgggggtaccggcgtaggggtgctgtggtggaccagatcaccgatgccgcagaaaaattcccgcaccatgtcacagatgtcctgccaataggccacgaacaccgccaccagcgtacccagatgcagcagtacgtcgtagaaggcggggacctcggcgttgatgttcagcagattctgggcgatggccagatggccagagctggagatgggcagaaattccgccacgccctggatcaagcccagaagaatagattgcagaaaggtcataggttttctccttatttgaagttctatcagggggtatggccccgtattgttggaaggggtacgttttatcataccacaggcggacaaaaaataccaccccttttcctcgacaatctgcgggatggccgcaggagccattcttatcaaaggaaagaaggcccaccggatggcgggccttcttcaccgtgtgcggtacacggggtcagaatgtgacggactgaagctctttcaggcacttctgacacacgttcttcccccgaaactccgatacgccccggctgctgttgcagaaaatgcagttgggccggaattttcgcaggacaatggatgcgccgtccacatagatctccagcggatcacgctcggaaatatccagcgtgcgccgcagctctacgggcaggacgatgcgtcccaactcatccactcttctgacgataccggttgctttcacagtgatctccccttctttgcccctcaattttagcgtctacgtgggattcgtttatattatgccgtaaatttgcatatttgtcaaccaaatgataaaatctgtctggatagatgtaataaaatatgtcggtgcggcgtatacatccatgaggtgacaaggatggcgatggcgtggatctggacgggaatggctgtggtcagcgtggtgtgcggcgccgtatacgggcgcatggaggccgtcagtgcggcggcgctggagggggccgggcaggcggttcggctgtgcctctccatggcgggggtgctgtgcctgtggacggggcttatggaggtcatggatcggtgcggactgtcccggcggctgggacggctgttccgtccggtgctgcggcggctgctgccccaggccagccgggatccggagacgctggcagcggtgacggccaatgtgtcggccaatctgctggggctgggcaacgccgccacgcccatgggtatccgggcggcctgccgtatggcacgggggacggagggcgtggccagcgacgagttgtgtcggctggtggtgctgaacaccgcttccatccagctgctgcccaccacggtggccagcatccgggccgtctgcggcagcgctgcgccgctggatatcctgccggcggtgtgggtcagctccctgctgtcggtaacggcggggctggcggcggcgaagctgctggagcggctgggaaggcggcggacatgacggactgggtgatcccctgtctgctggcgggggtggcggcggcagccatagggcggaggaccgatgtctacggcgccctcaccgacggggcggcggaggggctgcgggtgctggggcgcatcctgccggcgctggtggtgctgctgtcggcggtgcagatgttccgggcctccggagccatggagctgctgacggggctgctgtcaccggtgctggaagggctgggcatcccgccggagacggcggtgctgctgttggtgcggcccgtcagcggctccggggcgctggcggtgggcagccagctgatggagcagtacgggccggactcctatatcgggcgggtgacggcggtgatgctgggatgctcggagacgacgttttacaccgtggcggtctactacggcgctgcgggcatccgccgcacccgccacaccgtccccgcggcgctggcggcggatgcggcggccttcattgccgccgcatgggcggtgcgggtgttctttccgtaaggccggctctcccggtggtggggcagaaaaaaggaggctggggactcgtagtccccagcctccttttgtatctcgatcgtttttcagggcttatctgccgatgggcagttagcggtgcagcgcttccacaggccacgcagcagcagatcctcgtcgtagacggcctcccggcggcaccggggcgccacgaagcggcccaagccaccggtgaacaccagtgtgcagggacagcccagctcctgctccatgcgttgggccagaccctccgtcatggcggcagccctatatagggcgccgctgaggagactctcctccgtccagccgcagatcacccgatccggaatccgcaggcggatatccggcagctgggccgtaccagagagcagtgcctccagccccagccgtacagggcggcgcccagcacgatgagaatcagaaccagtgagatggaaaaggggccgagacgaatggcactgcccgcaaactggagcaccacaacgatggcggcaaggagtccgcctcctgcgagatactgcgtcgttttttcatatgactttcctctgctgccgctccgccggagcggatgcggcgcatttctttttgatttttataggttgggtcagcgggtcactgggccgctgcggggaaggtgatccggatgacagtcccctcaccgggcttgctggtgaggcggatgtcgccgtggtgatactgcacggcgtgcttcacgatggagaggcccagccccgtgccgccggaggccttggagtggctcttatccacccggtagaaccgctcgaacacccggctctggtgctccggggcgatgccgatgccggtatccgacaccgtgacggaggaggtgccgttctccgaggacacctgcacctttacggcgccgtcggggacgttatacttgatggcgttgtcgcagaggttgaagatcacctcatacagcagccgccgcacgccgatgaccggggcgtggccgccgtccaccgacagggacacccgctgcttggcggcggcatcctgcaggttggtcacggcctcctgactcagggccagcaggtccaccgtctccgtgggcatggcatccccctcgtccagctgggacaggcggatgatatcctccaccagcgtcaccatccgggaggcctcgtcgtggatatggcccacgaagcggggcatatcctccggcttcaccatgccgctctggatcagctcggcgctgcccacgatgccctgcagaggggtcttcagttcgtgggagacgttggcggtgaactcccggcggttgcgctcggcgtactcctgctctgtcacgtcgaaggccagcagcactgtacccaccatctcgccgccggattggatgcggctcatatccagctggtactcccggccattgcgctggcagcgcagctggctgtggcccttctcccgggctgtctccatcgcaaggcacaactcatggctgcggtccaccgtcaggaagtcacggcccacacagccctcgtccgcctgaaagagcttacaggcggcgtggttgatgctgagcaccgtccccttctcgtccagcaacaccagcccttcctgcatactgccggtgatctgggtgaactcgtcggtcttttgccgcagggtcctcagttgggcgtcgatctccttgtgctggtagttgatgcggctcagaagaggagccaactcctcgtaggcgtcgttttccagcggatgctccaagtccagccggttcaagggatccacgatgcggcgggacaggcggccggccatgagcccggcgaagatcaacgccgccaccagcaccaccagcatgggctggagcattcccagcgccagcatcccggcggtggcacggctgacggagatacgcagcaccgtgccgtccgtcaggcggcgagccacgtacagggtctgctgcaaaagggtatcagagtagcggctactttcgccgctgccgttttccagggcctcctgcacctcctgacggccggcgtggttctccatggaggccacgtccgtcacctgcgtatcgtacagcacccggccgtcggaggcgatccacgtcaggcggaaccgctccgccggaaggcgctccagataggccgtaccgccgttttccacgccgctgacggcgaggctcaattcatcctgtaattgctgctcctgcacaccgccgaagtagctgtacaggcagccggtcatgatgaccatgcccgccgccagcactacacccgccaccagcagaatggaacggaaaatctttcttgtcatgcgcctacctccagccggtatcccacattccgcacggtctggatcatgctgccgcagctgcccagcttctggcgcagggtgcggatgtgcatatccaccgtccgggtctcgccgcagtaatccatgccccagatctcgttgaacagctggtcccgtgtgaaggccatgcccggatgggacagaaacagccgcagcagctcaaactccttataggtcagcgtcactcgctgaccctccaccgtgacgatgcgctcctccgggtgcagtacgatgcccccggcccgcagcaccggctcctgctccgtccggcagcgccgcagcaccgccttgacgcaggacaccagctccatgacgccgaagggcttggccagataatagtccgcccccagatccagcccctgtatcttgtcgtactctgcgcccttggcggtggccatcactaccgggatgcggcgcagggccgccgaggcccgcatccggcgcagcagctccatgccgtccacgccgggcagcatcacatccagcaccaccagctccggctgctcctccctctggagggcctgccagaaggcggcaccgtcggcaaagccacaggcctcgaagccggtggaacgcagggcgtatacttcgatatcccggatactggcatcgtcctccacgcaccagatcatgctatccctccttgtgcgtaccggtgacggagaaaatcacccactgggcgacgttcaccgcatggtccccgatgcgctcaaaatatttggcaatcatcagcaggtccaccgcccgctccccctcaccggggtctgcggtcatgcggcggatcagcgtatgcttcaccctgtcgaaccagccatccacaatatcgtcctctgcgatgactttttccgccaacattgtatcatgtttcacgtaggcgtcaacactttccgtcaccatttttatggtggaggcggccatatcccgcagcagctcctccccctcgttgacctgaccgctgatgacgatctcggcaatatcctccgcctgatctccaatgcgctccagatctgtgatcattttcagggccgccgagatctgccgcagatcccgtgccaccggctgctgctgcaaaagcagcttcaggcacagggactcgatgtcccgctccttgcggtcgatctccgtgtccagcggggccacctgacgggccagtctgccgtctcccagcgatttagccgccagagcaatgctctcctcgcacagtgcgcccatttcaatgagctcccgctccagctgggccagctgttcatcaaaccggcttctcattatccgaacctccccgtgatgtagtcctctgtccgcttctccgccggggcggagaacacctgctccgtggcgccgtactccaccagctcacccagcaggaagaaggccgtgcggtcggagatacgcaccgcctgctgcatattgtgggtgacgatgacgatggtatagcgctccttcagttccatggtcagctcctcgatgcgggaggtggagatgggatccagtgcgctggtgggttcgtccatcagcagcaccgccggctccaccgccagcgcccgtgcgatacacaggcgctgctgctggccgccggagaggcccagcgcattcttcttcagccggtcctttacctcgtcccagatggcggcaccccgcagggagcgctccaccagctcgtccagcttggtcttgctgcggatgccgtgggtccgggggccgtaggcaatgttgtcatagatgctcatggggaagggattgggtttttgaaacaccatgccgatctcacggcgcaggcggcacacgtccgttcccggcgcatagatatcttccccccgatagcggacctcgccggtgatcttcacccccggcaccagatcgttcatgcggttcagggttttcagaaatgtggacttgccgcagccggaggggccgataaaggcggtgatgcttttctccgggatgtccatggagacgctgtgcagcgcctgatgagcgccgtaccacaggtccagatccttcacttgcaaaatagggtccattgtcgttcacttccttttcagcttccgcccgatgatcccggcggtgaggttgatgagcagggtcagcaccatgaggatggtggcgatggagaaggccagcgccgtctccccgccctcggtggcatagacgtacagagccaccgtcagggtggctgaggaggtgtgcagggagtcgaagagactcaccagtgccatgccgaagcctgccgtatacagcagggcggcgctctcccccacgatgcggccgatggccagaatacagccggtgacgatgccgtccaccgctcccggcagcaccaccgtgcggaccatgtgccatttgccggcacccagcgccagcgccccctcccggtaggactgggggacggtcttcaggctctcctgcgtggtgcggatgatggtgggcaggatcatcatcaccagcgtcaggccgccggccagaattcccgcctgaaggcccagcttctgcacgaacagcatcatgcccaccagtccgaagatgatggagggaataccggtcagggtctcggcggcgaattcgatgatgcggaccagccgcccgctggtggcatactccgtcaggtagatggcggcacccacgcccagcggcagcaccaccaccatggccacaagaatgatatacagcgtattcaataggttgggcaggatgcccacggtattgcggatatagctggtctggccggagatcagctgccagctgaggcccggcacgccacggtaaaagatatagccgatgagaaagatcagcagggcgcaggtcaatccggcgcacagccacaccagtccccgcatcccgccattatacagcttccggcgaagcgtccattgctgcttcatggttcagtcctccttcctgcgtttgatgcagacattcagcaggacgttgatgagcatgatgaacagaaacagcaccagcccgatggaaaacagtgcctgctgatacaggctccccacggcggcatcggacattccggagatgatgccggtggtgaggaagcgcaccgaggtgaaaagccccggcatattggccacgtttccggccaccatgatgatggccatagcctctccgatggcacggcctacgcccagcaccaccgccgccgccacgccgctgcgggcggcaggcaggctcacccggaagtaggtctccgtctccgtggcgcccagtgccagactggcctcctcatactccctcggcacggcctgaagggccgtctccgccacgttgatgatggagggcagcaccatgaccgtcagcaccagaatggccgccagcaggcaggccccggagccaagaccgaaggcacggcggatggcgggaaccagcacgatcatacccaccagaccgtacaccaccgacgggatgcctgccagcagctgcaccgccgtgcggatcaccgccgccagacggggcggggccgctttggccagaaagatggcggtcatcaggcccaccggcacccccagcagcagcgctcccgccgttccgtagacagaggtgaggatgaagggcaggatgccgaattgtgggccggtggtggcgttggtaggcgcccacaccttgccgaagaggaatttggtcagtccgatctcccggatagccggcagaccggagatcaccagatacacgctgatgcacagcacgaagcccaccgccacgatgccgcacagcaggaagatcaggtggatggcctgctccatggccctgcgggtgcggaggcttttgcctgctgtccgcttcatagagttctcctttcccgatgacggggaagccccctcatccgccgcagcaggtgagggtcccccgattcgtttttacttggcggtaggcacggcgcccgcattctggatgagggaggcggcgtccttggaggcggcgaagacgaagaaggcctgcgccgccggggacagggccgtgccgcccttggtcaccagcacgaagggccgctgaatggcgtagctgccgtccagcacagcggcctcggtgcaggccacaccgcctacggtgacggccttcacggtgtccttgccctccacagcggagagggaggcatagccgatggcgttggggttgccggccacggcctcgatgacgccgccggtagaggtcagctcctgatccagcttgcaggagtccttggtcccggtgatggactcgaagccgtcgcgggtaccgctgccggactcacggccgatgcaggagatggcgccggggtcgccgcccacctcactccaatcggtgatctcaccggtgaagatcttggcgatctgctccacggtcaggtccgtgaccttgctctgggcattgacaatgacggcgatgccgtccagtgcgatgaccgtctcggtcaggccgtcgctcttctcctcgtccttcaggctgcgggaggccagaccgatgtccgccgtgccgttcttcacggcctcgatgccggagccggagccggtgggatcataggtgacggtgacgttcttgtggtccgtcatgaactgctcccgcaaagcgccgatgaccttgtccatggaggtggagccgttggtggccacggaaccgctgagctcggtggtctgattattgttaggggtgttgttgtcgttggtgtggtccttgtttttgctgccgcagccggccagaagagccatgaccataacggcggccagcaggatactgatgatctttttcatatgaagatctcctttcgtttttcatgtttggacttgctttcttgctacagtccccatgataaaggggcggtgtaaagggcaaaagtctcctcgtgtaaagtccatgtaaaaaagcggccgagggggatcttcccggcaaaaagaaggagcgccggaaaaggcaaaggcttttccggcgctcctcccaacgaaaggacacctaatggtatatagtttatgatatctcaggcccggcgcacggcggggacggcatgacggggcagcagggtgatgcccttcttctccgccagctgccacagctgcggtaccagcaggctcagcaggatcagagcgatgccgcacattcccatgacgctgatgtgctcccgcagcacggcggcacccagcagggtggcgcaggcggggctcagagcgcagaacaggcctgcacgctgggcggtggtgtggctctgggccacaggctggagggtgaagccgaagccggtgcagatgacggcaaggccggcgatcatcagccactgggtaccggactggggcaggtggggtgcctcgaacacgaaggaggacaccagcgccagcaggcccagcgtacccacctgaacgatgcccagggtcaggggatcgtcctcgtgggagaaacggtcggtggtgatgatggctgcggcgtacagcacggcggccatgaccgccagcaccataccgggggtgaagccgccggactggccggtcagcagtgccacgccgccgatggccaccagtgcgctgacggcggtggcggccttgggcagcttatgccgcagcacggcctccgtcatgggcaccagaatgatggcggtattctccagcagggagacagtggaggagggggtgctcttgagccccgtcagctccgtggagagcatcaggaagaacagagcgcccatgatggcgccacgcaccagcgtatggcgcttgatgtggcgcaggcgcttgaaaaacaccaccgccagcagcacaaaggccatcaaaaaccgggccgccagcaggttgaagatccccatgccgttcatggcgatcttgctgaacagaagggacgtagcccgtgctgcgataactgccgccaaaaggatctccgcttttttctgagtcatgatgcctgttcctccgaaggtttctgtccgttcttaatcgggggtttctctcctacccttgacagagtatagcacttggtgtatccttgcgtaaagcgatactatttcaaattttgtttgacaaaatgtcaaagaaggagcgaaatttcatggacaccgaaaaatgccgggttttgctcactgtactccacgagagaagtctgtccgctgccgccgaggcgctgggctacaccccctccggtgtcagccggttggtggacagtctggagcgggagacgggctttcccctgctgcaccgggggcggggcggggtatccgccacacgggcctgtcaggagctgctgccgctgatgcggcgaatggcggagctggacgagcagtaccagcagctggcccaccggatccaggggctggatgtgggccgggtggtggccggcaccaattacgccgccttctacccgtggctgtcggaggtcattgccgggttccatcacgcttatcccggcatccgggtggagctgcgggagggcagctctactcagctgggggagctggtggatcaccggcgggcggacttctgccttatcagccagcggccgggacggcacgagtgggtgccgctgaaggacgaccagctgatggccattctcccccctacccacccgctggtggaggcggaccgcttccccgtggagcggctgcggcaggagcccttcatcgagtttctgccgggacaggagacagataactcccggatgctccagcagctgcagatccggcccaagatccgcttcgccaccagcgacagccgggccgccattgccatggtgcgggcgggtctgggcatcaccttattaaacgatattctcaccgccgatctggcggacggggtggcggtgctgccgctggacccgccccagtcggtacatctgggcatcgccctgccggaggaggagcacgtctcccccgccgccaagcggttcatcacctatgccctggaccggctgccggagctggatgtcctataggtacttcgataccagacagggcgtccaaaagtgacaaaaatgttagtcagttatacaaaccagccattttcgtgtggtttttctgtgaaaagcctgaaaatccccttctttcagggaattttcaggctcttttgccgccggtctgcggcagacgttgatttttcttagtacagccggacggacattcctcataaaccgactgcttctcccgttgacattcccgccggaacgtggtatagtaccgcttacgcccagagaagggcggtatatacctcggtaaaaaggttccctaaaaaacctattattcacaaaaatttcacatttttcagggagcatttgttttggtatgtgcatggagggaagggaagccgtccatgtacctgtctggatgaaaaaaggagtaaaacaattctatgtgggatctgtctttcagcgcactgaatcaggacagcggcttttggccccgtctgcagcgccgctgctatgggggcttccgccgtctgtccggcctaagccagcggttttggctcagccgtgcctattttccgtttttgctgtgggtgacgctgggcttcgccgctctgcgtcagccggtctatggggccatggccctgctggggatctgtatttggttgctggtgttctgccgggatctgctggcgtcggtgacgccgttcctgctggtatttctgctgtcgacccagcgatatgagagtctgggggatttcctcccctgcgccgtgctggcggcgccgttctttgcggcgctgatctggcacctgatggtctggcccgtcaccttccgggtgggacgcagcgccacggggctgctgctggtgtcggcggccaccctgttggggggctgcgggatcctgtccatgcatcagctgctccagcctctgagcctgtactacgtcgggtgtctcggcggcgggatgctggttttctatgtgctgctgcggtcgtgcctgacctattccaagggctacgacctgcaccggcggttcgccgccattttctgcgtgctgggtgtgtgcatggcgtgtctggtgatgctggattacgccgtgcggtggcaggaatttctgcaggtacataccaccctctatctcaagtaccgcaactttgccacggcgctgctgctgactaccctgcccatgtccttttatctgtcgctgaaaaagcccgcccatctgctgggtgtggcggtgcaggcggcagggctggcccttaccggcagccgcagcgctctgctgttcggtgtggcgctgctgggactgggcttcgtatatctggtgcggtggggcctcattccccggaaggccgtgctgcctctgtgcgtggccggtgcggtgctggcggtgctggtgggcccggagctgctgtcgctgatgatggacagccgcatggagggcggtcatctgttccatcagggggactccgtccgggtgcagctgttcctgcggggcatcacggacttcctgcacaaccccgtgtttggcatcggcctcatcagccagcgcaacagcgacctcttcaccggtgtggaggggagcatggtgttctaccacaacagcatcgcccagatcatgggcagcatgggtctggtgggcattgccgcctacggcgtgctgatgcgggatcgtatcgccctgctgcgggccggaaaaacaccctttgtccgggcgttggctctgagctatctggggatgctgctgatctccctgaccaaccccggcgagttctgccccttccccaatgcagcgctgatggtgatggtctttactctggcggaggaggccaccggcgacgtggccgtccccgtaggagagatgctggggtttcggcctgcacggcggatatatctgccccagaaataacgcttttctttcccggaaccggacttcccccggttccgggaatttttttggcacgggacgaagcaagctgcataggataggaaaaaaggaggtctttgcctatgcagtcagcacaaccaacacctgtggacgttttcctcaggacccacccggaccggggcggcctgcgcgtgcaggtcacctgcggcggcgggcgcttccccgtggccggggcgcaggtggtcatcagccgggccttcggcacggaggagcacatattttaccggggcgtcaccgacggctccggtatcctatccggcatccgcctgcccgccccgccctttgcctggtctcaagcctcggacaccgccgccctcagcgggctggactatcaggtgtcggtacagcatcccatgttccagccggtggctggccggacggcgacggtattcgacggagtggagaccatcctgccggtgatgctggagccagtggtgtgagaaaggagcgtgcatgatgccctatccctatcccgtggtgccggagaccatcacggtgcatctgggggcgccgggggagtccgcccggaacgtggtggtacccttcgcccagtacatcaagaacgtggcctcccacgaaatttatcctacctggccggagagtgccatccgagccaacattctggcccagatctcctacgccctgaaccgggtgtacacggagtattaccgggccagagggtacgacttcgacatcacctccaccacccggtacgatcaggcctatgtggaggacggcgacatattcgagaatatcagccgcatcgtggacgatattttcaacaactatatcgtgcggcagggcagcgtggagccgctgttcgcccagttctgcgacggggtgcgtacccggtgcggtggcctgtcccaatggggcagcgtggatctggcggaggagggcatgacgccctacgaaattttgcagtactactacggtggcgacatcaatctggtgatgaatgcgccggtaggcgggaacgtggcctcctatccggggcggcccctgcggcggggcgacgccggcaacgacgtgcagaccctgaagcggcagctcaaccgcatcgggaagaactaccccgccatcccggcgctggacgacagcttcgtctttgacgaggacatggaggaggcggtgcgggtctttcagcagatcttcaatctggcgcaggacggcatcgtgggcaaggccacatggtacaagatcaagcagatctacaacggcgtcaagcagctgtcggaactcagcagcgagggactcaccatccccgaggtgcagcggcggtacgccgaggagctgcggctgggagacagcggcatcgacgtgcggacggtgcggttctatctggcgtttctggggtactttctgccggaactgcccatgatctctctgtccgacgacttcgatcaggagctgctggatgcggtatacaccttccagcgggtctacggtctgccagtggacggcgtggtggaccgggagacgtggaacgccctgcaaacggcctatcagaaggtactggcggaactgccggaggattaccggcaattcgccggggaggtctatccggggcggtttctggtgcggggcgaccggggcgaacaggtggccctgatgcaggagcggctcaaccagatcagccgggaggacgagactctgcccagtctggtggtggacggtatcttcggccccgccactcagcaggcggtgctgaccctccagcggcagctgggcttcgaccccaccggggccgtggggccggtgctgtgggcgcagatcattacgctgggcgaggagtactgaaaaatgggaggaaggggcaaaggcccttcctcccatttttctatgtgttctccgccggatagaggagggatgcctgaaagccgttttcccccaatgccatgatatccccacccacgatgacgtcgccgcagagatagaggttcacctgcacatctccggtgcggccggggtaattggtgacggtgtaggtgcagcgggtaacggtctgaccgtcgtagtccgccaagggcaggcccgcctcctgctggagggccagatagtcctcctgtccctccagcgacagctgcaccgtcagggtgcgcaccggctgctcctccgtctgccagccctgctgctccagccatgcccggcgggcggcatcgtccttggcggtcaccggggtctgggaggaacgggcggtacaggcagtcagcagcatcagcagcaggcacagccccgcaagacagcgcttcacaggcacgcagctcctttcgttttttccatcgctttgtcctcagcttattccgtttcccggtgggatatgctataatgagaaaaactgcggcaggagggctggttatggagcgcttggacaagatcatcgccggaacgggcaaatactcccggcgggaggtaaaggagctggtgcggcagggccgggtggtggtggacggacggttggcctcctccccagaggaaaaggtggacgccgacgccgcctgcctgctggtggacggtcagtcactggactgccgccggtacacctatctcatgctccacaagcccgccggggtcctgtcggcccgggtggacggacggcagcagacggtgctggacctgctgccgccggagctgcgcaaacgggatctatccccagtggggcggctggataaggacacggagggactgctgctgctgaccaaccacggggagctgacccatcggctgctgagcccccgctatcacgtggacaaggtgtactacgcccgtgtggagggcgtgctgacggcggcggacacggcggccttcgccggcgggatggtgctggccgacgggctggagtgcctgccggcggggctggagctcctctcgccgcaggaggcgctggtgacgctgcgggaggggaaattccatcaggtgaagcggatgctggccgcttgcggaaaaccggtgacgtacctgaagcggctttccatggggccgctgcggctggatgaagcgctggcgccaggggccttccgacccctgaccgagggggagatacacacccttcttgacatatgtggactgaatgcctcgacataacgccaaaaaatgccccaaaatttttgtgaaaaatacaagaaaatacttgcaaaatcgtgattctgacgatataatagagcacgaagctaagtagtttgcacaaaatatccatcagctctatatcaggagggactgactatgtccgggagaatttttcagaacgtcgttttacagttcaaggataccaccgatcgcaccgtgggcgtcattgacgccgagggtaccgtcatcgcttgcagcgagctgacgggtatcggcaagaagtgggccaagtatgtggaggccatcgacgccgccgagggcggctgcattgcgctggagggcaagaccttcaaggcgctgcccggctggggcggacattttgactatgccgtgttcgccaccggcgatgacagcgtgggccgcaccgtgtgcgccatggcctgcgtggctctgaactccgccaagacgtactatgaggaaaagcacgacaagggctccttcatcaagaacatcatctccgacaacatccttatcagcgacatctatatgcgggccaaggagctgcacgtggccgccgaggtaccccgcggcgtattcgtcatccgacctgtggagggccgcagcgagggcatctctctggaggtggtgcagaatctcttccccgaccggcagaatgacttcgtcatcagcgtgggtgagacggacgtggcgctgatccaccagatgccggagagcaccaccaacaaggatctggagaaggtggccaccaccattgaggaggccctgcgggaggacggcgagagccgtgtgttcgtgggcatcggtacgctggccctgcatctgcgggatctggccaagtcctataaggaggcccagatcgccatcgaggtgggcaaggtgttcgacacggagcgctatgtcatcaactacgagaatctgggcatcggccgcctgatctatcagctgcccaccaccctgtgtgagatgttcctgcaggaggtgttcaagaagaaccccatcgatgcgctggatcaggagacgctgttcaccatctacaagttctttgagaacaacctgaacgtctccgagaccgctcggaagctgttcgtccaccggaacacgctggtgtaccggctggagaagatcaagaagctgacgggtctggatctgcgggagtttgacgacgccatcaccttcaaggtggcgctgatggtgaagaagtacctcaccagccggggcatcgacgcctgacggctgcatagaaaatcaaagaaaagacaggcagtgccggaggcactgcctgtcttttgtcgtggaaggggatcgccggtcacggcttggtgggcttttgcaaaaggatacagatacccgccgccagcagatagacgccgaaggggcggcgcagcagctctgtatccacagagaaggacagccatgccgccagcgctgccgctatcagtccggcggggatggcgctgcgaagcaccgacttttccagcaggccacttttcccgtgggacagcagccccataccggcggtgggcaggaagtacagcaggttgatggtctgggcggtgcgctggtccacccccagcagcaacgtcatgcacagcagcagaagggtcccgccgccgacgccccacgccgagaggataccggtggcgaagcccaccgccagcggcagcagccacgccgtcacaggagatacctcacgccgccgtacagcagaaagcaggcgaagatgcgccgcagccacaggttggataccttctgaaacaggcggcctcccacgaagccgccgcccagtccccccaacagatagggcagggtctgcatccagtccagcggctgccgccacaggctgatggccgccgacagcaggcacaaaggcaggatggctgccacgcaggtggccagcgcccgtttctgctccatatggcaccagcctgtcagggccggggccagcaccataccgccgcccccgccgaacaggccgtttaccgccccggcggcagcgccggacagggcgtatttcatgcgatccgtcatggccctccctccttcctatgtagccgcccggcgcaccgggcggtgtgccgttacagcttgcggtagctctggcagtcggtacactggtccatggtggggttggcctcgtgggtgcctacctgaatactggtgaggccgcagtgatccacatcctgacagtggtgggcacagttgctgacactgcatttgatggcggagttgggggtgcagttgcagccgtcgttggtacagttcttgctcatgatacgttcctccagaaaaatagagtcaggcgcaaagcctgactctattttgtcttgaaacggattttttatgcgtctatatgcccagcagccacgaagcgaagcggaaatagatcagcagactggtggcatccacgatggtggtgatgaagggactggccatcaccgccgggtccaagccaatcttctccgccagcagcggcagtgagcagcccacacacttggcgaataccactacgaacatgatggtcaggcacaccaccagacacaccacgggggtcacggcggcattgcccaacagcagacggtccaccagctgcattttcacgaaattggccgccgccagacacgagccgcacagcagcgacacccgcagctccttccacaggaccttcaggatgtcagagaaatccacctcgtccagacttaaggcacggatgaccgccacgctggcctgcgtaccggagttaccgccggtgccggagagcatggggatataggagttcagcaccagacacgccgccagagcgctctcatagtggttgaggatcatgccggtgaaggtggccgacagcatgaggatcatcagccacggcagacgggctcgccacgtggcgaagatgccggccttcagatagggcttgtcggagggcagcatagcggccatcttctcgaagtcctccgtggtctcctcctcgataacgtccatagcgtcgtccacggtgacgatgcccaccaagcggttctccagatccaccacgggcatggccagaaagccgtatttgctcagggcctgtgcggcgtcctctttgtcgtccatggtgctgacccagaccacgttgggatccatgatgtcctcgatgaggtcatcctcctccgccagcagcaggtcacgcaccgacagcacccccagcaggcgacgggtaggatcggtgacgtacaggatgttgatggtctccagctcgccgccaatacggcggatgcgcttgaaggcgtcctccaccgtcatgtcctttttcagggacaggaactccatgttcatgatggagccggtggagtcctccgggtacttcaaaatctcgttaatggattttcgcatttctggcgttgctttatccagaattcggatcactacgctggcgggcatctcctccacgatgtccacggcatcgtccagatacagctcgtccagcacctccttcagctcggtgttggaaaagccgttgatgagcatctcctgggagtcggactccagctccacgaacacctccgccgccagctccttgggcagcagccggtacagcaggggcatcagctccccgccggactcctccagcagcagagcgatgtcggcaggctccatggggagaaagaggtcccgcaggcgggcatactgtttacttcgggccagctccttgatctcatccagataccggtccagctcttcctcgtagtctaccatatcggctcctccttccccgcatcataaaaaatcccgcagtcggcgtttgcctgctgcggtcacattgcgatcgggtcaccgccgtgacctgagcaccgtaacaagctttagcatcgtggggcggtgaagctgcattagatgataccttggtttcgatatcgcctgttcaaaccctctcatggtgtctccaccactctgcggcagcagcccatatccctacggtagccttacctaccgggaaatatatcatgcaatataaatgtatcgtaaagcaaaaatcaccagatgtcaaccctaagatacagaacattccgtgcatttgttccatcaaatccttcggttaaccttgcaattctcggcgtgagccgttataatagtctgtatatacaacctgtatgggtctgtaaatcctgagaaagtaggtggcggcatggaaaattctcctcagtatgtgatcgaaatgcttcacatcaccaaggagtttcccggcatcaaggccaatgacgacatcacccttcagctgcggaagggcgagatccacgcccttctgggggaaaatggcgccggtaaatccacgctgatgtccgtcctgttcgggctgtaccagccggaagaaggcgagattcgaaaaaatggacagacagtaaagatcaatgaccccaacgacgcaacagcgctggggatcggtatggtgcatcagcacttccagctggtggacgtgttcacggtgctggacaatatcattctgggtgccgagaccacgaagatgggcttcctgcagaagaaggaggcccggaaaaaggtacaggagctgtcggagcggtacggtctggcggtagatctggacgccaaggtggaggacatcaccgtcggtatgcagcagcgtgtggagatcctgaagatgctctaccgggacaacgagatcctcatctttgacgagcccaccgccgtgctgacgcctcaggaaatcgatgagctgctgctcatcatgaagaatctcaccagggagggcaagtccatcctcttcatctcccacaagctcaacgagatcatgtcggtggccgaccgggtcacggtgctgcgcaagggcaagtacatcggcactgtcaacaccaaggacaccaacaagcaggagctgtccaacatgatggtgggccgccccgtacagctgcaggtcaacaaggacgaggcccatcccggcgatgtggtgctcagcgtgaagaacttcaccgtcccctcccatctgcacaagaaggatgccgtacataatgtcagctttgacgtgcgggccggcgagatcgtctgcatcgccggtatcgacggcaacggccagacggagttcatccacggtctgacgggccttgacaagagctccggcggcagcatcaccgtctgcggccacgacatctcccactattccatccaccaccggggcgagtacatcagccacatcccggaggaccgccacaagcacggtctggtgctggatttcacgctggagcagaatctggtgctccagcggtacaaggagccacagttcgagaaggggggcttcatcaagcgggactccgtccgcagctacgcccaacagctgatcgagaaattcgacgtccgcagcggtcagggccccatcaccgtggtccgcagtatgtccggcggcaaccagcagaaggccatcatcgcccgtgagctggaccgggataagcctctgatcgtggccgttcagcccacccgtggtctggacgtgggcgccatcgagtatatccacagccagttggtggccgagcgggaccgtggcaaggcggtgctgctggtgtctctggagctggatgaggtcatgagcctctccgaccgcatcctcgtcatgtacgagggggagatcgtgggccagttggaccccaaaaagaccaccgtatccgagctgggcctgtatatgtccggtgcaaagcgtgacaacaaaggaggcgatgaagcgtgaagcattccgcagccactctgtaccaaaaggaaggcaccaaaaaggtgctggcgtccctgatctccattttggtgggtctgctggtgggcggcatcgccgtcattctggtgggctgcttcaatgagaagatctccctctccggcgcatgggacggcttccgcatcatcttcgccggcatcttcagcaccggccgcaatgccgccggtgagctgacctggggcttcaatgccgtcaacaccggcgatatgttgttccgggccacgcccctgatcatgacgggtctctccgtggccgtggccttcaagacgggcctgttcaacatcggcgctcccggtcagtacctgatctccaccatggcgacgctgatgatcgccctgagcatcccctcttcctccgtccccacctggatcatctggatcctggcctttttgggcggctgtctggcgggcgctctgtggggcgctctgccgggtctggccaaggcgtgtctcaacatcaatgaggtgctggcctgcatcatgaccaactgggtggccgccaaccttgtgacgtggatgttcgacatcagcaacttcaagaacaccgtggagaacaccaagtccggctacatctataagaccagcttcaacggcgtggccacccccaagctggggctggataagctgttccccggctctcaggtcaacgccggtattctggtggccattctgctggccatcgccatgtacatcctcatgaccaagaccacgctgggctatgagctgcaggcctgcggcgccaaccgccatggcgcccgctacgccggcatcaaggataagcgcaacatcgtgctgtccatggccatcgccggtgcgctggccggagccggtgcggcactgtactacctgtccggcaacacggagttctactggtccacctatcagtctctgcccgccgtgggcttcaacggcatccccgtggcgctgctggcgctgaataaccccatcgccgtcatcttcgccggcgtcttcatggccatgctgaagatcgttggccagcagctgaccaacctcaccgcctacaacgagtacatcaccgacgtcatcatcgccgtcatcgtgtatctaagcgctttctctctggtgatccgcatgatgctcagcggccggaagaagaaaaagatcgctgtggcagacacggctcccatccctcggggcgccgccgtggaggatcagacctccctgctgccggaggaggagaaagcacccgtagaggccgctgtcacagacagcgataacgcagaaggaggcgatcaggcatgacatttctggtacagcagaccctgatctatgcagtacccctgatgatcgtggcgctggccggtgtgtttgccgagcgcagcggtatcatcaacctggcgctggaaggtatcatgatcttcggtgctttcatcggcgtgctgttcgtgcgcctgatgcagggcagcgccgccgtgctggccgctcaacagaccgggaactgggtggctatgcaggggctggagcttctggctatgctggtggcggcagccatgggcgccgtgttctccctgctgctgagcttcgcctccatcaacctgcgggccgaccagaccatcggcggtacggccctgaacctgatggctccggctctggtgctgtttctggtgcgtatcatcgccaaccagaacaccctgcagctggctaccggcgactccgctacgtggttcatgatccgaaagtccaccttcggcatcgacaaaaacaccgatcttggcttcttcggcgagacgtttctggtgaaggtctatctggctacctacgtctgcatcatcctgttcgtcatcctgtccatcattctctataagacccgcttcggcctgcggctgcgggcctgcggtgagaatcctcaggcggcggactctctgggcatcaatgtctacaagatgcgctatatcggcaccaccatctccggtgcgctggcgggtatgggcggctttgtgtacgccctgaccaccgccaactgctcctccaacggcgacgtggcgggcttcggctttctggcgctggccgtgatgattttcggtaactggcggcctctgaacatcgccggggcctccctcctgtttggtctgttcaaatgcatcgccgccgcctactccagcatcgatatcaacggcgacggtgtgtactggctggcagagattggcatcagctcccacctgtaccggatgcttccgtacatcatcaccctgctggtgctggccttcacctccaagaagtcccgtgcccccaaggcggagggcatcccctacgacaaggcccgcagataagagcggcagctgcctgtattttcaggcggcgacaacctgtaaaaaatggcacccgaccaatgcgggtgccattttttgtccgccataggggaaagcagcaaccctttaccgcacccagcggcttatgggaacagccaatgccgccgatagaaccgcctgcgctgcctttgccgacagataacccctcatgtggagtccgctcccctccagcaccgccgccgtctgacagtggacgcacacgccgccccagcccatcagtgccgccgccagcacgaagtccccccgtgcgccggagagccgcaggatgccgccggtaagctccagcagtcccagcggaagagggtgctccagccccgtcagggccgtcagcagccgggtcagcaccagaaagaacaccacgaagccgcagacgtggagcatcccctcccccgctccccggacggcccccggaaaggcggagaccagagacatcggcgcagacggcgaagtccgtccctctggggacgaggtgctgcgggtcagcaaagccgtcagcacggcggccgacacatggatcagccaaagccatgccccggcccggagactgccgaagcagcccacccccgccacgcccaaggcaaaggctgggccgcagttgttgcagaacagcagcagccgctgtccctcctgtcgggagactgccccggtgcggaccagctctcccgccgtctgggcgcccaccggatagcctcccagcagacccagcagcaccgccgtaccaccggggccggagacccccagcacccggcgggtcaagggggccagcaaccgccccagcgccgccgcgctgccggtggccacaaacagccgggacaccacgaggaagggaaacagcgccgggatcaccgagccgccgcagagggccagtccctcccgcaccgcctgtgccgccgtctccgatgccgccagcagccccgccatgaccgccagcagtcccagtgccaagcccatgctccctcacctccctttaccctgccagcttatgacggcaggcggagggccatgccacggacaggcaagtttttccggcggtacgcatacagtccaccgtgggagggatgcctcatgggagacaaaaagcggctggcccgtgccggtctggaggtcatggaccggctggatctgccaggggagctggcagtgggggtgggccgcatggagctggtgggggaccgccagttctatatggaacagcaccggggcgtgctgcggtacagcacggaggtcatcgacatcgccgctgccgacatgacggtgcggatcacaggccgggagctgcaactgctggccatgacggaccgggagctgcggatcagcggcaccatcaccgccattgagctgctgacataggaggggccatgtatcgtcagatcgtccattttttacaggggcaggtgctggtgcggatcgagtgcggctgtccggagcgggtgctgaacctctgcggcgcacggggcatccccttctgggagctgacatgggagtcgccggtgtgcctgaccctgcgggccgtggggcgagacctgccccgtctgcggcaggcggcggaggacgccggcggcagcctgcacctgtgccgcagcggcggcgtaccggtgttctggcggcgtctgcgccggcggtacgtgctgctggccggagcggtgctgacgctggtgctgatgttcggcggcaacctcgtcatctgggattttcaggtcagcggcaacgacaccgtccccacggagaccattctccgggcgctggaggactacggcatcaccgtggggtcgccgggtctgcacatcgatcaggagaccatgcgcaaccatgtgctgctggccctgccggaggtatcgtggctggcggtgaacgtccggggctgcgtggcccatgtgcaggtggtggagcggcaccgtccgccggaggcggcagatcggagcgccgtcaccaacatcgtggcccggaggtcgggccttatcaccaaggtggaggcgctggaggggcaggccatggtgctgccggggaccaccgtcacggaggggcaactgctgatctccggggtgtcagaaacagagcacatcggcgcacggtttgtccacagcatgggggccgtgtgggccagaacgtggtatgagctgtcggtcagcgtaccgctgcagatcacgcagcccgccgccggaagccgcagccacagccgctgggcgctggatatcggaaaacaccggataaaattctacggaaagggtagcatcaccggggtggattgtgataaaataacatattataaaccgttcaccctgcccggagggcttcgcctgcccctgacgctggtgcaggagcgcatcaccgcatgggagggcgccgccgcagagcgcacggagcagagcgcccgtcaggagggagagcagcagctgctggccctgctgtcggcccggctgccggagggcagcaccgtcaccgacacccgcttcgccgccgtgcggcaggggaaccggctgacggtggtgctgaaggcggaatgtctggagcagatcggccagaccgtgacgctgccggaaacggagactacacagagataagggggcttgtcccgtatggaacagcgtgtgagcatcgagcggatggaggaggccatcaatctgttcggctcgtttgatgaaaatatccggcttctggaggcggaattccatgtgacggtggtgaaccgtgacggggagctgcggatctccggggagccagaggaggtgatgatggccgccaaggcggtggaggcgctgctgaccctctccggcaagggggagtccattaccgagcagcacgtccgctacgtcatcggcctgtgccgcagcggccagtccgagcgcatcggagagctgacgcaggacgtgatctgcatcacctccaaaggccggcccgtcaagcccaagaccatcggccagaagcagtatgtgcaggcggtgctccacagtcccgtcaccatcggggtggggcccgccggcaccggcaagacgtatctagcggtggcggcggccgtggcggccttccgggccaagcaggtcaaccgcatcatcctgacccgccccgccgtggaggccggagagcggctgggcttcctgcccggcgacctccagagcaaggtggacccctacctacggcctctatacgacgccctgttcgatatgctgggggcggagacgtaccagaaatatctggagcgtggcaatatcgaggtggccccgctggcctatatgcgtggccggacgctggatgacagctttatcattctcgacgaggcccagaacaccagccgggagcagatgaagatgttcctgacccgcatgggcttcggctccaaaatggtcatcaccggcgacatcacccagatcgacctgccgggggacaagcccagcggcctgaaggacgccatgaaaattctcaagggcgtggagggcatcagcatctgccagctgacccagcaagacgtggtgcgccatgtgatggtgcagcggatcatcgaggcctacgcccgattcgaggagaagcgcaaatgagaaagacacactacatccccatcaccgccgatgtacccggcgccgccaacgatgccaactgcgccctgatccgccggaccatccgcacggcgctggcggcggagggactcacggccccctgcgaggtggacgtgctcctgacggatgacgacggcatccacgagatcaaccgagagctgcggcaggtggaccgccccacggacgtcctcagcttcccggagtttgaactgacccccggccagctgcccggcccggaggacgccgaccccggcacgggccttatcccgctgggggacatggtactctccatggagcgggtggcggcgcaggccagggagtacggtcactccaagcggcgggaactctcctatctggtaacccactcggtgctgcatctgctgggctacgaccatctggacgaggggcctatgaaggcacagatgcgggccagagaggaggccatcatggccctgctgggtctggagcggtgagaaaggccgcaagaaaaccaagaaaagcagctggtggatgaatggaacgaggcgtaagtgcccctctattcccaccccaaattgctcacagaaagctgaggatcaccggaaattgcggaaggagctgcatcatggccgaggataagctgtttgtcgaggcaaccgaagaggacgtgccgtctatcatcggcctgcggcaaaggatctggagcaccacataccgaggcatctaccccgattccatgatagatgaatttgactgggaccggcacagggaaatggaactgctgagggtccatcacccggcatactctgtgtaccttatccgaaagggtcggcaaaatatcggctatctgacgataaataaaaccgacgtgatcaccctgcaatccctttatattgtctctgaataccagcgacaggggatcggacggcaagcctttgatttcatgagcgcatattgccgggagcaccatgccaacgccttcatctgccactgtgttccggaaaatttcaatgctcgaagcttctatgagcgcatgggcggcgaggtgatcggggaggacctgacaaacgaggagtgctggcagaactctgtcacttaccagtttacactaccatccatcacaacataacaaaattgctcacagaaagctgaggatcaccttatgaatgagaaaaacaccatcaccaaaaccgctatgatcaccgtgtgcggacggcccaacgtgggcaagtccagtctcaccaacgccctggtgggtgagaagatcgccatcgtctccaacaagccccagaccaccagaaaccgcatctacggtgtagtgaaccggggcgacacccagttcatcctgctggatacgccgggcctgcacaaggcccgctcccggctgggggactatatggtgaaggtcgtacgggagagtctggccagtgtggaggccgccctgctgctggtggagcccatcccccacgtgggagagccggagaagatccttctccagcgcatccgggaggagaagctgccctgcgtactgtgcatcaataagatcgacaccgtggagcgcaaggacgatctgctggcggtcatcgccgcatacagcgaggtctacccggatttcgacgccatcatccccatctccgcccgcaccggcgacggtctggaggagctgctggcccagatgcagcggtacgccgtggaaggaccgcagctgttccccgacggcatgaccaccgaccagccggatcaacaggtctgcgccgagatcattcgggagaaaatgctgctgtgtctggataaggagatcccccacggcacggcagtggaggtgacccgcttcaccgagcgggaggactccggcatcatcgacctggacgtgaccatctactgcgaaaaggccagccacaagggcatcatcatcggcaagcacggggatatgctcaagcgcatcagcacgctggcccggcaggatatcgagaagttcatgggtaccaaggtctatctggaaacgtgggtgaaggtcaaggaaaactggcgggacaatgtgaacttcatccgttcacagggctacaacgaacagtaattcccgttagaaacatgagccgaccctaaaacttaccacttatgtttcgccccggcggcggcaagctaatgccgggggtggagatcatgtgcgattactggaatctttttctggagaccggagcgccggagctgtatctgctgcaccggtgggaggaggaatcatgccaaaccaacccatcgtcaccgccggactggtgctgcgggaaaccgtgaccagggagacggacaaaattctgacggtgctgaccccggatcgggggaagatctccctcattgcacggggcgcccggcggaaaaacagccgtctggcggcggcgtgtcagttgctggcctattcggagctgaccatctacgaaaagggtcagtggttcatgctggacgaggcggagacgctggagctgttcaccggcctgcggacggacttcgtggctctgagccttgcctcctatctggccgatctgacggacgccacggcacagacggaggacacgtcgcagctgctgcggctgctgctgaatgccctgtacgccctcagtgtcctgcataagccgccccagctggtaaagcccgccttcgagctgcggctcatggcgctgtcgggcttcgagcctctggctgacggctgcgccgtgtgcgggcggccggagccggagaagccggtgctggacgccgtccacggggtggtgtgctgcgccgcctgccgggaaaagggcgggctggccatgcccctatcccccgccgctctggcggccctgcgccacgtgctgtactgcccggataagaagctttacagcttcacgctggatacccccgccctgcgccagctggggcaggcggcggaggtctatgtcaccgcccagctggagcgcagcttccggacgctggactactataaatccattttgccgcaagaggaacctacatatgactgatttgtttgaaaaatccatccgcacactggagctcccggcggtgctggaaaagctggcggccaaggcggtcagcgacgccgccaaggagcggtgcctgcgcctgactcccgccacggacacgcaggaggtgctgcatctgctggatgagaccgacgccgccaaggagaggctgggcctccacggcagcccctccttctccggggtcaaggatgtatccgccgccctgacccgtgccgaccacggcggtatgctgaacacccgtgaactgctggatgtggcaggcgtactgaccgccagccgccgggtcagcgaatacgacgcccagcggcagggggaggccacggtgctggaccggctgttctcctctctgcacaccaaccgctatctggaggataagatacgctccgccattctggacgaggagaccattgccgacaccgccagcagcgagctggcggatatccgccggaaaatgcggctggcggccaccaagggccgacagattttgcagcgtatcatctcctccccctcctatgccaaggtcctgcaggaggccctcatcacccagcgggacggccgcttcgtggtgccggtgaaggccgagtgcaagggcagtctgccgggtctggtccacgacatctcctcctccggtgccacgctgttcgtggagcctatgggcgtggtgcaggccaacaacgagctcaaggagctggaggcccgtgagcagaaggagatcgaccgcatcctgcgccagctctctgctgagtgtgccggccagatggagaacatcctctgggactacgatattctggtgcagctggatgtgatctttgcacgggcgcagctgagctatcagctcaacgccagccgcccggaggtgcgccgccggggcggtattgccctacgccgggcccggcaccccctgttggatcaagccaaggcggtgccgatcaccgtggagctgggtgagcagttcgacaccctggtcatcaccggccccaacaccggcggcaaaaccgtgaccctgaaaaccatcggactgctgagcctgatggcccagtgcggcctgcacatccccgccgacggcggcagcgccgtgcgggtgttccgtcgggtgctggcggacgtaggagatgagcagagcatcgagcagagcctgtctaccttctcggcccatatgtccaacatcgtccagatcctgaatgaagtggacgaccacagtctgctgctgttcgacgagttgggcgccggcacagacccggtggagggtgcggctctggccatcgccatcattcaggaggcccggaatcagggggctctcatcgccgccaccacccactatgccgagctgaaaaccttcgccatgaccacggcgggggtggagaacgccagctgcgagttcgacgtacagaccctgcggcccacctaccgactcctcatcggcatccccggtaagtccaacgccttcgccatctcccggcggctggggctggatgagtccgtcattcaggcggcacaggcccagatggacagcgactccgttcgcttcgaggacgtgctgacccagctggaggagaagcgccagcggctggagaaggcccagaacgaggccgaccgactgtggcggcagcgggaggaggactcccggaaggcccggaccttccgggagcagatggaaaagggcaaggagagcgcacgggccaagggagaggctgaggccaagcgcatcgtccggcaggcccagcagcaggcggaggagatcttcgcccagctggaccagctgcggaaggagcagcagaagcaggccaacgtgcaggccctcaacgatgccaaggccgccgtgcgccaccatctgaaaacggcggaggagcagctgcacctgcgggacgaggagcaggagcctgcctatacaccgccccggcccatcgccgtggacgatcaggtggagctgcccggcgtgaagatggccgccacggtgctggccgtcaacggcgacggcaccctgctgctgcaggcgggccgcatgaagatgaccgtcaaggcccagcaggtgcgcctgctggagggcgctcccaagaagtccaagcccgcccccagttcctccgccgccaccctgaacaccgtgtcccgtgcctcctcggagctggatatccggggctatgagacgctggaggccgagagcgtggtggaaaactatctggacagtgccgtcatggccaagctgggcaccgtcaccatcatccacggaaagggtaccggtgctctgcgaaaggccgtccatgagatcctcaagcgtaacaaggccgtcaaaagcttccggctgggccgctacggcgagggtgaggccggtgtcaccgtggtggagctgaaataagccgctttcgtgtagaacgacgaattttttctttgattctctgcaatcgccacaaatttttgtgggattgaatattgctttctccccgttatccgttataatagtatgtgtagcagtcggcttgaagactgcgaataaaggagtgctggtttgatgtatacgcaggaaattaccgttcagaatgaggtggggctgcacgcacgtcccgctacgtatttcattcagaaggccaacgagttcaagagcggcatttgggtggagaaggaagagcgccgggtcaacgccaagagtctgctgggcgtgctgtccctgggtattgtgaagggaaccaacatcaccctcatcgctgacggctctgatgaaaaggaagccgtggatgctctggtatctctgatccagaacaacttcggtgagtaacgaccgaacatgaaacagcgccggtgtctgctgtcagcaagcaccggcgttgttctgcttttatcctctcggtgggcaagcgcaagcacgcccgacagcgtgtccttccggcgctttttctttactcatcgatggtacgatctctgcacaaaaggacgcccccggcgtggccggaggcgtccctttcatgtgttccgctgccccctatggggccgcccggtcagcagccgcagccgcagccgttgttattctgggtgttgccgcagccgcagccgttgccgccccagaacaggcacaggatgatgatggcgatgatgatccagcagccgcagccgccgaagcaggagttctgattgcacataagaacgtgacctcctatgaaaattggacccgcaggtctcattccatagtatgatccgccccttaatagagttcctccggccgggagatacggtagctgagggtcaggagggtatccacaaagtggatgtcctcgaagaatacccccttggtctgggtggagagctccacattggtaaagttccagaagcccttcactcccagagcaatgagccgatccgccagcggctgggccacgctctgaggcacggtcagcaccgccacgttggggtggtactcctccacatagtgttccagctcctccatgggccggatggtcacgtcgtggatcttggtaccgatcagcgccggggacacgtcgaaggcggtatccacctgaaagcccaccttctgaaagtcgaagttctgcagcagcgcatggcccagatggcccgctcccaccacaatgagccggtagccggagtcgatgcccagaatgtggccgatctccgagcgcagctccgccacgttatagccgtagccctgctgcccgaattcaccgaagcagctgagatcctgccggatctgagaggcggtgatgtccattttctgccccagcgaattggaggaaatgcgtaccacgcccttgttatgcagctcgtccagatagcggtaatagcggggcagacgatggatcaccgcatccgagaccttttgttttttcatatgcgtccttcttctttgccggcggcaggagccgggctgcagcccactttcccctaccgcttgttttcgtctttctgaattgtactccaaattccagaacttgtcaacttttttaacaatcttttttgtcttttgtgcagttttcttctttacattcccgaaaaagatggtataataaattagtcgcaagggggaaaagcctccctctgctccatatgcgcccgtagctcagctggatagagtgacagactccgactctgtaggccgctggttcgaatccagtcgggcgtaccagaaaaacggcaagcatcgcaggatgcctgccgtttttccttttgccccgacgggcggatcttatccgcgtctgccccacattggctctttacaagggtgggggtcccgtcaagatttatgcgcaaaattgtttgcaggctccggctgagtgaagtcagccggcaatagagacgtcatccaaagccgcctccaaatgcttcatgttcatgtatttcttgcagcctcactgggcttcgccatgtggcgggcacaggccagcatcagggagacaaatttgttgtccccagcctgtgtggtgccgatgcagaagttcatcaggctgtgaatcaggtcggaaaacgatacatcgcccatattgtccagacatggtatgaggtcaataagaacaagggcatcatgttctgaatgcaggattgggtagaatccgggaaaaacggagagcactgggagtagttctatcaaacaggcttatcaaaacattcttatttccggcagtgctggagatgtccatgcatcaggatgctgggccaaaggtgattccgtgccgctgacctccggcacaagccgcagattcgggatcgtgctgcgtttttagtattcggatggtacggagggcgaggagatcgccaacatcaatccggattgcagcagtcagaacgactggcagcatctgtccctgcgggcagttgcgaaaaaaagcgtatacctccatgcggatcgtgttgcgttatgacaagtacccctgtaaccgtcaggttacaggggtacttcttttttcacagatggaacatattcaccagaaacagcagggccagtccatagtaggtcaccacggccaccagatcgttgaccgtcgtgatcagcgggccggaggccaccgccggatcgatgtggatcttatgaaacagcatgggaaccatcgtccccacaaggctggagatcaccatggccaccaccagcgacaccccaacgcagccggagatcagaaaagccggcccccacgcatagcccttgcacacatggatgtagacccctaaaaccgccagcgccatgagtcccaggcacccgccgttgagaagacccacccgcatctccttgcccagcagagccagttcctccttcagggtaaggttctcgtccatgaggacacgaatggtgacggccagcgactgagtcccgacattgcctgccatgtccagcaccagcgactggaagcagatgacgatgggcagcaccgccaccacggactcgaagatgcccaccaccgacgagacgcccatgcccagaaacagcagcacgatgagccacggcagacgttttttcatactgacggcggcaggctcccggaggtcctcctccgaggtcaggccgcccagcttggcgtagtcgtcgctcatggcgtcatccaccagctccaccagatcctgagcggtgaggataccggcgatcctcccgtcctccgtcagcaccggcagggaatcctcctcatactctgcgatccggtcgatgcagtcctccacccgctcgtgggccagcacatagggatagctgcggcggatgatcccgctcagcggatcgttttcacgggcgatgatcagatccttcaggtcgatggccccggcaaagacgccgctgccgtccaccacatacagcgtggagatattgtcgtgctcaccggcctgccgcaccagctcgttcatggcgccgcagacggtcagcgtatccgggatgcagacgaaattgccgctcatgcggctgccgatctcctcctgatgaaaggccagcagccgccggacatccttccgggtatcgtcgtccagatgggcggccagggtctgtttcttctcctccggaagctcccgcagcatatccagcgcatccgccgtgtccatgtcggctatcatttctgccgccagcgccgccggaagctccgccagatagcgggaggcatcgtccagataggggaatatctccgccagcgtctgggcgtccatctgccggaacagccgctcccgctccgcatccgccagcagcgtaatggctttggccacatcccgccagtggtagtgcttcagcagctccggtagccggtccccgtttttggccgtgcggataaccgctgcgatctcctgtgcgaaatccttttttaccattctgttcatcatattcttgtcctcctttgacgctactttgggcaaaatgggcgcaaaaatacaccgcctcagagatagttgccacagcaagacgtctccggtgcggtgcaggagggcacggcaaaacagaatgtgatcagctcctgctcatggatgaccacatccggtatctgtgtctctgtgcgccgcatatccggcttcgccctgtacttccgcagctatccatgaacattcacctccgttgatggttgaaataggtctctccgaccacggttcatcataacagaacccatcgacgctgtcaaccgtttctttccccagcattttgcagccccggaggtcttacgacttccggggctgcactcccggcatttactgtccttggggccggatctccacagtcctgccgccaaaactctcatagatgcggtgggaaacggagaggacggtgcgcccacgggaggcctgacgcagggcctcccgcacacgggcctccgtctcggcatccagattggcggtgatctcatccagcagcagcacagcggggtctgccgctgcggcccgtgcaatggacagcaactgccactctccctgagagaacatcccgtccgtacacaccgtgtcatacccctccggcagcgcctggatggcctcgtcaatctcccggacgatggtgtccggtccctctccctgcacgatgtggcggaagatcttgatgacggcgtagtccggcacactgcacgccccgccgtctgcgtgcctctccaccacgcagtaggagcccttgcccagatgcgggtcctccacatactcgatgcgctccagctccgtcaccaccttggccgcatccaccagcgcactgcaccccttctctggggggtggacttggagagcgcccagcgggattccttttactgggcgctttactgctctgacagcaccatggaggccgtccgggccacggaggagcgctaccgacggtgtttactacgccagcgtcaacatgaagaacgccagcagtattccatgggcaacgtctctctgcgaggcagcgccagccaagaccatccatctgacggctctggggaccggggtcgctcagagcatctacgaataaaatcaaatgctccgggaccttctcatccggttgggcgtcagcgaggccaccgctgccaaggatgcccgcaaaatggagcacgctgtcggcgcggcagacagagcatctggtgtactttctccgcttcgtcaagaccctccgcaaggagccggagacgacggagtcctgagccgcttcttgcaaagtgtaaggcttcggatatattttcttcttcctttcgttccgtttctctgctatactggagccataccaagaaacacacggcggaggttcttcccttctctgccggaaaatcgtaaggaggataccaccatgcgttatgaaatcaaaggcactcccttccccgtggtgatctgccagctggaaaacggcgagcagatggtcacggagcgtggatccatggtctggatgagccctaatatggagatgcagacccatggcggtggactggggcggatgttctctaaaatgttctccggcgagagtatgttccagaacatctacaccgctcacggcgccgggatgatcgccttcggctccagcttccccggccagatcaaggagatcgccatcactcccggccacgatatgatcctccagaagagcgcctttctggccgccgtgccgggagtagagctgtccatccacttcaaccagcggctgggtgcgggcctcttcggcggcgagggcttcatcatgcagcgcctcagcggcagcggcatggcctttgccgagatcgacggcacactggtggagtacgacctccagccgggtcagcagatcgtggtagacaccggcaacgtggcgggcttcaccgccggggtgcagatggagatccgtcaggttcccggcatgaagaacaagctgttgggcggcgagggccttttcaacactgtcctcaccggtcccggacgtatctggctgcagaccatgcccatctccggcgtggccgctgccctgctgccctatatccccaccggcaacaattaagctgtctgtcaggcccgcagagtccttctttgcgggcttggcaattttttatttttcacgcaataaaaccgcatctccacgcattacagggatgacaggagataaaagcctatgactgcatggcccgccacaaccgaatatgctggcagcagtgctcatctgacggagctgctggccgccatcgccgccgggcagcaggatgcgctggcgcagctctaccatctcacccgaacggcggtgtatggtctgtcgctgtcgtacctgaaaaacacccacgacgcacaggatatcacgcaggatgtattcgttcatgtgtgggatcacgccccgcagtatcgccccaccggctctcccatgggctggcttctgacggtctgccggaatctgtgcctgatgcgcctgcggcgcacggagcgccacgccgttctcagcgaggcagaatgggacgccattccccagcaggagaccggtctgaccacagaggagcgaacgctgctgcagcacgttctgtcccgtctgggggaggaggagcggcgcatcgtactgctccatgccgtcaccgggctaaaacaccgggagatcgccgctctgctggagctgcccctccccaccgtcctgtcgaagtatcaccgagcaatccgaaaaatgcgtgctgatctggaaggagataacgcccatgacaaatgaaaagctggaacagtgccttgcacaagcgctgaaaaaaacagccccccatgacgtggacggcgttctctcccgctgtgagaagcggaaaggaacggaaatccccatgaaaacaaaacctcactccctgaaaaaatggatggcgatggcggcctgtctggcccttctgctgctgtgcggcggcggactgtttctgcggcaggccaatgctgtggcctccgtggtctccatcgacgtcaaccccagcatcgagctgcgggtcaaccaaaatgaaaaggttctggcctgcgtgcctatgaacgacgacgcccatgccattctggcggatatgggcgacggcgaggatctgaagggggccaagctggatgtggcagtaaacgccatcgtcggcagtctggtccgcaacggctatctggagagcatctcctccgccatcatgatctccgtagaggatcgggatcagagccgggctcaccgactgcagcaggacctctccgccgccgtggacggcatcctgcgggacagcgcctctcaggcctccgtattgacccagacggtcacgcaggacacgtctctggagaagcaggccaaggaccaccacatctccaccggcaaggcggcgctggtgaaccgtatcctcgccctgaacaacagtctgtcctttgaggagctgtccaggctctccatcggtgagctgaaggatctggccgagaccggcgctcctgccatgcccatcggcatggagcgagcactggagatcgccctgctcacctgcgggcagtccgccgaccagctggccaagcaggaggtggacgctgagctggacgaggttcccgcccactacgaggtggagctggaggaccgcagcggtacggagtacgagtatcgcatcgatgcctataccggcgctgtgctcacctcctatgtggagccggacggtcacgacgatgtggatgaccacgatgaccatgatgatgaccacgacgatgaccacgatgatgcccagcccaccggcagtgcccagcccaccgggcagatcggccacgccgcagccaaggccgctgccctgacccacgccggtgtgtcagagagtcgggcctacgacatggatgtggagctggatgacgaggatggccgctgggtatacgaggtggaattcaaggcggatggcatggagtacgaatatgtcatcgatgcctataccggcgctgtactggaatacgatatggagcaggacgattgaccccctatagcaaaagaggcaggcacaaaagtgcctgcctctttgtcgttattccgattccggcggcgctccggggtctccctccggcagcgatgtctccttgtcctcgtcctccgacagggtggggataaatgcctgcgccagctttcccttgccccggtgcttgatgtagaagtagccgatgacgctgaaggtcacggcaccgatgaagttgacgaacagatcctccatggtatcgtacagcccgatatccagatacccgtcaaagcccagatccgtgccgttgacggccaccgagtggatgccgtcgatggtgatgggggtattgctgttggtggggtccagcatcacggaggtaatgctctgcaccacggtgtccttctgcatatccagatggaacacccggtccatgccgaactcgaaaaactcccacagcacccccacggtcatggagaagcagaaggccgccagcgccacatataccggcgacagctggaacttgatgcggctgttgcggttcaggatgtcgataagggcaaagcctgtggcggcgcagaggaagcccgtggtggtgtggagcatggagtcccagttggggtaggtgatgaagtaacactccagctcccccagtatctccgctgcgaaaatgaacagcaggataatgatctccagcaccgacggcagttggataccgaagttctgctgaatgaaaaacggcaggatgaacagcgccagcaccagcaggcagatgaaagcgctttcatattcgccccggatgatggacattaccagctccgccagcacgatcaaccgcagggccacatatacggcgaacaccgctggctgcttatgaatggtctccttcagccgctggaccgtatctctgggtttgggcgtttttttcataaaggctccttcccggcacagcactgcgccgctgtggttttttctgcatggtatcatatccccggtcaaaacgcaacgaaaaatgtgacaaaaatcgtggcggcctttcttgacaagcggcccgctgtgtggtaagctaatagaaatttgccatgcggaggtgatgaccgtgaccgtcgtttttcaggatgcccagatattccgccgaggtgttctcacccgtggggatgctgttttctcttttgaaatccatcacggcaccagtgtttctcccgttcatattcccgcctcttcttttgtgatatgtcccggtttcgttgatgtacacgtacatcttcgtgagccgggcttttcttataaggagaccatgtccagcggcacccaagccgccgcccacggcggatacaccacggtgtgtgccatgcccaatctggacccggtgccggacagcctgccccatctggagcagcagctggccctgatccgccgggatgccgccatccgggtgctgccctatggctccatcacccgtggccagctgggggaggagctgtcggacatggcggccatggccccctatgtggcggccttctccgacgacgggcgaggtgtgcagagcgaggcgcagatgcgccttgccatggagaccgccaaggggcttcataagctcatcgtggcccactgcgaggacaattccctcctccacgggggctacatccacgacggggcttacgcccgcacccacggccaccggggcatctgctccgaaagcgagtgggggcagatccggcgggatttagagctggtgcgccagaccggctgcggctaccacgtctgccacatctccaccaaggagagcgtggccctgatccgccgggccaaggcggaggggctggacgtcacctgtgagacggccccccactatctgctgatggacgaaaccatgctgcaggaggacggccgcttcaagatgaatccccctctccgcagtcccgccgaccgggaggccctgctggaggggctggccgacggcaccatcgacatgatcgccaccgatcacgccccccacagcaccgaggagaagtcccgtgggctggagaagagcgccatgggcatcgtggggctggagaccgccttccccctgctgtatacctatctggtaaagccgggcctgctctccttcccccgtctgatggagctgctccacgactccccctgccgccgcttcggcctcccgcagggggagctggatggcccccacgccgatttcacggtctttgacctgtcggcttcgtatcccatcgacccggcggacttcctctctcaggggaaggccactcccttcaccggctggccggtacaggcccgctgcctgctgacggtctgcaacggccgcctcgtctggcaggacagtgatctcttttccaaggaggaccgcacatgaagcaggtcacatggaccattacggaaaatacgcccctgacgccggacacctaccggctgcgccttgccggcgacacggaggccatcacggcccccggtcagttcgtaaacctgaagctctccggcttctacctgcgccgccccatctccgtctgcgactgggagcccggtgccgccacccttatctataaggtgctgggccacggcacggcggccatgacccatctccccgccggaacggagctggatgtgctgacagggctgggcaacggctacgacacgtctctcgccggggagcgccccctgctggtgggcggcggcgtcggcatcccgcccctgtacggactggcccgccgcctgacggcggagcatcgtcaggtcacggcggtgctgggctacaaccgggcgtcagatatttttctggcggaggagctgcatgcgctgggcgtcaccgtccggctcctcaccgccgacggcagcgccgggacctgcggccttgtcaccgacggtatggagggcgtgaattacacccacctctatacctgcgggccggaggccatgctccacgccgtgtggcagcgctgccgcaccgatgggcagttcagctttgaagagcgcatgggctgcggcttcggggcctgcatgggctgcacctgccgcaccaagtacggccacaagcgcatctgcaaggacggccccgtcctgcgaagggaggagatcgtatggtaaataccgccgtcaccctctgcggcctgccgctggagaaccccatcatccccgccagcggcaccttcagctatgggtatgaatttgcacagatctacgacatcaactgtctggggaccttctccttcaaggggacgacgctcgccccccggtacggaaaccccaccccccgcatcgctgaatacgccgggggcctgctgaactccgtggggctgcaaaaccccggtgtggaggccgtcatccgggaggagctgccccgtctgcgggaggtctttcacaaaccggtgatggccaacgtcagtggcttttccatagaggaatacgcccaagtatgccgccagctggacggggcggagcaggtaggctggctggaggtgaatatctcctgccccaacgtccacggcggcggagccgccttcggcgcagacccccggacggcagccgccgtcacacgggccgtccgtgacgtgacgaaaaagccggtcatcatgaagctctccccggctgcggcggatatcgctgccgtggcacgggcctgtcaggaggccggggccgacggtgtcagccttatcaatactctgccggggatgcggatcgatctgaagcgccgccgccccctgctggccaacggcaccggcggaatgtccggccccggcatctttccgctggcggtgcggatggtgtatcaggtctacgagtccgtggacatccccatcgtaggcatgggcggcgtcagcaccgccgaggacgtgctggagctgatgctggccggggccaccgccgtgggcgtgggagccgccaatctggtggagccctgcgcctgccggaaaatcatacaggacctgcctgccgccatggagcggtacggcattcagcagcttacggatatcataggaggagcacatcatgggtaaagacgttatcattgcactggacttcgacagccgggagaaaacgctggcttttctggaccgcttcacagaggagaagcccttcgtcaaggtgggcatggagctgttttacgccgagggtcccgccatcgtccgggagatccgccgccggggccaccgcatctttctggatctgaagctccacgacatccccaacacggtgaaaaaggccatggccgccctgtcggcgctggacgtggacatcatcaacctccacgccgccggtaccgccgccatgatgaccgccgctctggaggggctcacccgccccgacggcacccgccccctgctcatcgccgtcacccagttgacctccaccgatcaggagcgcatggagcgggagctgctgatccacgccccgctggaggaggtggtgctcagctacgccgccaacgccgctgcggcagggctggacggtgtggtctgttccccgctggaggccggagccatccatcggcgctgcggggccagctttctgacggtgacccccggtgtccggttcgccggaggagatgccggagatcagaagcgggtcactacccccgccaaggcccgtgaactgggctctgactacatcgtggtgggccgccccatcactcaggcggaggaccccgtggctgcctatcgccgctgcgtaaaggagtttgcgggctgatgcgctggaatacggtacttttcgatctggacggcacggtgacggaccccaaggagggcatcacctgcgccgtggcctacgccctgcggcagcagggcatcatcgctgaccccgataccctcacctccttcatcggccctcccctccacgagagcttcccggagctgttcggcctgacggaggagcagacggatcgggccatccgggatttccgagtgtacttctcccggcagggttgggcggagaacatcccctacgagggcatggcagaatttctggaaagcctgcaaaaggccgggctgaagctggtcattgccacctccaagccggaggaattcgcccgacgcatcatggagcatttcgatctggcctcatacttccaccgcatctgtggggcgcagggggagaaccgggccagcgcccggaagggcagcgtggtggccgacgccctgcgccgcagcggcacggacggccccgccgtcatggtgggcgaccgccgcttcgacgtcgccggcgcccatgaaaacggtctgcccgccatcggcgttctctacggctacggcggccgggaggaactggaaaacgccggagccgactatctggccgccgatcttcacgagctcaagcagcttctgctgcaggaataggaggaacttatggacaacatccgcacccacattgcccggcacctgctctccatcggagcggtgtttctgcgacccgacgagccttttgtctgggccagcggcatcaaaagccccatctactgcgacaaccgcctgatcctcaccgctccggaggcccggaacgaagtggagcaggccattgccgacaccgtccgccgggagtacccggaggcgcaggtgctcatgggtaccgccaccgccggtatcgcccatgccgccatcgccgcccacctgctgggcctgcccatgggctacgtccgctccggcagtaaggatcacggccgcaggaaccagatcgagggcaagctgacccccggcgagaaggtggtggtcatcgaggacctgatctccaccggcggcagcgtgctggacaccgtggccgccctgcgggccgccggagcggaggtgctgggcgtcatcagcatcttcacctacggcatggccaagggccgccagcggctggcagaggccggtgtcaagtgcgtcagcctcaccgatctggacaccatcgctcaggtgggcgtccagcagggatacatcacgcagggagacgtggcccggctgctggccttccgggatgacccttccgacgaaaactggatcagaaaaggagaatgaaccgtatgaaccatctcattgacattttgcagctgtccccggaggagatcatggagctggtgaacaccgcctgcgacatcatcgaccatcccgccgcctatgcccacaagtgcgacggcaaaattctggccaccctgttcttcgagccctccacccgcacccgtctcagcttcgagagcgccatgctgagtctgggcggacaggtgctgggcttctcctccgccaacagctcctccgccgccaagggcgagagcgtgtccgacaccatccgcaccgtcagctgttacagcgacatcatcgccatgcgccaccccaaggagggcgctccgctggtggcctcccgccactcgctggtacccatcatcaacgccggagacggtggccacaaccaccccacccagaccctgacggatctgctgaccatccaccgggagaagggccgcttcgacgatctgaccatcggcctgtgcggcgacctgaaattcggccgcaccgtccactctctggtggccgccatgagccgctataccggcatccgcttcgtactcatctccccggaggagctgaagctgccccgctacgtcaaggagcagtacatcaagagcaggaacatcccctacatccagtctacctctctggatgaggtgatgccggagctggatatcctctatatgacccgtgtccagcgggagcggtttttcaacgaggaggactatctgcgcctgaaggacagctacatcctcaccccggagaagctgaaaaacgccaagccggacctgcggatcctgcatcccctgccccgtgtcaatgagatctccgtggcggtggatgaggacccccgtgcctgctacttcaagcaggtgcagtacggcaagtacatccgcatggcgctgattctgaagctgctgaacatcgcttgaaagggagggcatcatcatgattattgattctattcaaaacggcatcgtcatcgaccatatctccgccggaaaggccatggagctgtatcgcattctggggctggacaagctggactgcaccgtggccatcctgaaaaacgtcaccagtggcaagctgggccgcaaggatatcatcaagatcgaccgtgagatggaactggactgggatctcatcggctacgtggaccccagcatcaccgtcaacagtatccgggacggccagttggtggaaaagcgcaccctgaagctgccggagcgcatccgtggtgtgctgcgctgcaagaatccccggtgcatcacctccgtggagcaggagctgccccaggagttcgtgctcaccgaccgggaaaagcgggtctatcgctgcatctactgtgagacgcaggcggaaaaataaggttgcacagaggagcgccccgatggggcgctctttttttgcggcggcccgccatgggggtctcactcccccttttatcgccgtgtgcctccggcatatcgtaatacaattttgtatacataatttgaatcgaaaacaccgatagcacggccttatctcctgaaatcgctatttgccactcgtggaggctgatggtagaatctctgttgcaaagtgcttcggcagatcgctgccagtgggtgaaccatgcgatcaggacggctattccgaagctttgaagatatcgtgccgtcaaggcacaacaggaggcaggcaaaattgctcactatgggaatcgattccggctccgccatgaccaaggcggtgctgtttgacggacaggagatcgtggactttcggatggagcccagcggctccacccccggccgggtcatccatcggctctatgaggaactgaggacccccgacaccgcctttgtggtggccaccggctatggccgggcgctgctgccggaggcggacaagtccattacggagatcacctgccacggagccggggccgcttttctctgtcccggctgcgacacggtcatcgacatcggcgggcaggacagcaaggtgatcctgctggatccctccggcgggcaggtaaaggacttcctgatgaatgacaagtgcgccgctggaacgggccggtttctggaaatgactatgagccgggtgggcagcgacatcgcctccatcgacacctttgtggagggggcggagccggtgaccatcaacagtatgtgcgccgtgtttgccgagagcgagatcatcggtctgctggcacaggagacgcctcccggcagcatcgctctggggtgcatctactccatctgccgccgcaccgctatttttgcccagaagctggccccggagcaccccaaggtgttcttctccggcggactggcccagtcgcaggtagtgcgggaggtgctggcccggtatctgggggtagagagcgtcactgcccatcccctgtgccagtataacggcgccatcggcgctgcggtgctgggctggaagcggatcaatcggtaaatgaacaggaccggctccagccggtcagtatatatgtgaaaagaaaggaacagtcatatggttgaactgaaaaaggacctgccggaaatttttgaagagtttgccgatcagcggagaaactcctttctggccatcaagaagctgaaggagcagggcgtgcctgtggtgggtgccttctgcacctacctccccaaggagctgccccgtgccatgggcgctgcggtagtgggcctgtgttccgtgtcggatgagaccatccccgacgccgagaaggacctgccccggaacctgtgtcccctcatcaagtccagctacggcttcgccaagacggacaagtgtcccttcttctacttctccgatctggtggtgggcgagaccacctgcgacggcaagaagaagatgtatgagatgctggccgagttcaagcccgtctacgtcatcgagctgcccaaccggcagtccgaggagggcatcgccatgtaccgccgggagatcattcggttcaaggaggagctggagcggcgcttcgagaccaccatcaccgaggaggccatccgccacgagatccacctgaacaacgagatcaccaagtccctgctgcggctgcagtacctcatggccaatgatcccgcccccgtcagcggtctgaacattgtcaataccgcctacggcagcggcttcaacatggacgtggagtccctgcccgcccgcatcaacgatctggcggaccagatcgaggcggagtacgccgccggcaagaacgagggcaagaagccccgtatcctggtgacgggttccccctccggcggcgcagccctgaaagtcatccgggccatcgaggacgccggcgccgtggtggtggcctttgagaattgcagcggtctgaaatccatgctcctcaccgacgaggagaatcccgacgtctatgacgctctggcccggcggtatctgggcatcggctgctcctgcatgtcccccaaccccaaccggttggccatgctggataagctcattgacgagttccatgtggacggcgtggtggatatcatcctgcaggcctgccacacctacaacgtggagacggcgctggtgggcaagctggtgaaggagaagaagggcatcccctacaccgtggtggagaccgactactctcagtctgacgtaggccagatccagacccgcatggccgccttcgtggagatgctgtaaggcggagcggcgtatgaaattcgactttaccaccatctatgaccgccgggggaaggatgccatggcggtggacgccgtggagaaaattccggtgttccagcccaacgagggcttcgacgccatccccatgtgggtagcagatatgaacttcgccacggcccccgccgtgacggaggccatccggaagcggctggagcatcctctgttcggctactttatgaccagcgatgagtactttgactccatcatccgctggcagcagcgccgcaacggcgtcaccggcctggagaaggagcacatcggctacgaaaacggcgtactgggcgggctcatgagtgccttggccgccgtatgcgccagaggcgacaatgtgctggtccactcccccacctacatcggcttcacccgttccattgaaaacggcggctatcacgtcatcaccagccccctgaagccggaccgctacggcgtgcagcgcatggacttcttcgacatggagactaagatcaagcgcaatgacatccgtgcggtggtattctgctccccccacaatcccacgggacgtgtgtgggagcagaaagagctggagcacttcatggacatggcccgacgactgaacgtaacggtgatctccgacgagatctggtcggacctgacccttcgtggccatcagcatatccccctgcaatccgtgtccgacgacgcccgacagcgcaccgtggccctgtacgccccctccaagaccttcaatttggcggggctcatcggcagctatcacatcgtgtataacgaagctctccacaaacggatgaagaaggagagcagcctcagccactacaacagtatgaacgtgctgtccatgcacgccctcatcggcgcttacagcgacgagggcagccagtgggtggatgagctgcgggaggtactgacggagaacgtcaagtacgcctgcaagtttatccgcaagaatctgccgggggtcagcgtgcagcagccggagggtacctatatgctgtttctggactgcgaggagtactgtcggcgcagcggccgcacgctggatgaggtaaaaaaggccgggtacgaggtgggtgttgtgtggcaggacggccgtcccttccacggggcgcaccacatccgcatgaatctggccctgcccatggagaaggtcgtcatcgccatggatcggctgaaggaatacgtgttcatctgatagagctcccggcaacgggcttctatacataccaaataaccattaaaaacacaagaggagaaaagacatgaagaagctttccaaagtcatttgcctcgttctctccgcactgatgctgctgagccttgcggcctgtggcaagcaggccggcggggcggacgatgctcagggtaagcccatcgagggcggcaccttcgtctacgccatcgaggagcccatcacctccctgaactggtacaacaacagctccacagacctgggcaagcaggtgttccaaaatctgtacgatcccatgtggaagtccaacaccgatggctctctggactatcgtctggcgaagagtgtggacatcagcgaggacggtaccacctacaccctgaccctgcgggacgatatcttctggagcgacggtgagaagatcaccaccgacgacatcgtgttcactctggatacgctgactgttcccgaggtggctcccagcaccgctgccgcctacaaggtggacggcgagttctgcacctatgaaaagcagagcgacaccgtcatcgtgttcaaggtcggccgggcctccaacctgttcaagaaggctctgggcgccctgtacgtcctgcctgcccactgcttcaatggcgtgcccgccaccgaggtgctgacctgtgagcagaacgccaacattgccaccagcggcgctttcgtggtagatagcttcaacgtgggcgagaagctggtgtgcctgaagaatcccaactactaccgcacggctgcccatatcgatggcttcgaggttcgttgcgtctccgacgccagcacccaggagatcgccttccgcaacaaggaactctccatcttcaccatcagcaacgccgagacgctggccaactataaggataacgacgagtatcaggtggtgtcctaccccgacggccgcatcaccttcatggagatcaaccccaacagcgaggccatgtccaccatggaggcccgtcaggccgtgatctatgcgctggatctggacgctctggtgtacggcacctacggcgacgaggccctgtgccgtaccgccaccagcatcctgtccaccgtttccatgttctataaccctgagatcaccaactacaagcaggacctggacaaggccgcccagctcatcgagcagaccggtctgaaggacaagaccatcaagatcatctacaactccgcccgtgtgggtcaggaggagctggccaccatgatcaagagccagctggacgctgcgggtcttaacgcccagatcgattccatggagaccgccgcctacttcaagtcctacttctatgccaccgattcctatgacattgctctcatgggcaatggtatgctggacgaccccagcggcttcgtgggtctgttcgcccacacccgctccggtgccaatatgtacaccaccgacgaggtggataacatgtggaagcagctggaccgtgagatggatcccgctgtccgtcaggacatcatgaatcaggctctgcaggccctgaaagactgctggtcctgcgtgcccgtgctggataccaactatgtctgcgccgcccagaagaacatcggcggcttcgaggccagcgaccgtctcactgacctgacccagatctacttcatcggctaactccgccgctgagagtgcaattgcgtggagcaagtctccacgcaattgcactctcacggcggtatgaggagaacacatgaaaaaatactttctgaccagactggcgctggccctgccggtgatcctgctggtatccgtcttttcctttgcgctggtgttcctggctcccggcgaccccgccgcccagtaccggacgctggagatgaccgacgaggaatacgaacagctgaaaacggagctgggctacaacgatccggtcatcgtgcagtatggccggtggatggggaaggtcctccaaggggacttcggcgtctccaccagcagccacaccggtgtgtggcccctcatcaaggccaagctcccggctaccgtggggctcatggccgcctccatcgtcttttccctgctggtatctatcccactgggaatgctggcgggctactttgaaaactcatggttcgaccgcatcaccaacggcctgcactatgtggccatctccattccctccttctggtttgccatcatgctcatcatcctgttctccctgaatctgggctggctgcccagctccgggatgcggaccaccggcgtacacaccttctgggatctgtcccgccacgccatcatgccggtgctggtgctgagcatcggaaagatctccatctatgcccggtacgtccgggccgccaccatccagcagctgtcggaggactacgtgctcttcgccatctccaagggtgccagccgggtctatatcctgctgcgccacgtgctgaagaactgcctgctgccggtcatcacactggtgggcatgaatctgggcagtctggtgtccggtgcctacatcgtggagaccatcttcggctggccgggactgggtaccaccggcatgagcgccatctactcccgtgattacaacatgatcatgggcaccaccatgctctcgtgcctgctgctggtgggcggaaatctgctggcggatctgtgctactgtctggccgatccccgcatcaaggccatgcgaggtgacaagcgatgaaaaagaatcataagctgcccctctccatggttctcagcggcggcgtgctgctgatcattattctggccaccctgctggccaccctgtccccctacgatcccattgccgtggagaccgggcagaagttcctgcctccctccgcccagcacctgctgggaacagataacttcggccgggacaccttcacccgcctgctctacggcggacgggtctccctgctggtgggctttctgtccatgctcatctccattgtgttcggtacggtgtacggcatcgttagtggctcctccggcaagctggtggacggcttcatgatgcgtatcgtggacatcctcatgtcggtacccagcttcctcattatcattactctgaacatctacatgaacgccggcatccggacgctggtggtaaccatcggtctgttctcgtggatgggcgtggcccgcatcgtccgggcggaggtgctgagtctgcgggagcgggacttcattctggcctccgaggggctgggcgcccggaagagctgggtcatcacccggcacttcgcccgcaacgtcttttccccggtgctggtggcctccaccaacagcatcgcctccgccattttgacggagtcgtccctgagctatctgggcttcggcatctccatccccaacccttcctggggcggtatgctggagggcgcccagacctacattctcacccacccctcactggcggtctatccgggcgtgtgcatcctgctgaccgttctgtgcttcaatgtgctgggcaacggcttccgccgccgcttcagccccaattccgggaggtaagccatgcatcaatatgatatccgtgacctccgtatccactttcccacccgccgtggcgtggtggaagcagtgcggggcgtcagcttctacatggatcagggcgagtgcgtggcgctggtgggggaatccggctgcggcaaatccgtgacagcccgctccctcatgggcctgacggaggtcaccggcggacgctgtcagcccggcagtcagatcctctgccacggggagaacatcctcgattacagcaaaaagcagtggcaaagctatcggggccgggaggccgccatgatctttcaggacgccatgacctccctgaatcccaccatgcaaatcggccatcagatcgctgagtgctaccgctttcaccagaagatcggccgcaaggaggcgctggagaaggcggcagagatgctggcactggtaggcatctccgacccggagacggccttgcgccggtatccccacgagttctccggtggtatgcgccagcgggtgatgatcgcctctgcgctggcctgtcagccggaactgctgattgccgacgagcccaccacggcgctggacgtgaccattcaggcccagatcctggacctgatccgccaaatgaaggagcgcagcggcaccacggtgctgctcatcacccacgacatgggcgtggtggcgggactggcccagcgcatcgtcatcctctacgccgggtgcgtcatggaggccggcaccaccgatgaaattttctatcagcccgcccatccctacaccaggggcctgcaaaaggcttccccccgtctggacgaaatgggcggcggacggctctacaccatcgagggaacgcccccggagctgatcgcaccgggtcccggctgccccttcgccccccgctgcccccacgccacggagcagtgccgccgggagatgccggatctgcgggatctgggcggtggccatctggtggcctgccaccacgcagaacaggaggtgacggcatgagtcagcccatccttcaggtggagcacctgaaaaaatactttcccgccgggggccgcaaggtgctgcgggcggtagatgacgtgagcttctccgtgcaggagggagaaattctcggcatcgtgggtgagtccggctgcggcaagaccacctgtggccgtaccgccatcggcctgtacagcaaaaccgacggcgtctccctgtaccgtggggaggacgtccaccagatgcgtggtgccaagcgccgtgccttctgctgtcaggtgcagacggtctttcaggacccctacgcctcactggaccccaaaaacaaggtcattgacctcattgccgaaggaatggacatccaccacctgtacaccggcccggcagagcgccgggagaaggtgcaggccctgatggaacaggtggggctgaacccctccggcatcgaccgctatccctacgagttctccggcggtatgcgccagcgcatcggcatcgcccgtgcgctggcggtggagccccggctgctgctgtgcgacgagcccatttcggcgctggatgtgtccattcaggcccagatcgtcaatctgctgctggacctacgggaacagaagtccctgacctatctgctgatctcccatgatctgtccatggtgcggcacctgtcggaccgtattctggtaatgtatctgggggaggtggtggaggagagcacggcgcaggagctgtatacccaccccctgcacccctacaccaaggccctcattgccgccatccccattcccgatcccaaggtggaacgggcccgcccccgcagcgtgctgcagggacaggtccccagtcccgtggatccgccttccggctgccggttcgccgggcgctgcccctacgccacggaccgatgccggatggagaagccggcgctctgcgacatgggcggcggccaccgggtagcctgtcatctgtgccggtaacggactgatgcatcgcatttccctatgaaatgccggccatcatcgttttttgccgttttacctgcccctatcggggcggtataatgatcccagaacaaaggatcctgcccccagcgggcagcctgataggaggtaacatcacatgagcaaaattttagtcaacgccgtgggcgacgcctgccccattcccgtcacgaaaaccatccacgccctgtccggcatgaccgaggccggtacggtggaggtccatgtggacaacgagaccgccgtacagaacctgaaccgtctggccaccggcaagggcctgaagttcagcgccgagaagcgggaggagaagctgttcgtggtgaccctgacggtggacgaccccgccgccgtgtccggcaccgccccggaggaggcagcctgcaccccggataaccgggacaacaccgtggtggtcatcggtaccagctgcctcggctccggcgacgacacgctgggtgccacgctgatgaagggctttctctacgccctgagccagcaggagcgtctgccccgcaccatcctgttctataacggcggcgccaagatcaccaccgagggttccgtctccatcgaggacctgaagaacatggaggcacagggtgtggagatccgcacctgcggcacctgcctgaactactacggtctcaccgacaagctggccgtgggctccgtcaccaatatgtatgacatcgtggagaccatgacctccgccggtaaggtcatccgcccgtaatttttccccaatagcataataaaacagggaagcgctgtgcgcttccctgttttttgtcggccacggacgagacggtgtcagcggtgcagcagctgctggctggcctgtgccatctcctggaagatacctgcgtgacggcgggacacaatggcccggatcaccagcagtgtgccgatcatcagcgccacggcaatggccagacacagccacaccgactggacgagtcctgcgatgatgaagctgacgaaggccacaccggaggcggtgagggcatagggcaactgggtgaacacatggttcaggtggaagcagtgagcgcccgccgaggccatgatggtggtgtcggaaatgggcgagcagtggtcgcccataacgccgccggagcaggctgccgccagaccgatggtacacagcaccggctccacgtcgtagttgaacacggacaccacgataggggccatgatgccgatggtcccccaggaggtgccggtggcaaagccgatggcgcagccgatgaggaagatcaccgccggcaggaacaccttcagatccccggcccctgccatggcgttcttgacgaacacggcggagtacatcccgaagcgggtgaaagagcacagggtccatgcaaaggtcagaatgaggatgggggcgatcatctggataaagccctgcggcacagactccatagacttttcaaaggagatggccccccgcagccagaagtacaccaccgtgaacagcatccccataaggccacccaaggccagcgccatgccggaggaggagttggagaaggcccccacgaagtcgtggaagtactcgctctcgccgtcatagtagccgccggaccagatcagggacacgatgcacaccacgatcagcaccaccaccggcagcagcagatccagcacggaggagtgtccacgggcgggcttttcatagtcgtcggccccctcaaaggggcgctccggcgtggtaaagagatcgtccttcacctgagcgttatactcatgggtcagcatggagccgtagtcgatgttcatcaccgacagcaccacgatcatcaccaacgtcagcagacagtagtagttccacgggatctgcttgatgaacatctcgatgccgttgacggcgtcggactgtacatagccggataccgccgccgcccacgaggacactggggcgatcatgcacaccggggccgccgtggcgtcgatgaggtaggccagcttggcacgggaaattttgtgactctcggtgacgggccgcatcacagcgcccaccgtcaggcagttgaagtagtcgtcgatgaagatcagcacgcccagcagcatggtcagcagctgtgcggcgcaccgggtctttacggtcttggaggcccagcgtccgaaggcctccgatccgccgcccttgttcatcagatccaccatgatgcccagcgtcaccagaaagacgatgatgcccatgttgccgctgtcggccagcacggagacgatgccgtagtctgcgcccaccagcgccacaatggtgtcccatggggcaaactgggcgtacagcagagcgcccaccaaacatcccagaaacagggacgagtagacctccttactgatcagggccagcacgatagccacgatgggcggcagcagggaccagaaggtaccggcaaagggcgtgtcggccagcaccggctccccctctacctccagcgtgggcaggggcgtctcccggtatgtaaggcccagcaccaccagcaaaacgaggaatacaccgacggctgtaaagtatgcgatttttgtgcgtttcttttccattgcgtgattcgacctccttataggatattccgtggctcctaacggcaccgattatgggtccggaagcttaataaaccgacagggtgtttcttaagttttctgaagacggaaaacccgctctcccgtcagcacctcccgccgtgtgccgttcttcaccggataaagcgcagccgccggatgttgtccggcggctgtgctcaccaaatttgaggggtctatccccgtcaccccttccgggaggataatcccattctaccggtgcctccttaatatttcgtagcaaaaagtatgaaggtttcttaaggctctgctaaaaaagccctcaggggattgacggcggcggcagaatcgctatcataaggtcacagattattttcagcactatattcttttgtatatatagtttttatcaagttttgtcgaattttctgcactatttgtcaaggaggagatatcatgcagaagcgatgtattctgtgtgccgatccggatccggaactgcgctccaatctggggttcctgctggcaggggagaactgcgtgctggaggaggccgccggtggggccaccctgctgacccagctgcggcggaatacagaccttgtcatcctgccccagcagctgccggatatgagcggcttcgacgcctgcaccgctctgcggcggcagtccgctgcgccggtgctgttcttgctggagaaggcggacgagagcgccaagaccctgtccttctccgtgggaggggatgactgcctggaaaagcccgtctcctgccatgagctggcggtgcgggtgaaggcgctgctgcggcgctactgcgtctacggcgcccggcccgccgggctggagcgtcggctgcggtgcggcgggctggaggtggataccgccgccggcaccgtgtggcaggagggtcgggaggtaccgctgacggagctggagtatcgcatcgtcctgctgctggcctcctatcccaacaaaatcttctcggcggagaacctctacgagagcatctgggaggaaccgtacttttacagctgcaagaacaccgtcatggtccacatccgcaacatccgccaaaaggtgggcagcggtgccatctgcaccgtgtggggtaagggatatcgcatgggcccctccaagacctgacatccccctgtccaccggccgcttgacagtccctccgcttttgcgtaaaataaaggcggaaaataccgcaaaacgccgttgaggagggatatttatggaccgtatcaagaaaaatttcggtttcggctgtatgcgcctgcccatgtcaggcgacgaggtagacaaggtccagatgtgtcagatggtggacgcatttctggaggcgggctttaactacttcgacaccgcccacggctatctgcagggcaagagcgagacggccctgcgggactgtctcaccagccgctaccccagagaccgctatgtgctgacggataagctcaccggcagctacttcaagaccgaggcagacatccgtcccttctttcagcgccagctggaggcctgcggcgtggagtacttcgatttctacctgatgcactctcagcatgccgggaacttcggccacttccgggagtgccgggcctatgagacggccttcgccctgaaggccgagggcaaggtccgccatgtgggtatctccttccatgaccgggcggaggtgttggaggagatcctcaccgcttacccccagatcgaagtagtgcagatccagttcaactacgccgactatgacgatcccggtgtccagagccgcctgtgctacgaggtgtgccgccgccacaacaagcccgtgctggtgatggagccggtgaagggcgggcacctgtccaacctgccgccccaggccaaggctgtgctggatgagctccacggcggcagccccgccagctatgccatccgcttcgccgccggcttcgagggcatcctgatggtgctctccggtatgagcacaccggagcagatgcaggacaacatcgcctttatgaaggacttccggccgctggatccgcaggagcgggccgccgtggatcgggtacaggcgatcttccatgggatgcacctgatcccctgcacctcttgccgctactgcgtggatggatgtccccagcacatcgccatccccaatctgttcgccctgatgaacaccaagcaactctaccacgactggaacgccgacttttactatgaggacgtccacaccgggccgggccgcaaggcatcggactgcatccgctgcggccagtgtgagcgcatctgtccccagcacctgcccatccggcagctgttggtggacgtggccaaggagtttgaaaagcctcaggcgtgagggcatcccaaaagcgtatcatgaagccccctgctccccccccttggggtcgcagggggctttttcttccgacaacaaaaagggatgctgatacagagtatcagcatccctttttgttgacgtaggtatcagctaaagctgatctctccccgcatagtctttgacagcagctcatcgctctgcaccggcagctccgtggcgtactccacccgattctcaagtgccgtgcgcacggctacctgccgatccagtgggcagtccagcaccgtgaattgataggtattgcaggcccccagcgtctcccaatccatggtcgcctgatagctcaggatgagatcgtgatagcttgcctctgtcagtgtgcggatatccgtcaccgccgtatggctgccatccagcagctgataccgccgctctccagctgctgccggacccaatccgcctcttgaaattcctcggatttatagctgatgaacacgtcctgtcccatagcggtcgcctccgttttatgtcttgtcatgggcgattataccatgcagacgccgctatttcaacgggtcaagccccggaaatttccctactccttatacgccccaatggtaacgtcggcatagtaccagtgtatgatctcctgccacgtcttgccctgacgggccagcagctccgccccatactggctcatgcccacgccgtgaccgaagcccgtgacccggaaggtaacgccctcctcacccgtatccacggtgaagcacgccgagcgcagggagaacagccgccgcacctccgtcccctccacgctgacaccgccgatggtcacacgctccacccggccggagtcgttgaccgtccgatcccggaaccactccgccgggtcgccggagaggtcggcatccccatgggccgccagaaagatctcccggaactcctccggggagaaggtgctgacgctgtaatagttggggacgctgtcctccccctccggggtctccacgctgtgcagatacggcagcgaggaggaccacacatccccggaatctgctgtgaccccggcggaggaggagtggaaggccgccagaatgggcgagccgtcatagaggatgatctgcccgtcggtatcccgcactgcctgctgcaccttggtctcgtactcctccgccttgtccccccaccgggccgctgcgtcctcctgcgatacgtaggcgctgcagcaggccggggaggtacagacatccgcctccggatgggcatccttacgtccgcccgccatgtggtagcagatgaaggtgcgctccgccacagcctgagcgtccagcgcctgctgggagaaggcggcgggcatctccccccgcaccacccccggcagatactccgccatggtcatctgccgcagctcctgcccgtcccacacggtgagggcaatgtccgcatccgcccgctgctcctcagcggcgagcggctccggctgggcctgtcccccctccggggcctccgccagccacgggatgccaaacagcaaaagcatcagcacaagtgtcaccgccgcacaggaacgcatgggacatacctccttctcctctgtaccgtccatgggaatttgtcccttcatggtatgcaccggcggtgggaaatagacctgctaaaaccacaaggcggagaacctctcggttctccgccttcatggtaggaagattgatgaaaaaagttatttgtctcttgcaagtataggatacccaagggatgttacaaaaattcgggggtaattattacaaaagtcttaaatgtttttcggcggaaaatcagctgctcactcccccagaatgtgcatgaattcctcgccggtgatggtctccttctcatagaggaaggccgccagacggtccagcttctcccggttcgccgtaaggatgtccaccgccttgtcatgctcccgcttcaccagctccaccacctgttggtcgatcttggtctgggtatcggcggagcaggccaacgaggcgtcaccgcccagatactggttggtgacggtctccagcgccaccataccgaagtcgtcgctcatgccgtagcgggtgatcatagcacgggccagtttggtggcctgctcgatgtcgttggaggccccggtggtaacggagccgaacgccacctcctcggcagcccggccgccggtaagggtagcgatcttgttctccatctcctccttggtcatgaggtagtggttgccctcctccacctgcatcgtgtagcccaaggccccggaggtgcggggtacgatggtgatcttctgcaccggggcggagtgggtctgcatggccgccaccagtgcatggccgatctcatggtaggcgacgattttcttctcgtgatcggtcatgatggcgttcttcttctgatacccggcgatgaccacctcgatgctctcctccagatccgcctgcgtggcgaagcggcggccatcccggacggcccgcagggccgcctcgttgacgatgttggccagctctgcgccggaagcaccggaggccatgcgggccaccttgttgaaatccacatcctcggcgatcttgatcttcttggcatggacctttagaatttcctcacggcccttcagatccggcagctccaccggcacccggcggtcaaaacggccgggacgggtcagtgccggatccagcgactccggacggttggtggccgccagaatgatgacaccggtgtttccctcgaagccgtccatctccgttagcagctgattcagggtctgctcccgctcgtcgttgcctcccagctggccgtcacgtttcttgccgatggcgtcgatctcgtcgatgaacacgatgcaaggggctttctccttggcctgacggaacaggtcacggaccttgctggcgcccatgcccacgaacatctccacaaattcggagccggacatggagaaaaacggcacgttggcctcaccggccacggccttggccagcatggtcttaccggtgcccggagggcccaccagcaggatgcccttgggcatggaggcaccgatgtcctgatacttgctgggatcgtggaggtagttgaccacctcctgtaaattctccttggcctcgtcctctccggccacatcgtcaaacttgatgccctcggcggacttgacgtagaccttggcgttggacttgcccatgttgaacatcatggagtttccgccgcccattttcttcataaggctgcgggacagcatctgccccagcccgatgaagatgatcagcggcagcacccaacccagaatactcaccagcagcgaggtctgctggatctccgtgccgctggtggagatgccggcctccagcagccgggagaccagatcgtcgtccggcaccatggcggtcttatagatggtcttttcttcggtgtcggtgaacaggatacggttgtcctgctcctgaatgtccaccttgccgatctccttcttctccaccatgctgacgaaggtgttgtagtccacctccttgatctggtgctcggagatccacggcatggccaacagattgaacagcagcagcaccagcatcaccagcaggtagtagtacagcaggggctttttcggtgatttgacctcattcataggcgtttcctccgtgtcgtccggaccactgaaggcctccggcggcccgcaaattttgataccatcgatggtattgaaaaatagttgttacatagtgtagcacaagccaccggaaatagtaaacgactaaattgtaaatttcccaccgcaaacggcactttttgcgtttttcaggtcgcagcaataggccgccgtatcgttcacgcacagggcgttgtacatctgccgcttccgctccagatcgctctggtcgggcatgaccgttccctgctctgtctgcccgtttttctgttccatgccgcagtatttctccggtcagaatctgtgatagacactgtatctgcgccatatcgtctgtttgtcccgattatatgccaagagtcccgcccttgtaaagagccgatatggggcagacgtggatcaggtccgcccttcggggcaaaaggaaaaacggcaggcatcctgcgatgcttgccgtttttttggcgcggaaggagggatttgaaccctcgcacgcggtttaggcgtctactcccttagcaggggagccccttcggccacttgggtacttccgcaggccggtgataaagctggcggagagagtgggattcgaacccacggatgctttcacatcgccggttttcaagaccggtgctttcgaccactcagccatctctccgtgcgtaaaagcaaacctctgccagaagcagatatgattttatcatccccggagccatttgtcaacacaaaatacacgctccctgtgaaaaagaggggccgcagccacgctgcggccccctcccgtcatagacaaagcggcgttaccactccagattcttctccgtctccttgctgaacacatgggccacattgccgccgaagatcatattgacctcgctgccggcggggaaatgggccgctgcgccgttggtggggacgatgacgatgacgtccttgccctccgccgcaacatggaggtggaccgacgagcccatcatctcggacacatccaccttgcccttcacgccgtcggcgcacagcatgatgtgatccggacgcacgcccagcaccacgtcctgctccgccacatctttggcggccagacgctgctgcttctcctccgacagctccacggtgacgctgcccacggtgacggtgtacttgccgtccttacgggccagatgtgcgtcaaagagattcatctggggcgtgccgatgaagcccgccacgaacaggttggccgggtggtcgaacacttcctgcggcgtgccgatctgctggatgaagccgtccttcatgatgacgatgcggtcgcccagggtcatggcctcggtctgatcgtgggtgacgtagataaacgtggtgtcgatgcgctcccgcagcttgatgagttcggcccgcatctgattgcggagcttggcgtccagattggacagaggctcatccatcaggaacacggcggggtcacggacgatggcacggccgatggccacacgctggcgctggccgccggacaaagccttgggcttacggtccagatactgggtgatgtccaaaatctccgccgcctgacgtacccgccggtcgatctcatccttgggtaccttcttcagcttcagggagaaggccatgttcccgtataccgtcatatggggatacagggcgtagctctggaacaccatggcgatgtcccggtccttgggctccacgtcgttcatcagcttgccgtcgatgtacagctcgccgccggagatatcctccagcccggcgatcatccgcagggtggtggacttgccgcagccggagggacccaccagcacgatgaactccttgtcggcaatgtgcaggttgaagtcctgcaccgccaccacgccctcgtcggtgatctgaagatcgtttttcttctccggctcgccctttttctttttcttctcggtgttgggatagattttcttgaggtttttcagtacgacctctgccatatgcatctgactgtgaccgccctgcctccgcatggagcggcctcacgcccggctcagccggcacgccttgcgacaggtctccacactgccgcaccgccagtcacagcggaccttgttcctccttttttaagccgtgcggcaccatagtgagaagtggagtgaataccgccggtgggaataagatactttatcttaccgcatttttgcagaaaaatcaaccgtccgcagcgtcctttataggaaaaatctacaaaaaggctgtgtgccgcagatctgcggcacacagccttccttcttacgcagcccaacgcatcacacgcccagcttctccagcgccgccagacgcaggcatgtacacagcacctgcgccgcctgctccagctccgccaccggcggcagggacggggcgatgcggatattgctgtccgccgggtccacgccgtaggggtaggtagccccggcgccggtcatggtgactcccgcctcccggcacagctccagcgcccgccgtgcggttccgggcatggcgtccagcgagatgaagtagccgccggtgggcctcgtccattgggcgatgtccagcgggaccagctgctccagcgccgtcagcaccgcccggaacttgggggccagcacggcggcgtggcgctgcatcagcgccagcgtatggctgcgatccttcagatagcgcacatgtcgcagctggttgatcttatcatagccgatggtctgcacgccgatgagggacagcatatgggccatattggcctcgctgcacgccatcaccgccacccccgcaccggggaaggtgatcttgctggtggatgcgaactcatagaccatgtcgccgtttccggcctgccggcacaggctcagaatatccgggaaggggacgaactccccctccagctcatggatacagtaggcattgtcccacatcagcatgaagtccggggcggcgggcctcatagccgccagacgctgcaccgtctccgccgaataaatgatgccctggggattggagtacttgggaacgttccacattcccttcaccgccggatcccgcaccagccgctccaccatgtccatgtccggcccctcctccgtcatgggtacggtgatcagctccatgccgaaggattggcagatgcggaagtggcggtcatagcccggtgcagggcagagccacttcaccgtctccagcttgccccacggcttctcgctgtggagcatcccatgggtatacgccttggagatggcgtcgtacatcagctgcaggctggcgttgccgccgacgaacacctgctccgcccggcagcccagtatctcggcaaacagcgcccgtgcctccgggatgcccgccagctcgccatagttccgggtatccagcccacccgccagatagtcctccggtcgggtcagctgtgccatctcccgtgtcaccatgtccagctgctccgtgctgggcttaccacgggccatgttcagcttcaggcccagtgccttctgtgcctcataggcctttcgcacggcggcgtattcctcccgccgctggtcggcggtcatatccgcatatcgtttcatattctcgctcctttcaggaaagtctattctcttactgcacctcgtacagatccgtcctccgggccgacaggatgggcagctgacggcggatgacatcgatgcgggaaagctccagctccgtcacggctacctcctcccccgtgccgcactggtgaacgatgccgccccacggttcgcagaccatggagtggccccacgccacatagctgccgctctcgtcacgggccggggcggtacccacggtgaacagctggttatccaccgcccgctgccgcagcagcagctcccagtgggcggggccggtggtcatgttgaaagccgccggggccaggatcatccgggcgccccgcagggtcaacacccggcacagctcctcgaaccgcaggtcgaagcacacgcatagccccagcctgccccacggggtatccagcagcgtgatgtcgtttccgggggcgaaggtgtcggactccatgaagtactgtcccccctccacgttgacatcgaagaggtgtatcttccggtgccgggccgcctgccgcccttgatcgtcgtagacgtagcaggtgttgtaaagcctcttcccctcccgctccgggatggtgccgcctacgatccagatgcccagctcccggctcagcgccgacagggcctgctgggccgggccgccctgctcctcgctgttgggacggaacatctcgttttcataggggcagcagaacatctccggcagcatcaccagctgcgccccctgctccgccgcccggcggatcagggcacaggcccggcggaggttctccgccttgtcccggcccaccatcagctgaacctgccccagcttcagcgtcatactgtccatatgtgacccccttccttaaaactcccgcagcaccagctccgtcacgccggggcctgccgcctccagccgaagcacctgcgggtgtctgccgtattcccggcgcaccaactcccgcagggccgtgccgccgtggtgtccgtggatgacccggatgcgataggtaccgggccgcacccggcgcagggcggcgtccagcgtcacccgtgcctgatattcgtttttcccgtggagatcgatctcccagatccctgcgtacatcccgtggcctcctgcttcagtatgctgctattgtacggcaaagccgttgaactttcaaccgctttctgctatgataaggaaagaaagcgtgttttcgccgctctcgacgctgcggcgcttttgccgccgctgtgatacgaaaggaatgtctatgaaaaaatatcagaag

SEQ ID NO: 12346 - DNA, 71569 bp, Unknown
  gut microbiota DNA sequence
cactgctccaatatcgccgtggccatgatcgagctggagtccgacgccttcgatacccacgagtatttgaagagcgtcaagaacatgaaatccgactccttcgcccgctattacgaggaatacagcaaaaaatttgctttgtaagacatgaaaaaagcaccgacagaggacaaggaaacacccctgtaaggggcggggagacagctgccggtatgcctgtcggcagccgtctccgcattggccatcaaagacaacccccggctctgccgggggtaaaaaatagcctatggcgaggggaaaagtagacaagaaaaagtctccgagttagagtaaggaagaggtttgccgaccaaaacttacaaaaacaaggagactaattcatgaaagaagtagatgtaagtagtttagaacataccagttggcgttgtcaataccatgtggtgtttgcgccgaaatatagacggatggagatatatggaaagataaaagaggacatagggattatactgcggaagttgtgccagcaagtggatacggtaggccgcaacaagaaagcgatcaaggcgtacatagaaccagttggaggaggacaaaatatccgaccaaattagcataaaggaatttatagacccgtttacgggtagtaagaatcccaaggcataaataaaaaccccttaaagggtagcctgagaaggagtgcggccggcagacctttcgggccccataagggcttcgtccgtaataggcccttatagggtctggtcaaccctccggcttagccggagggtttgatttttatcccttttaccttttgtgttgatataagcctatccgccaaatccttcgtcgatttaacggaactctaagcacatgaaaaggagcaaggtatatttcaaccttgctcctcctatgggatatatactattcagttcgacaaattgaaattggctaatctattactcaacattgttatagacttcaatgccaaggatttttactatcattccctcaaggtaatcattttcggacgtggcttctgggtctattctatgcacattctcaacttgatacaggatagcatgatatacaactgtgccgccgtctttcagacgcataggaatgggtatcaaaagaacgatagccaacaagatgcaaatacctgtaactactttttttctcatattatcacactcctttgtcaaatttgaatttgtctagctgcttcattatttgtatagacgggaaagccagcaaattgttcgacttttctatattatacaatatttttgtgttactttcaaggtatgaaaagacgccgaagttgccttcggctcttttcggtgccctgcatcggttaaacttgtactggaatgatgcccttggtatcaagtcccaacttcttactcttaagttccttgtatgtaatcgggtcgttgatgcgattacatataagggagtacagttcatctaccatctgcttggtggtgaggtctttgttcttttctaaccaccagaagagcatgatgtcacaatcgaggtatttcgtggcgggtaggttctctttgccaaatataggggcaggaacgaagcaaaagaaattgttacacataattcacgattatacatagcaacacttatcttgaaaagagactgattttttgggggagagacggaaacatcccccgctgtacagtgagtacagtgggggatgtttgcatcagaagtcgatggtgccgttcagaacccgcaggtcgtatggctcgtaggtcacgtggcggtacttctccacgtccagcttcacgccggtccaatcggagtggatctcgccgttctgcttgatgaggatatcgtacagaatgtcgtaggtgatgccgtcgtcgccagtctccacgatggtggaatagggaagggtcttgtggtaggtcatgtgaaggcccttatactcgaagtggaagccgttgcgcatccggcagccgtccagccccttgtaggtgaactgcttcttcagatcctgaaggatcttgtcgtgttcctcctcatagaggttctccggagtggtctcggtgtagtcgtagcggaactggatggggatgcggtagggtaggaagcgctccacgtaatccgtcagcttctgggcggggtagttcttatacagcacgcagttgatgcgggtggggcaggcgatgcggcccactacctcgtccggggattcctccacatacttcaccagatggcgggagatattgatgcaggtgatcttgtcccggttgcgctccgtgaaggcgatcatctcgtcggcggagtatttctgctgcacggggaaggtggtgttgataaaaattctgtgggtgttgggaatggcgtccagcatcttctggagggatcccagatctgccaagggttcaccgccggtaaagacgaagtcacagcggggcgtgatctcatccatggtgtggatgctgcggagaatggcatccagactgaagccggagcagtcggcatactcctttttgttgatgcagaaggggcagtgattgttgcagtcgtagggaacaaagacggtgacagtagcgccgccttcccgtgtcttatagggattgctcatattgttcaagccagcctctcaaaataagtcgttcccgattagtctataccaaatggcacaaaaaagcaagaaatatctgcaaaaatagactgtttacttattaacaatactggaagcggagggaaatatcggagattttggcaatatgaagaaaatgaagagatgtgagcggaggaggtgtcatgctgcggtgtgatggatttctggcatggtgatgcacattcacctatgtgttatatgatctggactttgcggaatatccttgcgaaaaatgttgacttcgcacaatttgtgcgttattgtaaagataaagaggaaaaacagggccggagaagggagctgacaatgtggaaaaaacacaagcacctgttcctgtttcctgcggcggtgctgggcatacttgccgtgtgctggatgtcaggacaggtgagcgagtttaacaagtggtatctcatcatcgccgggacggtgggactatactgctgggtgtcggagcttgtggagctcctgcgggagcggaagaaggagaaggaagagccgtaagagccgaggaaccgatgctgtaagcttcagaccgggcggaaggggaacgttccccttccgctttttcattttgtggcttgtaaaaaacggcgttttgtgatatggtagggtaaaagaatttgcggggggatcacggatgagcaccagctttaagaccagtatgttcggcggctttgaccgcagcgatgtgattgcatacattgagaagaccggccgggaacacgaggagcgtgtggcggcgctggaggcggagaacgagaccctccggaaggagaaccagacgctggagaatacccagcgggtgacacaggcgcagctgctgaagatgcgggacaacgaggagacctgccgccgtctgcgccggcagctggcggatgtggaggcccggaatcaggagctggagcagcgctgcgcccaactgaaggtacaggcggacgaatacgagtctctgaaggaccatgtggcccagatcgagatcagcgcccaccgccgcacggagcagttccgggaggaggccgtgacccggctgcgtcagctggcggcccggcagcgggagtggtgccgcacggcgcaggcggactatgagcagatgaattgccagctgctggagcgcttacagcaggcagagcagacgcttcgccagccggatatgagcagcttccggcggatggaggagggcctgacggcgttggaaaaggacctgacggcgccggagaaagccggagaataagacagacggggagcattcggcgggatgctcctctttttgtggaaaatagcgattgacagacagcgttcggcatgataagatggcgctacaatccaaggggcgctggtgcaagccggctgagatgagacgtatcgccgtccggtccctcgaacctgatccgggtaatgccggcgtaggaatgcgatcatagggatttcatgttccgcattgcgacgcctgcatggctcgccatgcgggaatttttttaggaggagatccgaacacatgaaaaacaataagacccgtaccctctgtgaggctgccatttttatcgctatggcggagattttgagttttatcaagctctatgagttccccaacggcggctctgtcacgctggagatgctgcctatcatcctgttcgccgttcggtatggctgcggctggggcgctggcgccggcttcgtattcggcaccgtgacctatctcatcggcaacaagttctccatcgactggaccaccatcatctgtgactacttcctggccttcacggcgctgggctttggcgcaggcctgctggcccgccggaagtggagcgtgttctatggcaccgtcatcggcggcgtgctgcgttttttggcccactatatcatcggcgccgtggtgtggggcaagtatatgcccgatgagttcttcggcatgaccatgaccagcccgtggttctactccctgctctataacgggagctatatgctgcccagcatcatcctgtgcctggtggtctttgcggcgctgtacaagcccctgaagaagtatttcacggcggaggacctgaagctggctcagtgatgaccggatgacagctttccggggccggggagacccggctccggaaaaactttcaggagatttgaaaaaagtgttgacaaaacacaggaagcgtgtataatatagcttgttcgtcagaacacagcgggattgtgtaaaggtagcacagcggactctgactccgtatgtgagggttcgaatccttctcccgctgccataaaaggctttcggcaatcgccggaggcctttctttttatagtgtaagttcatagcgcaaaaagcaggaggggatgcagagcgtcccctcctgctttttgcggagaaagtggggcctgccgggataaaggcaggtcccttttttcataatatgcggtaggaggtgaggcggatgacggatgctaagcgaggagcgatgctacttcttttggggctattcacggcggttctcctgtacccggcgctccatgagggcggacacattctggtgacgctgctgctgggcggccggataagggaggtacggctgggagccgccgccagcgtcctttgcggcggactgcgccatggggagctggcggccgtggccttcggcggggtagggctgccgctggcgctggcgatgctgcttcgaccgaagcactttccgctgtggtatgtggtgcagttggtgaagggaatctcggtgctggcaatactgctgtcccttatttcgcttataggatgcaaatatggcgttatcgtggaaaatgatgatataatgaacgcagtacggctgtggccgaaggggagaggggtttgtcttgttcttctgtgtgccggacttttgctgtcagtgggcagcatctgcgccgcaaggccggtgcagcgggtgggagaatacttcggtatagcaaaaaaataggagcacaatggccccttgaaccctcatcttgcgtagaacgtttggttctccgccaaccgcttcggctccacctatgccctcagcgccaccacggagcagctcaacggctcctacgtccagacgccgcaggatgtggtggtgacggagaccaaccccgacgccctccagaacatccgcatcacgctcttcaagaacaatcagaccatcatcctgcaggagggtacggactaccgcatcgaggtgcggggcggcaatggtcagtggtatgagtacatctacaccgtgctggccaagaactttgccgatgacggcgtctatcgcctgaccttctactccgaggatgctgcgggcaacatagcggaaaacacgctggataccaagaagcaggagatcggcttcggcgtggataagaccaagcccaacatggtcgtgaccaatctggagagcgataccacctatcctctggagaacctcacggtgagcctgtccgccggagataacctgctgcttcagtccgtggtggtgtatctggacgattacagcaaggcctacaaggcgtggacagcagaggagatcgccgccatcgtggcggaccagggcgagttcaccttcgatattccgggcgattccaccggagcgcatcaggtgaagatcgtctgcaccgacgccgccggcaacgagcagacggaggagatcaccaacttctacgtcaccacgaacctgttcgtgcgctactacaacaataagccgctgttcttcggctccatcgccgctgtggtagtgatcgccggtgtggtgatcgctctggccgccggcaagaaaaagaagaacgacaaagagaagtaagacctgacccggcataagccggcatcaaagcctccggccccagccggagggggccttttttccgtcaatcccgccgattcgtgaaaatgtcagacacgcccctacgtttttattgcaattctccgaaaataattatataatgtgaaatacctattggtatgcgaatgggaaaggtctgcaatatggaaaagatcctgtctgtattggaaaatatcaaaggatacctgcccctgatccgcctggcggacctgctggacgtggccatcgtggcgtatctggtgtataaactgctgtcgctggtgaagagcacacgggccgccaacatcctgaagggtgtggctatttttctggcggcactgtggctgtcctcgaagctgaacctgcgggtggtgaattacatcctcagccacatggtggagtggggcgtactggcccttatcatcgtgttccagccggagatccgtcggatcttggagcagctgggcagcaagaacatccgcctgctgcggacgctggcgccggagaaggagctgccggagctggagagggccatcgaccagacggtgctggcctgcacggagatgtcccgcacccgcacgggtgtgctgatcgtcttcgagcggaagatcttgctggacgacgtggtgcgctccggtaccacgctggatgcctccgtctccagtgaactgctgaagaatatcttttttgtcaaggcacccatgcacgacggcgctgtcatcatccgtaacgggcggatcctgggggcgggctgtatgctgcccctgtctaagaatgtgaacctcagccgggatctggggatgcgccaccgggcgggcatcggcatgagcgagaattccgatgccgtggtggtcatcgtctcggaggagacgggctccatctctgtggccatcggtgggatgctgaagcgccacctgcaggcggagaccctgtcccagctgctgcataacgagctgatgccccagcaggaggagacggacaaggtccgcttcccgctgcgggagctgcttcgggcccggagaaagggggcgcaggaagatgaagaagaatgatgccagccgtaaggcgctgcggatcatcggatccattctggtggcgatcgctctgtggatctatgtggataccgttacctctccggaggtgacattgaaggtgaaaaatgtgccggtggaattctccggcgaggataccacactggcggatcgtggcctgatgctgctgtcgggctatgacaccaccgtggatctggtcatcaagggtccccggaacgagctgcgtaagctggaccgcagcaagattcggatcgtggccaataccagcaatatcaaggaggccggcagccagaccctgacctacgaggtggtgtttccggacaacatccgcagagggaagctgacggtggattctgccagcatttacagcatcaccgtcaccgtgggcgagttggacagcaaggaagtacccattcagtgcgaaattgtgggcagcgtggctgacggctacatggccggggagctgacgctggatccggaggtgctgctgctgcgtggccagcgggacgacctgctgaatgtcagctacgccaaggtgcggctggatatcaccggagctgacaagacggtggtgcaggcgctggaatttgagctgtacgaccacaacgatgtgaagatcgagaacagcgccatccgcagcagtgaaaagctcatcggtgccaccatgccggtgtggacggtgaaggaggtgcctctgcgggtgaactttgtggaggacgtgggggccaccatggagacggtggactacaccatctctcccgccacggtgaagctggtgggcgagaaggcccgactggatgagatcgacagcatcgtgctggataccctgtacgtgcaggatctggaggattcccagagcctgacctataccatccccgtgccggaggatgtgaccattgccgacggcgtggacaccgccaccgtgacggtggtggtccgtggcgtcacggagcggacactgaccgtttcccggttcacctttgagaatgtgccggagggcatgaccgccacggcagagacggagtcgctgaacgtgcggctgcggggcctgacagcggaggtgaacgccctgacggcggagaacgtccacatcgtggcagacctgtccggactcaccggcgcaggggtccatacggtgccggtgaccattcgcatcgagggctacgagaatatcggcatcaagggctcgtatcagatggtggtggatctgaaggtggcttcggacaccccaacagagccctagacatagcaagagaggtgtataagctaccatgacacagatcgcaacggttgaaaagatattgcccggcggcttcgtggagatatccgtcccccgaaagtctgcctgcggccacgactgtgaggaatgcgccggctgcggcatgaccggcgccgccatccacgcacgggccaaggaccctgtgggggtccggccggggcagaaggtggtggtggagagcgccacccggaagatattgggcgtagtagcgctggtatatctgctgccggtggtgggcttcctgctgggctacttcctgtcggagggactggcggagggcgtccgctacgccatcgccatcggcgcagcggcgctggccttcctgcccagcgtggcctatgaccgccacgccaaaaagacggaggccctgacctacacggtggtgcgggagttctgatgttcggctatgtgcgtcctgcggcggatcggctgactcaggagcagacggacctgttccgcagcgcctactgcggcctgtgccgcacgctgggacggcggtacggcctgccggcccggatgattttgaactacgatctggcctttctggccattctgctggccggcggcagcggcttttcctgcgctcgccatcgctgcccggtgcatcccatccggggctgcccctgcggggaagaaaacccggcgctggatgcggcggcggacctcagcgtcatcctgacctggtggcagctgcgtgacggcgtgacggatcacggcttcttcgggggcctgaaataccggctggccgccctgcttctccgccgcagctaccgcaaggccgcccgcctgcggccggattttgaccggctggtgcagggctgcctgggagaactggcggcgctggagcgggagaattgtccctccattgaccgcccggcggataccttcgcccggctgctggccggtgcggcaggggaggagccggatcctgtccggcggcgggtgctggcgcagctgctgtaccatctgggccgctggatatacctgacggacgcagcggacgatctggccaaggaccagcgcagcggcagctacaatccgctgcccctgcgattttcgatgcaggagggcaagctgacggaggagagccgtcaggagctggcccagaccatggatcggtccgtggagcggatggcggcggccttcgagctgttggagtgcggcgtatggcagccgatcattgaaagtgtggtatatgcggggctgtatcaggtgggaaacgccgttttgaacggcaccttccatcagcggccccggagagagaaataccctgaacgaaaggcaggacacggcgatgcgtgatccctatcaggtgctgggtgtccccagcaccgccacagacgaggaagtcaaaaaagcctatcggaatctggccaaaaagtaccatcccgataactatcacgacgatcccctggccgatctggcacaggagaagatgaaggagatcaacgaggcctacgaggagatccagaaccagcgcaagcgcggcgcctccggcgatggctacggagcctacggcggcagctatggtggctcatacggcggcagctatggcggctcctacggcggctacggcgccaacggctacggcggcagctatgatcccgccatccagcgcatccgtctggccatccgtcaggggaacctgaatctggcggaggagctgctcaacgcccgcagcgaccataacgccgagtggaacttcctgaagggagccatatgcttcaaacggggctggctggacgaggccaagcgctattacgagacggcggtgcagatggaccccggcaacccggagtaccagcaggcactggctatggcggagggtcgctccgccggttaccgtcccgccggatacagccgtgttaccaccggtggctgcgacgatccctgcacccgcctgtgcggtaccatgctgtgctgcaatctgctgggcggcggtggctatttctgttgtatataaacggggaccccatcccctttgaaggaggataaagctgtggtcaagagcatgaccggctatggccgggcgagagaaaccagaaacaagcgggatatcaccgtggaggtgcgttccgtcaacaaccggtatctggactgcaccgtgaagctgcccagagcctatgtattcgctgaggatgccatcaagggccgtgtccagaaggcggtatcacggggcaaggtggatgtatttgttaccatcgactcctccgctgcggacgtgtccgtggtgaaggtgaacgagccgctggcccgcagctactatgaggcactgctgcggctaaaggagaccttcggcctgtcgggggaggtcaccccggtggagctgtcccgctgcccggatgtcctctccgtcaccaaggcggaggaggatctggagacgctggcggaggacatctgtcaggtgacggatgcggcgctggcggcctataaccggatgcgaagtgtggagggcgtgaagctggcagaggatatcgccggccgggccgataccatcgaggacaccgtggcccgtgtggaggcacagtctccccagacggtgtcagcctaccgggagcggctggagagcaagatgcgggaggtgctggcctccaccaccatcgacgaggcccgtatcctgacggagacggccatttttgccgacaagatcgccgtggacgaggagacggtgcgcctgcacagccacctgtcccagctgcgggatatgctgcagggagacgaacctgtgggccggaagctggatttcctcattcaggagatcaaccgggagtgcaacaccatcggctccaagtgcagcgacctgactattacgcaggacgtggtgaacatgaaggccgaggtggagaagatccgggagcaggtgcagaacatcgagtaaggagcgttctatggagctggtaaacatcggattcggcaacctcattgccgccgggcggctcatcgccgtggtaagcccggattcggcccccatcaagcgactcattcaggagacaagggacggcgggatgctcatcgacgccacctatggccgaaaaacggcgtcggtacttattatggacagtgaccatgtggtgctgtcggcactgccggcggagaagctggcgccccgtctgggcgtccggctggaggatctgacagaggaggaagcttaagtgcagagaagaggtaagacattcatcgtatctggtccctccggcgtaggaaaaagcaccgtgctgaaggcactgtttgatcagcggacggacctgtatttttccatttccgccaccacccgtgacccccgtcctggggaggtggacggtgtccactaccacttcatcccggcggaggagttccaccggatggtggaggaggacgagtttctggagtatgccgagtacgtaggtaacttctacggtactcccaagaagtacgtggaccgtgccatggacgacggacgggacgtcattctggacatcgagatccaaggcgccaaccagatctgcgccaagcggccggagacggtgcgaattttcatcgcacccccttcatgggtggagctggagcgccgccttaccgcccgtggcaccgacagtcaggaggtcatccagagccgcctgctgcgagccaaggtggagctgcaaaccgccagcagttacgactatctggtcatcaacgataccgtggagcaggcggtggcggagatggcggccattctgtgtgccgagcactgccgcccggcggagcgtctggagcagctcctgcataaataagtcaaattacagccgaaaggcagataaggaaggtcgatcattatgatgctgtatcccgcaatgaacaagctgacggagtatatccccaaccgttatatgatggtgaacgtggtggcccgccgggcccgccagatcgccgaggaggccgaagccaccggccagcatttggacgagaagccggtgacgctggccatccatgaggtggctgagggcaagttcgacgcccacaccatcgacacggagatcgaggaagactgagggagggaccgtcaatgacgcagatcgccaaggtcgctgtggcggcggctacctacgccattgacaagccctacgactatctggtgccgtccggtatggagctctccgtgggctgccgggtcacggtacccttcgggcggggcaaccgcaccgccgagggcatggtgcttcagctgcggcaggaggtgcctgccaagcccctgaaggccatccgcagcctgctggatcaggagtcggtgctgtcggagaaagagatacggctggccctctggatgcgccagcggtacttctgcaccttctacgatgccctgcacaccatcctcccggcggcggtgtggtatcgctaccgggagatctggagcctctgccctacggcagaggaggagggccttacggaacgggagcaggcggtgtgccggatgctctccgatggcccgcaggagcgggagaccctctgcaccgcactgggggaggatatcccgccggtgctgtatcagatgaaaaagaagggactggtttccgtggagacggagaccagccgcaaggtaaaggaccacatggtggagctggcgtccttagccgccccggcgcaggaggtgctggagcgtctggagcgccgccgccggtccgccccccggcagtatgaagctgcggcgtttctggccaagtgcggcgagaccacggttcacgacctgtgctatttcaccggcgctacccgccagaccctccgcagtctggagaagcagggcctcatcgccctccgcagccgggaggagtaccgcatctccccacgggagtacggtgtcccggcggaggagatcaccctgaaccaacagcagcaggaggcctatgattccattctccgccagacggagacgggccgggccggggtgacgcttttacagggcgtcaccggcagcggcaagacgctggtgtatatccgtctggcacagaccctgctggagcagggaaagtccgtgatgatcctggtgccggagatcgccctgacccctcagatgatggctcggttcaccgcctacttcggccgaaaggtggcgctgctgcacagcggcctgcggctgacggagcggtgggatcagtataagcgcatccgccggggcgaggctgcggtggtgctggggacccgctcggcggtgttcgccccgctggaacggctgggcctcattatactggacgaggagcaggagagctcctacgaatcggaaaaagccccgtgctaccacgcacgggatattgccaaataccgctgcgtacaggagggagcccgtctggtgctgggctccgccacccccacggtggagacggcctattacgcccgcaagggggattacggcctctgccgcctgacggagcgcttcaatcagcgccgtctgccgcaggtcattctggcggatatgcgccgggagctgcgggacggcaatttcagctgtatcagccgccctcttcagcaggagctggagcggaatctggcggcgggggagcagagtatcctgtttctgaaccgccggggcagcagccgccagctgctgtgtccccagtgcggctacgttccccagtgtccccggtgcagcgtctacctcacctaccattccgccaacaggcggatgatgtgccactactgcggccactcccagcctgcgccggatacctgtcccgactgcggcggcgccatgaagcatatcggcttcggtacacagaaggtggaggaggagctgacccggctctttcccggtacggagcttctgcggatggatgccgataccgtgggagagggccacgagaagctcctgcgggagttccagcgccgccgcatccccattctgctggggactcagatggtggccaagggactggatttcgccggggtgacgctggtgggcgtgctggcggcggatctgtcgctgtacgtggatcactaccgggcggcggagcgcaccttcagcctgctgacgcaggtggtgggccgggccggccggggggagaaggagggccgtgcggtgatccagacctacaccccccgcaacgacgtgatcctggcggcggcggagcaggactatgaccgcttctacgacgatgagatccgtctgcggcgtctgcggcgtgacccgccctttgccgaccactttaccctcaccgtcaccggcccggaggaggagccggtgcgccgggcctgcgcccagctgtgcgctgctctgcggcaggcgctgtcgcaggagccgtaccgggccatggagccggaggtgctggggcctgccccggccccggtggtgaagctgaacaaccgctaccgctaccggatcacggtggtgggccaaaacgaaaaaccgctccgccagctgctggcggcctatatgaaggccttcgcccgtcgcccggagcatcgcaatatggcggtccacacggactgcaatctgatggattagaggtacgaaggatatggctttgagaaagatcgtattgcagggcgacgagtgcctgaccaaggtgtgccgcccggtgacggagttcaatcagcgcctgcatacgctgatcgacgacatgaaggagacactgctggattccggcggcgtaggtctggccgccccgcaggtgggcgtgctgcgccgtgtgtgcgtggtgatgaacgaggatgaggatatcattgaactggtgaacccggagatcatcgccgccgagggggagcagacgggtctggagggctgcctcagcatccccggcaagttcggcatcgtcacccgcccctatacggtgcgtgtccgggcgcaggaccgggacggcaattttttcgaggtagaggacgaggagctgaccgcccgttgcttctgccatgagatcgagcatctggacggccatctgttcgtggagcacacggaccatctgatgaccgaggaggagctggaggagtatatgaaccagcaggaggaagacgaggaatgaggatcctgtttatgggaacgccggacttcgccgtggcctctctgcgccgactggtggaggacggccacgagatatgcggcgtgtttacccagccggataagcccaagaaccggggccataagctggccttctctccggtgaaggagtatgctctttcacagggcctgacggtgtaccagcccaccaagctgcgggacggtacggcgctggagctgatccgtactctggccccggagctgacggtggtggcggcctatggccgcatcctgccggaggacattctggcggcccccaagctgggctccatcaacgtccattcctcgctgctgcccaaataccgtggcgcagcccccatcaactgggccgtcctgaacggcgacgccgtcaccggcgtcaccatcatgtatatggccaaggagctggacgccggggatatcatttccgccgccgagacgcctatcgatcccgacgaggacgctctgaccctgacgaaccgtctggcggagctgggagccgagaccctgtcccggacggtgcaggcgctggccgccggcaccgccggccgcaccaaacaggatgagagcgccgtgacctttgcccccatgttgagccgggagctgtcccccatggacttcacccgccccgcccgcagtctccacgatcaggtccgtggcctccagccttggccctgcgccgtgacggagctgtccggcgccacggtgaaggtgtaccgtaccgctgtgggcggcgccgtcaaggccgctcccggaacgatcgtccgggccgataagaccggcatcgagatcgcctgcggcgacggccggacgctccgtattctggagcttcagccgcaaaacggcaagcgcatggcggcggccagctatctggcaggccacccggtgcaggtgacggtatgaacgacgtgagaaagccggacgccagagagaccgctctggaggttctgatgcaggtggacagcgccaacgcatggtccgacggcggcctgaagcgaaccatcgccaaaaataagctggacagccgggatgcggcgctggccacccgcttgtgctacggggtgatccagaaccggatgctgctggactactatatcggctgctggtgcagccagcgcccggagcggctggagtccgtcatccgcaacatcctgcgtctggggggctaccagatcctgtttttggataaggtgccgccccgtgccgccgtcaacgaggccgtggagatgaccaagcgccaccgccgggaaaaggcggcgggtatggtcaacgccatcctgcggaaatttgccgccaatcgggaggatatgccgcccctgcccaagggcagcccggcgcagactctctccctgcgatacagccacccccggtggctggtggagcgtctgctttccctcatcggcgaggaggagacggaggcgtatctccgtatgaacaatcaggtagtacccactaccatccagacaaaccccctgaagggtaccccggaggagctggagaagctgctgcgccagaccggcgcacaggtggagccccacccgtggctggcgggatgcttttccgtcagcggcaccggcgatctggagcagctgtccgccttccgggagggccgcttcaccgtgcaggacgcagccgcccgtctggtggccaccgtggccgccccggcccaagaggatcgggtgttggacgtgtgcgccgctcccggcggcaagtcctttgccatggccatggaccgccgggatcggggccagatcctctcctgcgatgtccacccccacaagctgaagctcatcgacagcggcgcccagcgtctgggcatcaccagcatccgcacggcgctggccgatgcacgggaggagcacgccgcatggctggagcaggcggatgtggtagtggcggacgtcccctgttcgggtctcggcatcatccgcaaaaagccggatatccggtataaaaacccccgtgatctggcccagcttccggccattcagggggatattctggaaaatgcctgccgctatgtgtgtcccggcggcgtgctggtgtactccacctgtacggtgctgccggaggaaaatcaggagatcatccacgtgttcctctcccgccacccggagttccgacgggagaccttcaccttgccggggcccgtgggcctgtgtgacggggaggcgaccctgtggccccagcggctggggaccgacggcttttacatctgccgaatgcggaggaaagcatgactgacatcaaatccatgacgatggaggagctgacccacaccctgcgggagatgggacagcccgccttccggggcggtcaggtctttacctggctgcaccggggcgtcacctcctttgaagagatgagcgatctgccccgtgcgctgcgggagcagctggcgcagacgttccatatcaccgcccccaccgtggcccgcaagcaggagtcccgtctggacggcaccgtcaagtacctgtgggagctggcggacggcaactgcatcgagacggtgctcatgcagtatcaccacggcaacaccgtgtgcatctcctctcaggtgggctgccgcatgggctgcgccttctgcgccagcaccatcgccggaaaggtccgtgacctgaccccctcggagatgctggatcaggtgctgttcacccagatggattccggccgggagatctccaatatcgtgctgatgggcattggagagcctctggacaacatggataccgtgctgcggtttctgacgctggtgaaccaccccaaggggctgaacatcgggatgcggcacatcagcctgtccacctgcggcgtgataccgggcatccggcgtctggcggagcttcagctccagctgacgctctcggtgtccctccacgccccggacagcgagactcgttcccgcatcatgcccgtgaaccgggcctatgacgtggaggagctgttcgccgcctgccacgattacttccaaaagacgggccgccgcatctcctttgagtacgctatgatcgacggcgtcaacgaccacgactggcaggcggacctcatcgcccggcgcatcgccgggatgccgggccacgtgaacctcatccccctgaacgatgtggtggagagccccttcaagcccagccgccgcacagcggcatttcaaaagagattacagtcccatggcgtcaccgccaccgtgcggcggagccttggcggcgatatcgacgcctcctgcggccagctgcgccgcaaggccatggaggaagggagagacctgcaatgagaacatggagcgtaacggaccgtggtctggtacgcagcgagaatcaggatgcctgcgccgtgctgacgccggacggctacaccgtggcggtggtctgcgacggcatgggcggcacgcaggggggacggatggccagcgccatagcggtggagaccttcacccgtgagctgagccggagcctgcgccccggcatgagcgccggacagctggagcaggcggcgggctacgccgtggctctctccaacgatgccgtccgggagtacgggctggcccatccgggctttgagcgtatggggacgactctggtctccgccgtggtccgggacgatctggcgctggtgagcaacgtgggcgacagccgggcctaccacatcacccgtgagggcatccggcaggtgagccgggaccactccgtggtggaggatatggtggaaaagggcgacctgacccgtgacgaggctcggcaccatccccgccgcaacctcatcacacgggcgctggggacggaacccggtgtggcggcggatgccttcccgctgaaatggcagcagggggacttcctgctgctgtgctccgacggactgataaacaccgtgtccgatcaggaggttctcttcgaggtgattcacagcgagccgctggacacgtgtctggatcggctgctggccctctcccgtcagcggggagcgccggataacgtcactgctgtgctgcttatgaatatctgaaggagatgacatctatggatcaatatatcggaaaaatgctggataaccgctatgagatattggagctcatcggcagcggcggcatggccaacgtctacaaggccaagtgccaccgcctgaaccgaatggtggcggtgaagatcctgaaaaacgatctggcggagaacgccgacttccgccgccgcttccgggacgagtctctggcggtggcccagctgtcccacgccaacatcgtgtcggtgtacgacgtgtcccgcagcggcgacacggagtatatcgtcatggagctggtggacggcatcaccctgaagcagtacatggagcgccgtggcaagatggactggcgggaggcgctgcacttcatcacccagatcatgcgggcgctgagccatgcccacagccggggcatcatccaccgagacatcaagccccagaacatcatggtcctgcgggacggcagcgtcaaggtgacggatttcggcatcgcctgtctggccagcgccagccagaccctgacgcaggaggcgctgggctccgtccactatatctccccggagcaggccagaggcgaccgcaccgacgcccgcagcgatatctactccgccggcgtggtgctctatgagatgcttaccggccgtctgccctttgagggggagtccgccgtgtccgtggccatccagcacctgagctccgtcccactggccccccgtgagatcgatcccgatatcccggaggcgctggagctgatctgcatgaaggccatgtgcgccaatctggagaagcgctacccctcggcggatgccatgctggaggatctggagaagttccgcaagaataactccgtggaccttggctatatccgtgccgatctggaggagccggaggatcacgagcctacgcaggccatccccaccgccgccattcaggccgcccgcaaggagcgcaccccggcggaggagaaaaagcgggataaaaagctcatcgccatcgtggtgggcggctttgccgcagcgctgctggtggtgttcctgctgttcaagttcgtgttcagcggcatcaacaataaccccgccgcccagtcctataaggtccccgatgttctgggcaagaccgtggaggaggcccagcagatggagggcatcaagggcgtgttccagatcgaggtggccggcagcaaggccgacagcaactatcagcccggccagatcatcgagcaggaccccaagtccggccatgtccgcaagaataacctgaagatcaccgtctggatctgcgccaaggaggagaccaacctcatggtgaacgttctgggcgaggatgtgcagaacgccaaggtggagctgacgaacctgaatctgaacctgaacgtccagatccgggaggtgtactccgacgagtatgccgccggtaaggtcatcagcagtacccccgccgccggtgagagcatcaagaagggcgacagcatcctgctgaccgtcagcaaggggcctgagaccaagcccgtcaccgtgcagaattacgccggtctcagcgtggacgatgccgccctgcaggccgagaacgccggtctcaccgtgggcgctcaccagtatgagtacgatgccaccgtgccggagggcagcgtcatccgccagagcctcgctcccaaaacggaggtagcccccggcaccgagatcgtctttaccgtcagcaagggccccgagccgtctcagaccacggagcagacggtgacgttcgatatccccggcgagtacctgaatccggaactgggcatcctgaacgtggagatccgtcaggataccaccgtcgtctactccaccacggtggataccacggaccccgccgccgcccgttccgtcagccatacctttaccggtgacaagggaaccagcatcacggtgtacctgtatatcaacggcaccgaggtggcctctcaggtggtcagcttttgagccggggccgcattgaaaaggccctcagcggcttctactacgtccgcacaccggaggggctgctgcaatgccgggccagaggaaaattccgccgggagggcatcagtccgctggtgggggactgggtacaggtccgtgatctgggaggcggcgagggcttcgtggaggccatcgagccccggcagaatcggtttgcccgccccgccgccgccaacatcgaccagctggtcatcatcggctcacaggccatccccaccacggatccctacctcatcgatcgcattgcctccattgccgccctgaagggctgccgggtactgctgtgcctgaataaatgcgatctggacccggcgcaggagctatacgacagctacgctgcctccgccataccggtgctgcgggtcagtgccgccaccggagagggcctgccggagctgcgccgggccatgaaggggaagctgaacgcactcaccggcaactccggcgtgggcaagtccagcatcctgaacgctatggagccggtgttcggcctgccggtgggggaggtcagcaaggctctgggccgtggccgccacaccacccgtcatgtggagatgttcccgctggacgaggatacctacgttatcgacacgccgggcttctcctccttcgacacggaggagttggatctggagctgaaggcccgcctgccggagaccttcccggagtttgctccctatctgggccagtgccggttcgtggggtgcagccatgtgaaggaaaagggctgcgccgtgctgcaggcggtgaaggacgggaggatccccgccagccgccaccgcagctatgtgcggctgtatgacgagctgaaggacctgcgggactggcagcacaaatagagaacgctcagagagggcggaagcatcgcttccgctctctctttgtgcgccgccgctgtcacgcccgcccctcccggcatatactgccatagaagcgaaacggagagggagggacgtcacatgagacacggagacggctgcgggagatttctgggcatctgcgcactggggctgggactgggtatcctcattgccgccatctttccggtgggcgtgctgatgtttctggtgtcgttcctgctgatcgcctgtgggatcgtctgcttgaaggataggaggtagctgctgtgaagatcgtggtttggaagtcgccccgtctgctgcgtggggttctgcggatgctcttcggcatccgggaataaacggcggaaacggctcatagagtagtccagcgcagtaagaaattacgggaggacgaaaacatggagctggaactgcaatatacggagctgtcctgctgcgaggcaggggagagcgttaccctgacgcaggaggagacgctggaggcggcgatcccggagtactgcccggaggtcacccgcatcgtggacgccgtaggacagctgtgcctgcgggaatatacgagccggcagatcagcggctcggtgctggtcacggtgctctatacctcggaggagagccccggcctgcggagcctgacgctgccggtgccgtttctgacccaagcggacgacaagcgcctcaccggctgcgacaccgtctgcatggcgggacgcctgctgctgacggaggccagagccgtcaccggccgaaagctgtacctgcgggtcatgccggagctgactctcaccggctacacctgccgccgccaccgcatctgcaccggcgtaggggaggagcctaccctgcgcctgcaccgtcaggagcagtcccttaccctgctgacctcggtgacgcagcggcagagcagcgtgactcaggagctccagccccaggactggggcgagccgccggaggaactgctggcccagcgcatctgcccccgcatcaccggcagccagccggtggggagccgcctgctggcaaagggcgaggcccgcatctgcctgctgtaccgcacgcaggacggctccctccacacatgggaggacaccctgcccttttcctgccttctggacggccttaccgtcccggaggaggcgcaggtcacggtcaccggctcctgcggcacggcccggctcatccgcagcgacggcgcagccgccatcggggtggagctgaccctgagcctactggtgcggacctatgagacggtcaccgtcgccccggtgacggacctgtacagcacccgctgggacaccgctctccagcgccagagcctgaccttgacggagacctggcccccggagacggtacagccggaggtacatcaggagctggagagccgccccttcctgtatgtgacggcggcggactgcggtgccgtcaccacagggcaggagggggatcataccaccctccgcacccctctgcggctgcggctgctgtatctggatgaatccggcgcaccggtcacggcggagcgcaccgacgaggccgccgcccccgtgcctggggatgtgaccaccgcccgtgccgcctgcctgtctcccagcctgcgcccctccggcacgggactggagctgacggtcccggtggagctgacggtggagcgcagccgccgatgcacatgggacgccattaccgccgcagagctgacggagccggagccgggacggcgtccctctctggtgctgtgccggccgaagaaaggggagagcctgtgggagctggccaagcgctaccgcacggatgagcaggccatctgcgccgccaacggattggagcaggagactccgctgccgtcggggctgctgctgatcccccgtgtaagatagcagaaaaagagcgtaggcgatgcctgcgctcttttttcgtagaaagccttatccctgtgcgtaccgggccagaaactgccgggtgcgctcctccttggggtgatccatcaccatgcgtggctccccctgctccacgatgacgccaccgtccatgaagatgacctgatccgccacatcacgggcaaaggccatctcgtgggtgacgatgaccatggtggtgcgctgccgggccagctgccggatgaccttcagcacctccccggtaagctccgggtccagcgccgaggtgggctcatcgaagcacaggatgtccggcttcatggccagcgcacgggcaatggccacccgctgcttctgtccgccggagagctggtggggatagtgtcccatccgatctcccagacccatctgttccagcagggcttcgccctcccggcggatggcctccggggtctccccggttctctcggagttggccagcagccgccgggccagcgttacattctccagcgccgtatattggggaaacagattaaaatcctgaaacaccagcccgaagtgcagccggttccgccgccgctcctgaggggacaggcttccgtccagcagattccgtccccggacggcgatgcggccgctgtcgggtgtctccaaaaagttcaggcaccgcagcagcgtggtctttccgctgccggaggagccgatgatggacagagcctgtccctcctccagcgaaaagctgatgtcccgcaggaccttggtgccgccgaagcttttctccagctgcgccacctccaggatcgccatagtaccccctccttaccgaaaatagctgagcctgcgctcgatgtaccggaacagcagtgtcagcagccccacaaaggccagatagaatacccccgtgtaaaacaggggccatgtgatgccctgcgccttgatgtagctctcgcccaccttggtcagctccatgatggagatgatgcgggccagcgaggtgtccttcaccagcgtgatgatctcattggacataggcggcacaatgcgcttcaccatctgcagcagggtgatcttaaagaagatctgcctgcgggtgaggcccagtacctctcccgcctcccgctgcccggcaggcacgccctcaatgccgccccggtagatgacggagaagtagcaggcgtagttcagcacgaaggccacggtacacgccagcatccgctggctgccccagatgttgtggcccagccagatgccggggccgtagaaaatcaggatcagctgcagcatcaggggtgttccccggacgatccacaccagaacgttaaaaaaccagctgaccggacggcacttgctcatggagccgaaggtcaccgccagccccagcggcagagagaataccagcgtcagggcgaacagcttcaccacctcacgcagcccctccagcagggacagtgtcacagaccagaacatgggaagaactccttacactcagatttcacaggccgcccttttcacgggccgccataaaaaatgccgctgcggcggacagcccccgcagcggcattctggccgttatttactgaccacgcaccaccacgacctgtgcgttcttgcagtaggcgttggtgcaggccatggcgctggtaacgccgtcggtgagggtcatgccgttccacaccacgtcgatggccttgctgtccagctcattgatcttctggccccagtcgatgaccacgaactgaatttccacacccagacgctccgccaccagcttggcaaggtctgcgtcaaagccgatccactggccattttcatccttatagtccatgggggcgaactccgtgatgcccaccaccagcgtacccttctgctggatatagctgacgtcactgtcttctccggtggtgaaggtgctctcctgttgtgggaccagcagctcctcggtgatgccgtactgctgggccagcttctgcatggttccgctctgataggcatcgcccagcacgcagttgatgtactgcgccagatcggagcccttgcggcagccgatgccgtactcctcctcggtgagcctgtcggtgtaggtgagatcggggtagctggtaccctcaccgatcatggccccggccatcagcagatcgatgatggcggcgtcggaggtgccggaggccacctccatcagggcggcggcctgatcctccagcgtggtgaccttccagcccttctccagagcgatctcttcaccggcggagccaccctccacggcgtaggtcagaaccttttcgtcggaatccttgcttccgccgttgttcttttggccgcaggcggccagcagggaggcactgatggtcagtgccagcgccagacacagaagctgcttgaactttttcatgggaatatcctccttgatatggtacacggatgtgttgtaacagatgtattgtgtttgtattgtgttagatggtgatgcactacgtttggtcacgttggcctgcatggtccggatcgagccgcgataggctgcgctgcaatgcactgtgccgggcagcacaagccctacgctgagtggcataagccctgccgctattatcgcttacttttccggaacttgcaagccccgctgccgatttccaccgccgttttctgttgctttcgaccgtcctcaccgcagtcctatgggacctttcaccgttggtttccaccgccgttttccgtggaccgcaacgctatcgggccttttgccgttgttttttccgtcggcagatcccagccgccttcgccgtcgcccgattgggattttcgcaggtttcctctctgcgggcctttatcaagaaccgccgccgagattttcaccggttcccttggggcaacgagggtgctatggaagctgccccgccggaggctgccccacttttggggcgcctgtgctttctatctgttatcgatggtgtcgctccataccaaaacctcatttctaacgaaaccgcatggatcaaagctgtctctctcgtctttctacggtctatcgcatggcaccgggcagccgctcccgtagtttgcggttccgattgaccatatgctcccggtcgcttattcacagcgactggttgtcccgctgacgttggatatattttaacactttagcgaagtagtgtaaagatgcccatacgtaaaaatagattgatagatgcagacgaattttatgcagaatatacatatcctgtccgtgcgtcccaagaagagatgtctgttcccaaagggagatggtaccccggaagcaaccggggcgtccagaggagaaaaacggacggaaaacggctcccttgcaggtccatacgatgtccacagactgtcaggaaaatgggggaggtgtccaatttttgcgtattttctctaaaagttcagagattgtccattgataatccggaatcggaattgtataataaaagaaacattctggagaagcgaggaggtcacaatggcttttgtagaatttgaaaaggtcagcaagatctaccacaccggagcggtggagatcccggcgctgcgggatgccacctttcaggtggagaagggggagatctgcgtcattgtaggggcctccggtgccggaaagaccacgctgctgaatattttggggggtatggataccctcaccggcggcacggtgaagttggatggccgggatatctcccgctatgaccggcggcagctgacggagtaccgccgccgcgacgtgggctttgtgttccagttttataacctcattcagaacctcacggcgctggagaacgtggagatcgccgcccagctctgcccccatccgctggatgcggcagaggtgctgcgggaggtgggactgggggagcggatgaagaacttcccggcccagctctccggcggcgagcagcagcgggtggccattgcacgggcactggccaagaaccccaagctgctgctgtgcgacgagccaaccggtgcgctggactatgttaccggcaagaacattctgaagctgctgcaggatacctgccgccggacggggatgacggtggtcatcatcacccacaactccgctctgacggccatggcggatcgggtcatctccatcaagagcggcaccatccagtccgtgcggaagaatgaacacgtcacccctgtggaagagatcgagtggtgaggatatgctgctgaaaactgcttttcgggagatcaaaaccagcttgggccggtatctggccattctggccattattgcgctgggtgtgggcttttttgccggactgcgggtgacccgcaccgctatgatctccactgccaatcactatttgaaggatctggccatgttcgatgaccggatcctctccactctgggctggacggaggaggatgtggatgccttccggaagctggatggcgtatccgccgccgagggcgcccgttccgccgacgtgctgtgcgtgggggaggacggctccgacatggtgctgaaggcccactccctgacgcagcaggtgaaccgcctgagcttacaggcgggacggctgccggagaaggccgacgagtgcgtggtggacgcatggcgctacgatgagagcgcactgggcagcgtcatccggctgtcggacaacaactccgccgatacgatggataccttcgccagccgggaatatacggtggtgggtgtggctgccagtcctatgtacatcaactatgagcggggcggcacggcgctgggaaacggcaccgtggcggcgtttgtctatctactgccggagggctttgcgatggactactacacggagatcgacgtgaccctcaccggggccgatggccgcatctatacggcggcctatgacgatgccgtggaggccatggagcagcctctgaaggatctggcagcccagcgggcgcagctgcggtacgactctctccgcagtgaggcgcaggaaaagctggcggatgcccagcagcagctggacgacgcccggaagcagctggaaacgggctgggcggaatactacgacggccttgcccagtacaaggacggacatgcatcctatatagagggcgccggccagtaccgggatgggctggcagaatacgacagtggccgggcggcctatgagacggcccggaaggactatgaaaacggcgtgagccaatacaatcaggggaaggccggctatgaggagggccagcggcagtatcaggcggcacagcagcagtatcaggaggcgctggcgcagtatcagctgctggagcagcaggcggcggccctgccggaggatagcccggagctgccggtcctgcaggccaagctggcggccatgaaggagcagctggacgccacagcggcgcagctttctcagaatcaggctcagctggaggcaacggcggcgcagctggctcagagcaaggcccagctggatgcggcgggtgcggcgctggataccacggagcagcagctggcacaggcgcaggagaagctggaggagtcggcccggcagctggcggcagccaaggcccagctggaggagacaggtcccaagctggagagcgcccggcaggagctggaggacggcgaaagggaattgtccgaccatgagggggaactggacgatgcccggcagaagctggaagatctgaaagagccggacacctatgtgctgggccgggacaccaacgtgggctatgtatgcttcgagagcgacaccaacattgtggcgggagtttcccgtgtgttcccactgttcttcttcctgctggcggcgctggtgtgcatcaccaccataacccgcatggtggaggagcagcgcacccaactgggcgtactgatggccatgggctatggccggggggccatcctgttcaagtacttcttttactccggcagcgcttcgctgctggggtgcgccatcggctttgtgggaggctcctacatctttcccaagatcctctggcacgcctataacatcatgtacggcttcgggatccccattgaatttgtgctggatgggaagctggcggccatctccgtagccacctatctgctgtgcgctctgggggccacctatctggtgtgccgtggcttcttgcgggaggtgccggcggaactgatccggcccaaggcccccaaggagggcaagcgggtgctgctggagcgcatcaccttcctatggaagcggctgggctttttgaccaaggtatccctgcggaacgtgctgcggtacaagcagcggttcttcatgatggtgctgggcatcggcggctgcacggcgctgctgctgacgggcttcggcatcaaggactccatcgccaatgtggtggactatcagttcgaggaaattaccctgtacgatgcggcggtgtccttcacagaggagatggatgcggagacgcagcaggcgttttcccggcaggccgccgatgtgtcggcggtggtgttcctccacgacggctccgtgacggtggaggcaggcggcggggccaagacggtgaatctgctggtgcctcagagcagtctggagggcatgatggacctccaccggggcggcgagaagctgtccatgcccggaacgggggagacgctgctcaacgacgctctggcggaggcgctgggcgtgtccgtgggggacaccgtgaccctgcgggacagcgacatgaacaccctgacggtgacggtcagcggcatctttgacaactacgtgtccaactacgccatcatgtcagcggacacctgccgggatcagtggggcagcgtgccgccggtgaaaaccgccttcatccgggtgacggacaactccgacgcaggtgtccacgccgcctcggcccggattctggatctggagaacgtctcggcggtatcggtgaatctggatacccgccagcgggtgggaaccatgatgtcggtgctggattacatcgtgtggatggtgacggtgtgcgccggggcgctggcctttattgtgctgtataacctcaccaacatcaatatcaacgagcgcatccgggagatcgccaccatcaaggtgcttggcttctatcccggagagacatcggcctatgtgttccgggagaacaacaccctgacgtttttggggatgctggtgggtctgccgctgggcaagtggctccacgcctatgtgatgagccagatccgcatcgacaccatcgccttcgacgtgcggatcgcatggcagagtgtgatgttctccatgctgctgacggcggtgtttgccgccatcgtgaacgtggtgatgtacttcaagctgcggcgcatcagcatggcggagtcgctgaaatccatcgaataaaggaaaatgtgcgaaaagcgcccctgcttcactgtgaagcaggggcgctttatgtattctgttatcaggggagcagcagctgggcgatctgcacggcgttggtggcggcacccttgcggacctgatcgccgcagcaccagatgttcagaccgttgtcacaggtcagatcctcccggatgcggcccacgaacacggtgtcctgatcgctggtgtccagcggcatggggtactgtcggttggccagatcgtccaccagacggcagccgggggcggcggcgatgagctctctggcccgctggacggagatcttctcacgggtacgaaccaccagcgagacgctgtggctccgcaccaccggcacccggacgcaggtgcagctgacttgcaggtccggcagatgcatgatcttgcggccctcgttctgcatcttcatctcctcagaggtgtagccctcataggcttcgccgccgatctgggggatgacgttgtaggcgatctggtactggaacacctgcgggtggacgggcttgccctcccgcagaagctccacctcctccataagctcacgggggccaccggccccggcaccggacaccgcctgataggaggaggcgatgatgctctggatggggctgtcctgattcagggcgttgatggccaccagcgagacgatggtggtgcagttggggttggcgatgatgcccttgtggcggcggacatcctccgggttgatctccgggatcaccagcggcacattggggtccatgcggaaggcactggagttgtccacgaacacggcgcccgccttaacgatggccggggcgaagcgcttggcgatgtcgttctccgcagcgcccagcacgacgtccatgccctcaaaggcgctgtcctcggcgggctgcaccgtcagctcccggccctgccagagcagcttctgcccggcggagcggggggaggccagcaaccgcagttcctccacgggaaagctgcgctcggccagtattttcatcatttcacggcccaccgcaccggtggcgcccagaatggcaacgttcatagtttggttcctccttattttacaaagctgtcgtacaggacacggatggcacgctcaaagtcgccgccgtccacgccaacgatgatattcagttcctcagggccttgggtgatcatgcggatgttgatgccgttttcacccagcttggcgaagatgcggccggaggtgccgggcttataggccattttccggcctacggcggccacgatggccatattgtccgtcacatggatgctgtcgggcttcaactccttttgcagatcacccagcatgggatacaggcacggggtcaccttttgggccgacaccaccagcgataccgtgtcgatgccggagggcaggtagtccacgttgatgccgtagcgctccagcacctccaggatctgccgcaggacaccggcctgtgaggacattccgtttttggtgatggtgatgacggagaaatccttgcggccggcgatgccggtgatgaggttctcgtctgccagctccggctcgtcgaagcgctcccggatcatggtgccggggtggtcgggctggttggtgttgcggatgttcagggggatgttcttctcacgcaccggggagacggtcccctcgtggagcacctgcgctccgatatagctgagctcccgcagctcggcgtaggtgatgcgctcgatggggcgggggtcctgcacgatcttggggtcggccatgaggaagccggagacgtcggtccagttttcgtagacgtcggcgtccagcgccgccgccgccagagcgccggtgatgtcgctgccgccgcgggtgaaggtcttgacgctgccgtcgggcatggccccgtagaagccggggatcaccacccggcggccggaggcggtgcggcgcagggcctcgtagctggcgggctgatccacggtgccgtccagccggaagcggagccagcagatgctgtccagaaaatcgtagcccagatagtccgccatgaggcgggcggcgaagtactcgccccggctcaccagctcgtcctgactgatgccacggtccatcttctcccgcagggcggcgaactccgcctccagcggtgtggacaggtgcagctcgtcccggatggagagatagcggctgcggatcatgtcgaacacagcgtcacagctgacgccatattgcaggtgggcgtagcacagatacagcaggtccgtcagtttgtggtcgtcccgactgcgctttccggcggcgctgaccaccaccacacggcggctggggtcagagtccacaatggccttcaccttggcaaactgatgggcgtcggccatagaggagccgccgaatttcaatacctttaacataggaggatcgcctttctttcatggatgcagtgccgtttgttccgcagcggacagagaatttatgtccccggaataaaaacacttgcttttttgctggagacagtgtatcatactgtttcagaaaaagcaagtggcaaaaggagcgtttttatgatctaccacagcacgagggatgaaaagctgacggcggccccggccagagccgttttagagggcattgcaccggacggaggactgtatgtctgcgatccggggaagttagagtttgactggcagggggctttgcagaaggataccatgtccatggcggcggacattctgggtgtactgctgccggactttcaggatatgaacggactggtgcgggccagctatgccggaaaattcgccagcgatgacctgacgccgctggtgccggtgggggagcggtatgtgctggagctgtaccacgggcccaccagcgccttcaaggacgtggccctgtcggtgctgccccggctggtgagcgccgccgccaagcaggagggggccggggatgtggtgatccttaccgccacctccggcgataccggtaaggcggcgctggagggtttccacgatgtgtccggcacccggatcatggtgttctatcccgccgggggcgtgtcgccggtgcaggaggcacagatggtgacgcaggagggcggcaacgtccgggtatgcgccatccgggggaacttcgacgatgcgcagaccggcgtgaagaatgtctttgcagcctgtaaagggaaagaccttcacggtgcggtgctatcctccgccaactccatcaacatcgggcggctggccccacaggtggtgtactacttccgggcctatgccgatctggtgcaggcggggcgcatccgggtgggggagaaggtccacttcgtggtgcctaccggcaacttcggggacattctggcagggtacttcgccaaacgcatggggctgccggtggggcggctggtgtgtgccagtaacgccaacgatgtgctgacggagttcatctccaccggtgtatacgaccggcggcggcccttctataagaccacgtcgccctccatggacattctggtgtccagcaatctggagcggctgctgtacctgctgtcggagggggactgcggctatgtggcggggctgatggagcagctgaaccgggagggacactatcaggtgtcgccccggctgttggaacgcttgcaggcggagttcgactgtgcctgctgcgacgatgccggggcggcggaggtcatccgtcggctgtggcaggagcagcactatctctgcgacccccacacggcggtggcgtggtcggcggcagagcaggtgcggctggaggacggggctccggtggtggtgctctccacggcatcaccctacaagttcccggcggcggtgctgggggcgctggagggcggctgcgacggcgacgagttcgccatgatggagcggctgcaccggctcaccggcacagaggtgccgaggaatctcgccggtttgcagggccggacggtgcgccatcgggacgtcatcgacaaggagcagatgctggactatgtgctggcagaggtcatggggagctgaaaggagcggactatgaacatcgtttgtttggatatggagggggtgctggtgccggagatctggatcgccttcgcagaggagagcggtatcccggagctgcggcgcaccacccgtgacgagccggactatgacaagctgatgcgctggcgcattgacattctgcgccagcatggactggggctgacggacattcagaacaccatccgccgcattgacccgctgccgggagccagagcgtttctggaccggctgcggactaaggcgcaggtggtgatcctcagcgacaccttcgagcagttcggcctgccgctgatggagaagctcaactggcccaccctgctgtgcaacacgctggaggtgggggaggacggtatgatctccggcttccggatgcggtgcagtcactccaagctcaccactgtccgggccttccagtccatgggctacgataccatcgcctccggcgacagctacaacgatctggagatgatccgggccagcaaggcgggcttcctgttccgcaccacggagcagatcagggcggactatcctcagtatccggccttcgaggagtatggcgacctgctggcggccattgaacaggcactgtaaagggaaaacgcatgacagggagagcctccgcaggagggcggttccgctgtcagaataagaaaaggatagggcagggccgacattttgtcggccctgccctatcctttatggtggttactgctcctgtaccacggcgatgtcctcaccgacggtgcagatgtggtatggggcatcggcggagacgccggtgtcgtgggtctctccggtgcggaggtttgtcacccagagggttccgttctgccggtaggtggcataggcggcgccggtatagaattgcaggccgtcctcctgccgctgggggatgtaggcggcggcacgggacacggtcggccgggccagttctgtggcgcagtcgtagacatagacatccgtcaggcgggactcctgacttccgccagccgtggctgtcacgaggatatccgctcccagccagcgggcggtgagcatgggagaggcaccctccgctatgccgcaggcggaggccagatccaccacctgctgtccgtcgcagtagaaagcgccctgacgatccgcctgcttggtcaggaagatggcttgctgcaaatccggggagacctccagctgccagatgccgtagggggtcagcaggtcgggcagcagccacgtcagttggccgctctccagccacgccagagcgtaccggccctgatccagctgctccgggtcacgcaggcggcacagggcggcgtccatggagccggagatgggctcggcagaccagtcctcctgctggttctggaggaagatctgcccatcatattggcaccagaggaaggtgagctgtccctccggcagggtaccggagaaggtctcggtgggcagggcctgaccgtctgcgtaaaatacgccgtcggtgcaggtgggcgctgccgggatcacggcggcattgaagggggtctcgccggtccaataggcgatctcatcgccggtgttcacgggtaaggcactgcatcccgtcagcaggatgcacagcgcactcaagagatagaggattcgatgcttcacggtggccctccttttcacacgatatgttttcggtatatggtaagataattgtatggtaaagaaaatgaattgtcaataatttataatatttggaggaggcgaaacggaaaatacgcactttgcacaaaaaagtgagggacgaatctattgactttgccgtggaggtatggtaaaagtaaggagaaagacagtggttggatgggcgatgaagggaggctctatcatgaaaacgggaaggattatagcggtgcttgcggtatccttgctggcagtgcttgtgctggtgctgctctggataggtcggggtggcagagaaccggaggggaccgtagtatccgtgacggaaaagcaggccatgaccttcgcagagggtgaaatccgccgcatcgccggggagggcgggccggactgcacatgggacgataccacggcgatcctccaaggcagacccctttacggccccgacgaccggtgcaacggatatgtgtgcaggctgaccaccggcggcatggagacagggtatcttcaagtggatgcgctgggcggggagctttgcaccggcgcttactccttcgacggtatcccggcctatgaggggctggccgaggaaggcggcgggacggcttcggaggagcggctgtacttcttcggcggcatctcctacggcgtaaggctggaggacgggagtttccggctgatgggctctccggaaagggtgagcgccgagacggcggcggagcagtaccggcacacggtggagcaggtgcagcgccaacgggcggagtaagagatgatgagcggcgtattctccggcgggagggtgcgccgctctattgacagcggtggtataatctattatggctgaaaatatacgaaaacgaggacaacactatggacattacacagggcgcacccttcgagagctttgggctgtcggaggcgaccatgcgtgccatacacaacaaaggatatgaagtgagcacccccgtacaggccgggtgcatcccccccatgctggcggggaaggacgtgatcgccaaggcccctaccggcaccggtaagaccatggccttcggcatccccatcatcgagcgcatcgacccggagagcgaggcggtgcaggcggtgatcctggcccccacccgtgagctggccatgcagatcaccgaggagatgcgggaggtggcggtgtgccacgagggggtgcggctggtgtgcctgtacggaggtcagcctatcggcaagcagatcaacgccctgaagcggcggccccagatcgtggtggccacgccggggcggctctccgaccacatgaagcggcggacggtggtgctgaacgaggtgtccaccgtggtgctggatgaggcggaccggatgctggatatgggctttatccacgatgtgcggcggatattggacaagatccccaaccggaagaatctggggatgttctccgccaccatctcccgtgaggtgatggatatctcgtggatctatcagcgggatccggaggagatcacggtgcaggccacgcaggagaataagcccgatattttgcagtaccgcctcgatgtggactccgacgccaaggtggacgccattgccgccatcatcaagaagcaggggctggagcgggtcatctgcttctgcaacaccaagggctccacggagcggctgacgaagtttttgcagatgcgtgggctggacgcccagtgcatccacggagatatcccccagaagaagcgggaggaggtcatggcccagttccgggagggcaagctccatgtgttcgtggccacggacgtggccagccggggcatcgacgtggacgatgtggacgccgtcttcaacttcgacgtgccggaggagaatgagtactacgtacaccgcatcggccggacggggcgggccaagcgccacggcgtggcctatacgctgctgtcggatttccccagccggatgcggctggacgatatcgcccgcaacacccgcagccagatcgtctccgccaagctggagggggacggcacggtggttccgctggagaagtaagaggtggggctatgaatatttggaaacggggcgtttgcctgctgctgacgctggtgatggcggcggcgctggcgggttgcggcacccggcgggagccgcagacgctgcgggtatgcctgccggagctgccggggacgctggacccggctatggtcaccacagactccgagcgcatcgtggtgagccatctgtatgagaatctcatgaagctgtcctctgacgggcagggcggcagccgggtggaggccggggctgcccggaaatatacctgcaccgacaacaacgacggaacccagacctataccttcaccctgcgggacatgaagtggtccgacgggcagaaggtgacggcggcggattttgtctacgcctggcagcggctggcggacccggccacggcatcccccaatgcggcgctgctggagatggtggcggggtatcggcaggtccgcagtagcggcgatgtcagcaagctgcaggtgtcggccccggaagagaacacctttgtggtgaccctcagcaatcggtgcgcctactttttaagcgccgtgtgtacggcggcggccaccatgccggtacgcagcgagcagccgaagaactggcaggcggatcccacggccctgtgtaccaacggggcctaccgcatcagcgaatggaagaacggtctgctgaccgccacggtaccggagaactactacgaccagcggcgactgcaaatgagcacgctggtgttccggttcgagacggatgcggcgatgaggacggagctgctgaaaaagaacgaggtggatttcgtactgggcctgtcccaagaggagctggcggatgagccggagacatggacaccggacagctatcctcaggtgatgacgctgctggtgaaccagatggcacagagcctggccagcgaggagctgcggcaggccatgtcgctggtcatcgaccggaacgccttggcggcgctgacagagagccgtctggtgactctggcgaccggactgattcccggagggatacgtaacaccatgggcggagacttccgcacggagagcggcgacctcattaacaacgacccagaggcgctgacggctgcccgtgagaaggcggcggagctgatgcagcaggccggtctgacagaccccagcagtctggcgggattggggcaggtgacgctgctgtacgaggagaacgacatcaacgccaagatcgctcagctgctgcgggatacctggcggaatcagctgggccttgtggtgacgctgaagggcgttaccggcgaggaggtacagcgggatgtggccagcggcgagtttaccatcgctatggtgacgctgaaaagcgaccgcaacgacgccatgggcctgctgcggcagtgggccagcggcagcaaggagggggagttcttctactcccacgcctacgatatgctgatgggtgtggcggcggactgcggcgaggtagaggtacgggacgcctatttggaggatgccgagcgtctgctgctggagacggggtatgtatgccccttgtattttaccggccagagcagccggctcagcagcgcctacacgggactgctgacggatggtatcggcggatattacttcacccatgtgggtcagcagaacaacggataacggaattgaaaagagcatcctgtgaaggaaatacccctcacaggatgctctttttcttgggaaaatgccatgggatggggcgtcctcccgggaggaaagccccgtggtgggaggcggcaattaccggatgccggtaacgtggtagccggcatcctccacggcctgacgcagggtgtcatcggacacgtcgggggtgcaggtgacggcggcggacttggagtccagatccacggtggcctctacgccgggcaggtcattgagggccttttccacacggccggtgcagtgggtgcacatcatgccgtcaatatggatggtcttgttcacggtattctcctcctttccttgagactggaacacggcgctctccggcaggggagcggtgggtgcaggctgatcggcaaagaacgggggcttccagccccgcagacgcagggcattggacaccacgcacacggagctgaggctcatggcggcggcggccagcatgggattcagggtcaggtgcagggccggatacaggacaccggcggccacggggatgccgatggagttatagaagaaggcccagaacaggttctgcttaatgttccgcagcacggcgcgggagaggtccatggcggcggggatgtccagcaggctgctcttcatcagcaccacatccgccgactcgatggcgatgtccgtaccggcgccgatggcaaggcccacatcggcctgcgccaaagccggggcatcgttgacgccgtcgcccaccatggccacccgctgaccctgctgctggagctgggccacgcacttggccttatcctgcggcagcacctgagcgatgacctgatccacgccgatctgacgggcgatggcgttggcggtgcgctggttgtcgccggtgagcagcaccactcggcggcccatgcgccgcagggctgcgatggccttggcgctgtcgggcttcaccacgtccgccacggctatacagcccagcagatggccgctctcggcgaagaacaggggcgttttgccgtcctcggccagccggtgagcgtcggcctccatggctgccagcgagacaccgttctgcgccagataaccggcattgccggccagcaccgcttcgccggagagggtggcttggatcccgccgccggggacggagcggaagccggacacggggcagagggggatgtggcgggcttgagactcctccacgatggcgtgggccagcgggtgctccgagggcttttctgccgaggcggccacgcagagcagctcttcctccgtgacgccggaggcgcagaggatatccgtgacacggggctggcccatggtgacggtgccggttttatccagcaccaccgtctgcaccttgtgcagcagctccagactttctgcggacttgatgaggatgccctgctgggcggcctgtcccgtacctaccatgatggccacgggggtagcaagacccaaagcacaggggcaggagatcaccagcacggcgatggcgatggagaggcagaagtggacatccatgccccccacgaaggcccacagcagggccgccgtcagggagatggccatgaccgccggcacgaagatgccgctgatgcggtctgccagccgggagatgggggccttggaggaggcggcctcctccatgagccggatgatctgggagagggtggtgtctccgcccacacgggtggcccgcagctccagataaccggagctggtgacagtggcagaggtgacggcgtcgccggggaccttctccaccggcaggctctcaccggtgatggcggactcgtctacggcggcgtggccgtcggtgatgacaccgtccacggggatacggccgccctgacggacgatgacggtgtcaccggccacgatctcctccgtggggatggtgagctcctgtccctgacggcgcaccatggcactctccggggccagagccagcagagcggagatggcaccggtggtcttgccgcgggagcgctcctccagatacttgcccaccgtcaccagcgtcaggatcatgccggcggactcgaagtacaggtccggcataccggatacctgtccggcggccagcaggcccatttcaatgaggctgtatacaaggccagccgcagcgccgacggccaccagcgagtccatattggggctaagcttcaccagacgggagaaacctacggtaaaataattgcggttgagaatgagaatggggatcaccagcgccagctgcagacaggccagcagcagagggtgcatatgcagcacctgcggcaggggcaggcccatcatgtggcccatgctcaggtagaacagcggcaccagaaataccaccgaccagatgaggtgcttcttccggcggcggagggcggcgtcctgatcccggcgcagctggccctgatccgtttgggaggcaggggaggccccgtagccagccgcctttacggcggcgatgatgtcactttcggcgaccgccttctcgtcgtaggtgacggtcatactacccagcatcaggttcaccggggcgctctgcacgccgctgagcctggagaccgccttttccacatgagccgagcaggcggcgcaggtcatgccggtcacagcaaattgttcggtcatcatcggcacccccttacttcatgagcttttgcagggtggtgaccagctcgtcaatgacggcgtcgtccccctgacggatgccatcggccacgcaggtacggatgtgggtggccagcagctccttgctgaagctgttgagggcggcgctgacggcggagacctggatcaggatatccgggcagtaggcgtccttttgcagcatctcccgcaggccacggacctgtccctcgatgcggttgaggcgatgggtgagtttcttttgctcctcgtcggagcggtgctttgtcttatggcagcagcagtccatacaaatacctccctggggtataatttcatggtggcattatataccccctgtgggtatttgtcaacgtttttctttgggcttgaagaaaatggctgccagcacggcaaagaccaccgctgcggcgatgccgccggaggtagcggtgaggccgccggtgaggatgcccagcggccccttttccgccacggccttggccacgcccttggcgagactgtatccgaagccggtgagggggacagtggcgccggcgccgccccagtccaccagatactggtagacgcccaccgcctgcaaaagcaccccggccaccacatagccggtgaggatgcgggcaggggtcagttgggtgcggtcgatgagaaactggccgatggcacagaggacgccgccgcagagaaatgcgttcaggtaatccaaggcttacactccttcctttgcggcggaaagtgccaccgcatgacagatgccggggatggactccccctgaaaggaggaggtggggctcagcagcgccccggtgggggcgaagagcaggcgcttccagcgtccctcccgcaggccacggagcaggtagccgttgaacacggcggcggagcagccgcagccggagcctccggcgtgcatatcctgcttctccagatggtacagcagcagcccgcagtcggtgtagtttttcgtcatgtccacgccgtcctgccggaagaggtcagtgacgatctggtggcccagcaaccccagatcgccggtgacgatgaggtcataatcctccgggccggtggcggtagcagtgaagtgcgcccgcagggtgtcgtaggcggcgggggccatggcggcccccatgttgttggcatcggtgatgccccagtccacgatgcggccgcaggtgacgtgggtgatatagggaccgtccccctgagcccccagaatacagcagccggaggcggtggccgtccactgggcggtaggggtgcgctggctgccgtaggggaccggcatccggtactggcgctcggcggtgcagtagtgggaggaggtcatggcggcggccagccgggcgaagcccccgtcaatgagcagcgccgccagggacaggctctctcccatggtggagcaggcgccgtacagcccgtagaaggggatatggaagctccgcaggccgaaggaggtgccgatgcactggttcagcaggtccccagccagcacgtagtccagttcaccggcggtgaggccacccttttccagcgcccggcgcaggacccgctcctgcatggcggattctccctgttcccatgtctttttcccgaagaaggcatcgggggatagctcgtcgaaatagtcggagagggggccttgcccctccatgcggccgccgatgttggcgaaggacaccacgctgggaggatgggagagctgcaccgtctggcggcccgctcgtttggtctgcatagacttcacctcgtgtttcgtatttgaggtagtttgtcccggtgagggaaaaataaacaaggaaggaagccctgcggcaaagccgcagggcttccttccttttcagatgttccatcggaacagcagcagatatgtcgctgcaaaatcaccggccgccagattacgattaccggctgcggggtcactcgccggatctctccgggacggttgccgccgtttcaggctccggcagcagatccgtcatgctcttgaggctgatgcccagcgtggaggcattgtgcagcagagcagaggtggtggggggcaggatgcccgccacgcccagaagaatcaggcccagattaaagcccacaatgaagcggtagttccgatggatgcgatccataaggctctgactgatgcgccgcagcgtcaccagctggaacagatcctcggaggtgatggtgatatcggagatctcccgtgcgatggcggcgccggtggagatggcgataccggcatcggcctccgacagggcaggggagtcgttgacgccgtcaccgatcatgatgaccgtgtgtccggcggcacgctcccggcggatgaagtctgccttatcctccggcaggacctcggcgtggaactcgtccacccctacctcctccgccacacaggcggcggtacggcggttgtcgccggtcatcatgaccaccttgcggatgccgcagttgtggagcgcacggatggcgtccttggcctcggcccgaaggggatcgtggatacagatcaccgccgctagctgcccggccagacacaaatagaggtgggagtactgggtgggcagggcatcgaacctctcctgctccccggcggggatggtgcagccctcgtcctcgaaaacgaagtgggcgctgccgatgagggtcttttcgccgtttaccatgctggagatgccgtgggccacgatgtactgcacctgagagtggtactcctcgtgggacagaccccggcgcttggcctcctccaccacggcggtggccatggagtggggatagtgctcctccagacacgccgccagacgcagcatctcttgagcgtcgtgacccccgaaggggaccacgtcctgcaccgtggggacggcgtaggtgagggtaccggtcttgtcgaacaccacggtatccgcctgggccacggcctccaggaagcggccacccttgacggagatgtgatagctgctgcactcccgcatggcggagagcacggcgatgggcatggagagcttcagagcgcaggagaagtccaccatcagcaccgccagcattttggtgacgttccgggtcagcaggtacgtcagcaccgtaccgcccagcgtatacggtaccagccggtccgccagacgggcggccttgtcctcggtggtggatttcagcttctcggactcctcgatcatccggacgatgcggtcgtagcggccgctgccctgtaccttctgaacctccaccacgcattggccctcctcggccactgttccggcgtataccggactgccggggcgcttgaccacgggcatggactcgccggtgatggaggcctgattcaccatggcctcgccgctgaccacctgaccgtccagcgggataaggctgccggtgcggaccagtatccggtcgcccagctgcacgtcaccgatgggaaccagtacctccgtatcgccgctttgcagccataccttgtccacattcagggacatagccccggccagatcggccacagacttcttgtgggtccactcctccagaatttcgcccagccgcagcatgaacatgacggagccggcggtggagaagtcgccccgaaccatagagacggtgacggcggtggcgtccagcaccgccacggtgagctcgccgtgccacagggccgtcagcccctcccggatgtacttcacggagcggtacagggccatggccgtggtgatgggggcggggaggaacagcttggagaagatgcggcgcatcaccgtcatggccagcttgtcctcgaactcccggttcagagcacgggaggtgtgctccggcaccagctccatgacctcggccttggcgaaggagaaggaagccagtgcgccgatcacggcgctacgctggccggtgtagcgcaccacggcatcctgtgtgcggtcatagaccgtgacctccgtgacaccgtctacgctgcgaagatagtattccagcagatccgcctcatgcaacgacatccgggcgcagtgcagatgtacccgcaggcggttgggggactcgtggagaatgttgcatttcatagatcagtttgaacctccaaacgaaagaagaaccgcagaatgcggctcttcctataacgcagtgctgaacttaagcctcttgtgcggaagtgtcctcaatggtctcggcctcggcctcagcggcccggtggtcattgatggccttggcgtcggcgtagatgtcgtcggcgccctcgcggacagaggtgacggtgtgcatgatgcagtccttggcacgcagagcggcggcggtggtgtgggcatagaccttcttagcgtcctcgctggtgaggatcttcaggccggccgtgccgaacagcagaccggcggcgaacaaaccaatgtgtttcatgataaattgcctcctgttgattgcgattgctgcgctgaaacaggcgcagctcctaagatcgaagtgctccgatccgtagaagaatcatagcacaacgagtggtacaatgcaagtgtttttcataaaaaagtggggatcatgggaacaaaaagctacacaaccgacgccccaaagggcatcagggccagacgggccattttgaagcactggaggcccacagggaccccgacaatggtgacgcaccacaggcatcccagaatgacatagcccaaggccatctccattccggagagcagcaaccagagaatattcaccagcagtgagaagcccccgccgccgtagactacctccttgccgaaggggaaaaaggccagagaggcgaatttgaagcactgaaggcccacagggatgcccacaatggtgatgcaccacaggcagcccgccagcacccaactcagtccgccgatgagtccgccgaagagaaaccagaggatgttgccgatcgttttcatagaaatacctcgcttgtaactgtctccgagggagactggttctatcttaagcggaaattgtgaagttttcaaccacggcgggaaatattttcccggtgagagtcaggcaccggcggaaatataaacaaatctacccttgcaaagaggagagatatatggtaaaatcaccatagagtgcaggcccgttgctgcccggtgtgaaaaaccggaggagaaagggtaggcgctccccagccttggagcagctgctggagaacgatgcggacagctatgagatcgtggaagtgggcgatatacaggcagacgacctgctcctgtcagccgaagagcatcaggctatgctggcacagggagaggcaccgtataactgggagagtgagagcggtcaggtgtcctgaacggctgaacagaaaaacgggctgcggcccgtgatagggaagctcatatagccttgcggaaatggtgcaaggcgtttctacggagccgccgaaggctctactatgggtgctctgccggaaaagcggcggggtgcctattttttgcggaaaggaaggaaacggatatggtgcaggttttgaaggggaacatcgtgcaggccccggcgctgggggagctgcagatcacggagcagggctatctggtgatggaggacggcgtgatccggggcgtctatgaccggctgccgctggaatatgctacggcgccgctggtggattacggtcaggcactggtgatgcagtcctttgcggatatgcacctccacgcccctcaataccccatgctgggcatgggcatggacctaccgctgctggagtggctggacacctacaccttccccacggaggcacggtttgccgacacggactacgcccgccgcatctatcgccgtctggccacggacctcatcaccaacggcaccacccgtgtgtgtatgttctcctccctccacaccgacgccacgtggatcctcatggaggagctggagcgggccggtgtcaccggctatgtgggcaaggtgaacatggatcgcaacggcctgcccggcatcttgcaggagaccacggaggaatccatccgggagacgctgcggtggctggagggatgtcatttcgaccatgtcaagcccattctgaccccccgctttacccccagctgcaccgatgagctgatggcggcgctgggccgtctggcgcaggagaaggggctgtatgtccagtctcacctgtcggagaatctgggggagatccagtgggtaaaggagctgcacccggactgtcagcagtactgggagacctatgataagtacggcctgtggaaggagcacaccatcatggcccactgtgtccactccgaccggcgggagtgcgacgccatgcgccgggccggggtggtggtggctcattgcgccggttccaacatcaatctgtgcagcggcgtgtcaccggtgcgggagatgctccagcagggtatttgggtgacgctggggtccgacattgccggcggcgcctgtctgcccatgtataaggtggctaccatgagcatccgggcctccaagatcaagcgcatcgagacggactggtccgaggacttcctgacggtgccggaggcctactatctggctaccagctccggccaccgttatttcggggacggggacggcttcgccccaggcaatcggctccacgccatcgtggtggatgacggtgacttcacggaggccagccatcccctgacggtgcgggagcggttcgagcgggccatatatatgctccaccgccacaacatcaccgctgtctggtccgacggtcgctgcgtggtggggaagatgctgcaataaaggaaaaatgaagaacaagccctccggccaaggccggagggcttgctgcttcaaatactgcgttccatagggagataggcggaaaaatcattggggtggacctcgccggtgaggacgaagccgttcttggtccagaaggccaggctctgaggattgccctcatccaccgccagccgcagccggtgatatccggcagcggccagccgggccatgcagtcccggaggatgcggctgcccagtccgcagccctgacggtcatgagccgtcatgaacaggccgatgaaggcggtgtcggcggcgggatagttcaggatcagatccatcacggcaatcaggcagtccccgtcgtaaaagcccacgaaccacttatcttccatagcttttcccggcggcagggcggtcatatcggtccggatgctctccggcgtgggctgcggcgggtgataccggtagaacaggggattgccctgcatcagcgtacagacctgcgctgcgtccgcctccgtcaggcggcggacgggacagacggcgtcactcatggggctgctcggcggccagaacggcctccgtatcggcgtcgcacaggcggatcaacttctccgccagaattttggagaacccggcgatgagtccgcactcgatgaccagccgccccacggccccctcctcgtccccggagggggtgcggatgtcggtggcggcgctttggacctgctggttgaagaacagggccagctgccggaatttttcggagtaggcctcgtataccgaccgcacgcagtcctcgctgctgtcggcgggcaaaattttctgcacgtcgctgatgctgatgctctgcttcatggtgaggatcataatgaggtaggcgatgtgtacccggtagtacttccgcttcaccggagcgggcatgatcttcaggcgcacatagttgttgatggcggaggaggtgacaaagctctccttgccgccggggatggacgggatgaagccgagatactgcaccagcagcaccaccacctgatccatgtagagccccagatcagggatggaatcccagtccggcagatggtaattggtgatgaaacggtcccagcgctccagcttgtgaataatgagtttcttatcgtatgacatggcgtacctcctgtgcaggcgccgtcggcgcaccggcagcgtggaagttggctgtttttcttaacagtctttaaacaactactatataatatcagaaaaacttgttttttgcaagggtaaatagcagttgacctgttgacttttaaaatctaatatgctatattaggaaaaacagaagatagggggcttgctattatgcccaagcaggtgtatatttatggtgactccttgctgaaggccaccatgccggacgaggggtatcattaccatttccactacgacgaggtactgcagcgctatccggagcgccggacgcaggtggtgaaccgctccaaaatgggggctaccatctccaagggcgagtcgctggtgcagcacgatctgaaccgggggctggaggctgactatgcactggtggcctacggcggcaacgacagcgactacgattgggcagccatcgatgccgacccggcgggggatcatcgtccccggacggagctgcctgcctttcgggagaagctccgccacacggtgaccatgctgcgggagaggggcatccagccggtgctcatgagcctaccacccattgacgccgcacggtatctggccttcatctgccgggacggactgcggaaggagcggatcatggactggctgggggacgtgcagatgatctaccggcatcaggagatgtactccgatgcggtgacccagctggcctatgccgagggcctgcccctgatcccggtgcgggaggagttcctcaacgaccacaggctgatgcggctcatcgccgcagacggtatccatttgaccatgcccggctatgagcggctgttcgacacactggcggactggctgcggatacgggtataagaaggagtagaaagctatgctgagaattttcaccgatacggcggccaacgtcccgccccacttgctggaacagtatcacatcaccgccatgcccctgacgtatctgctggatggccaacccacggagctggtgggccatgactactacgaggccatgcggaagggcgccgaggtcaagacctcgctggtgagcccggctctgatccgggacaccatggagagtgcgctcaaggatggggatgacgtactgtacatcgccatctccggcggcatcagcggcacctgctggagcgctgagcttatggcggaggagctgcggggcgaataccccgaccgcatgatccgggtactgaatacctgcggcgcttcgttgggagagggcctcgtggtgctggaggcagccaaaatgctggagaagggctgtacggcagatgaaatcatccggcaggctgaggaaaattgcgggcggatgcgccagttcttcatggtggacgacctgaagtatctgcgccggggcggccgcatcagcgctgcggcgcaggtagcgggctctctgctgaagatcaagcccatccttcagtccgatgaggagggccacatcatccagcacagcaaggttcgtggtcagctgaaggccatggagacgctggcggagttgtacaaggagtacgccgtggacggcacccggacggtgggtatcgcccatgccgactgtccggacggggcgctgcggctgcaggccaagctgcgggatgccggtcagaccggtgagatcctctcggtatgctatgagccggtcaccggtggccatgtgggccccggcacggtggcgctgttcttcttcggcgaggtctggcgctaaggccggattttctgcggcggagaggttgcatccggcacaattattggtataatataggcggcgggatgtcttgtcctgccgcctatcttgtataaaaggggggatcttcccatgaagataaaggacctgctggagcgctccggcgtgcagtcactatccggcggttgcggagaagaggagatcacggcgctgacctacgactcccggaaggcgcagaccgggagcctgtttttctgtctgcggggcgcccgttccaacggagaggactttgcgccggcggcctatgcacagggctgccgctgtttcgtcagcgaggggacgctggacgtgccggaggatgcggacgtggtgcgggtatcggatgcccgtcaggcgctggcgcagatctcggcggcgtttttcggctttccccagcgggatgtgaccatcatcggcgtcaccggtaccaagggcaagaccaccgtggcggagacggcctgctccgtcatgaaccgcatgggcctggcctgcggcgtcatcggctccaacggggccgcctacgccgggaagcacgtgggaaccagcaataccacaccggagagctacgagctgatgcggctgtttcgggccatgcgggacgagggcgtccggtatgtggtgatggaggtgtcctctcaggcgctggcccgccaccgggtggacggcatcaccttcgatacggcggtgttcaccaacctctccccggaccacatcggcaccgaggagcacccggactatgcccactaccgggacagcaagaagcggctgttcgcccagtgccgccacggcatcttcaacgccgacgacccggaggcggcgtacatgatggcgggcagtccctgcgaaaagagcacctatgccattcaccgtccggcggatctccgggcggagagagtgaacatcctgaaggccggggacctgttcggtatggagttcacggcggccggcaccacctaccacattcggatgccgggggagtacaacgtctacaacgctctggcggtggtggcactggtgggacgttatacggaccgcacctgcgagttggcggaggccctcagctatgtgacggtgccgggccggttcgaggtgctgccggacgtgatgccgggatgtaccgtggtgctggattttgcccataactccatcagtatgaacgccctgctgcaaacggcccgcagctacgatccggctcgcatcatcgccgtgttcggcaccggcggccgcaccagagtgcgccgccaccagctgggggaggcggtggccaagggggccgatttggccattattaccaccgacgacccggatcgggacgacccggcggaggtcattgcggacattgccacctgcttcggccccggcagctgcccccatgtgggcatcgtggaccgccgggaggcggtgcgctatgcgctggagcagctgtgtcccggcgatatgctgctgctgtgcggcaagggccgggagggataccagctggtgcaggggaagaagatcccctacgacgaagaggagacggtccgctcctgcgcccgtgagctgctggagtcccgcccacaggccctgtgaccgggataaggaaggcttcctacaagataaaaagagacggtgcggcatagccgcaccgcctctttttatcgttcctgttactttgtcagcgtggcgacccactggctgtacttggccagattctcgtcccgctccgccgcatccttgccgatggtgagaatgtagaccttgatcttaggctccgtgccggagggccgcaccagaatggcggtgccgtccgccagctcataccgcagcacattgctgccggagagttccatagcagtcttttcaccggtgcggcagtcgatgacgctgccatcggtgtagtccttgcggcgcagcacctctaccccggcgatgtgggtggggggatcggtccgcagggacttcatcagtgccgccatcttctccaatccgtccagacccggcatcaccagattgtgggtcttttcgccgtagaagccgtacttccggtacagggcctccagcgcatcgaacagggtcatgccctgcacggcataccatgccgccatctccgtcaggatcagggaggcggtaacggcgtccttatcccggacatagtcgcccagcatatagccatagctctcttcatagctcatgatgacatggcccagcccctgagactccagctggttcttcttctccgccatgaacttgaagccggtgaaggtatcacagcaggtaacgccgttggcctcggccaccttccgggccatctccgtggtgacgatggtcttgaggaagtaggggtgttcaggcagcttgcctgcccggcgcatggccccgatgaggtaatccagcatcagaacgcctgtctggttgccggtgacggggatgaaggagccgtctcggctgcgaaccatgatgcccacccggtcgctgtccgggtcggtgcccagaataaagtcggcgcccaccttgtccgccaactgaatggccagatagaagccctccgggttctccggattgggggagaccaccgtggggaagttgccgtccagcaccatctgctccggaacgcagtgcagatgcttcacgcccagaccccgcagagcctccggcaccagcttccagccgcagccgtggaagggggtatagaccatatggaaggtatcggccaccttggccatggactcccggtcgttgaccatggccatgacgtgggacatgaaccgttcgtccgtctcggcgcccatgatctcgatgaggccctgggccttggcatcgtcaaactccatccggcggatgccggtgaaaatgtcgatctgctccagctcacgggcaatggcggcagcgtgctggggcggcagctgggcgccgtcggaccagtagaccttatagccgttatactccttgggattgtggctggcggtgacattgatgcccgcctgacagtcgtattcccgcacggcgaagctcagctccggcgtgggccgcagcgactcgaagatacgcacatggatgccgttggcggcgcagacctctgcggcggctctggcaaactccatagagtggttgcggcagtccatgcacagggccacgccccggcccttggcctcctcgccctcagcgcagatgacgttggcaaagccctgagtggcccagcggatgacgtggatgttcatctggtgcaggcccaccttcatggtgccacgcagaccggcggtaccgaattccagcggcccatagaaccgctcccggatctccttctcatcgtcccggatgctctccagctcggcgtgctcctgctcgctcagggcaggggatgccagccacttttcatattcctgcatataagacatgctcgatgctcctttcggtttactcgcctgcctcgtcgggcatgggcatggaggccagcagattctgggcgtcctccgccatggaggccgggacgtacaatcccacgccgaagccggagaagccgttgatgacctttccggcgcctccctccttgtcgtagtatttgaaacatgggatcccgtaagccgtcagcagggagatggtcacgtctgcgtcggcaggggaatcgaaggtgtgggcaagcaggactgcctgctcccgctcaccgttttcgtcagtgggccaagcggggatattgggggagataccccagtaactcagttccatggataggcctcctttatatatgtccttgtattatatcacgaattttcttaaaagggaagtgtttcatttgtgatattttgttccggcggagatttgatacgcccgatagatctgctccagcagcatgatccgagccagatggtgggggaaggtcatgggggacatggacagccgccagtccgcctgccgcttcaggctctcgtccagccccacgctgccgccgatgaggaaggtcagctgcgtcttaccggccacggccagttcctccatccgacggctcagctccacgctggaacagggctttccctcgatgcacagggcgatgactgccccgcccttggggagcctttcccggatggctgccgcctccgccgccagcgcccgctgtacctccgccggggaaggagactccggcagacggctctccggcagttccaccagctccagcttgcagaagcgctggagccgcttgacgtactccgccgccgcctccagatagaatttctccttcagcttgcctacgcacagaaccgtcactcgctgcataccggtacctccatcccgtaggggggactgacctcgctgcggggagccacctccagcagtacctccgcctccaccgtattcaggcgtcgctgcaccgtgtcccaagcccgctggggggtgttgttctcccggctcaggtgggccagaacgatgcaccgtgtgccgcaccgggccattcgggcggcgaactccgccgccgcatcgttggacagatgcccctcgtcccccaggatacgggccttcagggaatagggatacggcccgctgcggagccactccacgtcgtggttgctctccagcaccagcgtatctacccccgccagagccgtctccgcctccggggtcacatagcccgtatccgtgagaaaacctacggaggcgctgccgtccacccgatagtccacgctctgggcggcgtcatgggaggtgcggaacaccgtcacccggcagtcccccacagaaaacaccgtccccggctccaccgggcgcagcaggggctcaatgccggcaatgcggtaggccagctgccgggcggtgccgggacttgtgtaaatggggatgcggtggtgcttcaccatggtttgcaggccgctgacgtgatccgaatgctcgtgggtgatgagtacgccgtccacgtccgccatggtcagccccagctgcaagagtcctgtcttgatgcggcgtgtggaaattccggcgtccagcagcagatgaacgtccccgtccgacagcagcaggcagttcccctcggagccgctggccagtgtatgtatggtcatcaatgtgtctttcctcgcaataaaccgactaccgccgcagactgccaacagcctgcggcggaaagcttatgtcctatcagcagatgtgagcctcggtctcctccggctccggaatctcctccacccggatatcggcgcccaactggcgaagcttgcccaccagatcctcgtagccacgctcgatatactgtacctgcgtcagctcggtctcgccctgagcggccagaccggcgatgaccagagccgcaccggcccgtagatcacaggcctgcaccggcgcaccggtgagttgtgtgacgccctccaccacggccacccggccgtccacctggatctgagcgcccatgcgccgcagttcctccacatacttgaagcggttgttccatacgccctccgtcaccagactggtgccttgggccagacacagcgccaccgtgatctggggctgcatatccgtggggaagccggggtaggggagggtcttgacgttggcccgctgcagcggcccgctgcggcggatgagcatggtgtcgtcctgctcctccaccgtgacgcccatttccatgagcttggcggagatgcagtccatgtgcttgggaatgatgttgcggatcagcagctgtccgcctgtggcggccacagcggccatataggtacccgcctcgatctggtcggggatgatgcagtaggtgccgccgctgaggcgctccacgcccttgatgcggatggagtccgtaccggcgcccttgatgtcggcccccatggagttgaggaagttggccagatctacgatgtgtggctccttggcggcgttttcgatggtggtggtgccgtcggccagcacggcggccatcatgatgttcatagtggcgcccacggataccacatccatgtagacgttggcaccggagagccggccgcccctggctgcggcatggacgaagttgccctccgtcacttcggcgcccatggcccggaagcccttgacgtgctggtcgatgggccgtacgccgaagttgcagccgccgggcatggccacggtggcctcgccgaagcggcccagcagcgctcccagcagatagtaggacgcccggatgcgccgtgccatatcataggagggatgggtgctgcggacggtgcggcagtcgatctccacggcgtgctgattcagcacccgcacccgtgcgcccagctcatccagaatggagaaaaacagggtcacgtcgctgatttgggggatgttctcgatgcggcatacgccgtccaccagcagggcggcagggatgatggcaacggcggcgttcttggcaccgctgatcgtgacctcaccaaacaggggacggccaccgtgaatgatatacttgttcaaaacaggcatcctctctttttacatatagccgggacaagggtagcttgcccggagacggtaagcttcatacggccgcggccggaagcgttttaacataaggataccctcggcttttcacgagggatacataacatagtataccacaattttttctaaaagcaatgacaaagacattacagagcgaaaaaatctgacggaaaatttcgctccgcaatgtcttttttgtcaccgttttgttcttttcccgtcagcccagccagcggaaatgtcctgtcaccgtcatgcgggggatgtcgttgcgctccaccgcctcgtcgatggggtttccgtggtggatcaggaaggggataccctgccggtttcgccgatctgagcacagcccgatatgaacccgatcaccgaacaccacgatgtcccccggctgccactgctgcccatccgacaggtcgcaggtcagcacctgcgcatggcggcggaagaaggtatccaaggtgttgacccggcggaagtcgatgttggggtcgggggtggtgatgtggggatacgcctccggacaggcggcgatgtccgcatccaccagcgccttcaggtcatagcccgccgcctgaaaagcctgccagatgacgtcggtgcagacccccagtccgtcatcgggatagcctccggcgtagtatttgctctgatagtggggatccgtggcgatgtaggcccgtgcgcccagcaccacatccgtccaatcgtccacgccgtcgccgtcggcgtcgttggggctttgcaggtccgtcagtcccagctgtcgggcggtataggaccgctgcggtccgaagcgccacagggtatatcccgctgccgccagtaccgggatcatcagcagccacagccaccgaaggtgccgccgtctgcggcctgagtatcgcttttccatccgtcatccctccttgttggggagaagtataccagacgtctggcgaaaaatccattacatttccgtcaccgacagctgctccggggaaaagtgcagccggaaggaattgcggtagaactcgatgaacccctcctgctggagcctgctcagctcacgggacagggcgctgcggttcaccgccagatacgccgccatctcctcacgagacagggagagccggaagcagtcggatccctgacggctgcggcagtcttgcaaatacagcagcacccgccgccgcaggcttggctcggagagataggtgacccggtgccgcatctgccagaacttctgggccgattcccgcagcagattcatccgcagccgggcatggccctcacagtggcgctcacagccctccatgatccgctccagcggcaaaaacagcacctccgccccctccggggagagcaccgataccgggcttgcctcgcctgctgccatgagcatttccccgaacacgcccccggcggtgtggcgggccaccagctgcatggccccgtcctcccggtactgtacggcatccacggccccctgcaggacgatgcccgcctgcaggaccgtgtccccggcgtgccagaggaactccccccggccatagcggcgcacggagccgccaaggcacgtcagcagatgccgcagctcctccgcctcgatgccggagaagagaatggtttgttgtaacagagggatgtccggctgcatagacggctcctttcgttgcacgggcaacgtaagcccagcgatagtgtggtaaaatagggaaaaacttctggaggtataaatccatgaacaagaaaacactctggatcacggagaccgccgtgatgatcgccctgctggtggcgctgcagtgggccaccaagcccttgggacagttcgtcaccggctcctgcgtgaatctggtgctgggggtatcggtgctggtgggtggcctgtggtgcggcctgacggtggcgctggtgagtcccttcttcgcttttctgctgggcatcggcccggcgtttctgcccattgtccccatggtggccgtcggcaacatggtgctggtggttatcctgcaccttctggcaagccgtgacaagatcgccatacgcagctatctggccgtggctgtaggagccgtgaccaagtttctggccctgtggctgctgatcgtgaagctggtgctgcctacactgggactggcggaaaagcaggtggcggcaatctctgccagcttctcttggccccagctggtgactgccgccatcggcggcgtgctggccgtgaccatcgcccccctgatccgcaaggccctgcgctccaagtaagaacgtatcaaccgtcttttaacggaaaacagcctgccggtgttaccggcaggctgttttttgcttgccaaggtcggcgcttgaaagatccttagattttcgggcagcgctattaccgctcccgccacatccgtggggagagcatcaccagaatgggcatcagctccagtcgccccagcagcatcagcagcgacatgaccaccttgctgaacccggagaaggggctgaaattccctgccgggcccagacggcccagccccggtcccacgttgccgagacacgtcagcacggcggtaaaggactccgtaaagcccaggttgtcccaagccagaagggtggccccacccagcagcaggatcatatatgccaccatgtaggccgccgccgaggagatcacccggtcctccaccagctgtccgtccacggtgatgacggagatatgcttggggtgcaggatctttttgatctcccggtgtagcagctttcccagcagcaggatgcgggagaccttgatgccgccggaggtagacccggcgcaggcgccggtgaacatgaggatcaccagcagcatctgaccaaagaccggccactgggcaaagtccgccgtggcgaagccggtggtggtcacggtggacacggcgttgaagacggaatccttcagcgcccgacccagcggaacgctctgctgcaccatgagactggcggcgataaggccgatggaccccaacgtcagcagggtatacagccgcagctcctcgctgtgcagcgccgcccggatgtgtccccgcagggagatgaagatcaaagagaagttgatgcccgacaggaacatgaagatggccacgatccatgtgatggccggggagccgaaggcggcaatgctggcgttgcgggtggagaaaccaccggtggagatggtggaaaaggagtggagcacagcctcgtaaaagtccatgcctgccagacacagggccacgatctctgccgccgtcagtccaatgtagatgccatagagtaccttggcggtatcactgacatggggcagcagtttgctcttgatgggaccgggactctcggcccgcatcaggtgtacggctcccgcccccgtccggggcatcagggccagaaacagcaccagcacacccatgccgcccatccactgggtcagcgcccgccagaagaggataccccttggcatggcctccacatccgtcaggatggtggctccggtggtggtgaggccagaggccgtctcgaacagggcgtcagcatagtgggggacagccccgctgaggacgtaaggcaccgccccgaacaggcacagcacgatccacgccatggccaccaccgtatagccgtcccggccctgcagacggttcttccgggccgggatgcgggtgaggatcagcccgcacaggctgcacagccccagcgtccacaaaaacggctcccagcaggcctcaccatagcctgcggacaccagcagcggcagcagcaggcacccggcttccacccagagggtatagcccatgatgttcagtatcaaacgaaagttcatgtcacttgtcctttgcacattccgtaaatattataataagaaatagccgtatcgcaaatggccataagtattcaaattatattcccccggactgtccctgtcaagtccggcccgatgccccctccggagaggggaggggactgcgtgggacgaaaatttttgcacaaaaaacatcgccgcaggagggcaggacgcccggcccccatgaggtgaaaagctatgttccatggaaaaatctcacaattcttgcggaattgtatacactttcgtgactttttcagaaaactaatgataatttttcactgcaacaaaagattttatcccattgactttggctgtgaattatgtcattcttaacataattcaatcatatgcgccggagaatggggcgctattctccgtgccgacgaaaggagtgtcctgctttgagcagactggatatcaagacacccagccgggcccagaccgtggtggaagggctttaccgggatatggagcggcgcattgccgccagccctccgggcctgtgtccggtggatatgtccctatcgtttctgcagctgtgccatgcacagacctgcggcaaatgtgtcccctgccggatcgggctggggcaactgacgctgctgatcaatcaggtgctggacggcgaggctaccatggagaccattgccatcatcgaaaagaccgcccgcagcatcgtcaacaccgccgactgtgccatcggccgtgacgccgcccgtctggtggtggaggggctggagggcttccgggatgactacgaggagcacgtgaagcacaaccgctgtctggcgggcctgcaaaatcccgttccctgtgtggcactgtgtcccgccggcgtggatatccccggctacatggcgctggtaggggagggtcgctgcgctgatgcagtgcgcctgatccgcaaggacaatcccttccccacggcctgcgcctatatctgcgagcatccctgcgaggcccgctgccgccggaatatggtggacgatgccatcaatatccgtggcctgaagcgctatgccgtggaccacgccggggtggtaccccagccggagtgcgctcccgccaccggcaagaaggtggccatcatcggcggaggccccagcggtctcagttgcgcctactacctggcccttatgggtcacggggtcacggtgtacgaggagcgggagcagctgggcggtatgctgcgctacggcatccccagctaccgcttcccccgtgagaagctggacgccgagatcgaatccattctgtctcttggtattgaggtacataccggcgtcaccgtgggccgggatatctggctggagaagctggagcaggagtatgactgcatctacatcgccatcggcgctcatcaggataaaaagaccggcatccccggcgagaacagtaagaatgtcatctccgccgtggagatgctgcgtgccatcggcgacaacgagatgccggatttcaccggcaagcaggtggtggtcatcggcggcggcaacgtggccatggacgtcacccgcagctccatccgactgggggccgacaaggtcacctgcgtctatcgccgccgtcaggcggacatgacggcgctgccggacgagatcaccggtgcgctggcggagggagccgagctgatgacgctggccgctcccgtccgcatcgaggccgatgaggacggcgccgccaaggccctgtgggtccagccccagatcatcggggaggtggacaaggcagggcgtccccgtcccggcaaggcggcgctggaggaggttcgcatcccggcggatgtcatcgtggtggccatcggacagggcgtcgagatccagggcttcgatcaggccggcgtccccattcagcggggtgcctttgtggcgggcctgtcggggcaggtgcgggatatggacagcgtgttcgccggcggcgactgcgtcaccggccctgctaccgccatccgggccattgccgccggcaaggtggcagccgccaacatcgacgagcatctgggcttccgccacgagatcaccgtggatgtggagattcctagccccaagctgaacaactcgcccccccacgggcgcatcgataccaccgagcgggaggcctgtgagcgcaagcacgacttcgaggatatcgagtgcggcttgacccaagagggggcctgcgccgaggcaggtcgctgcctgcggtgcgaccacttcggctacggaattttcagaggaggtcgaaacgaaaaatggtaacattgaccatcgacaatcggatcgttaccgtgccggagggtaccaccattctggaggccgcccgcaccgcacgcatcgagatccccaccatgtgctatctcaaggagatcaacgaaatcggtgcctgccgcctgtgcatcgtggaagtggaggggcaggagcgcctgatcccctcctgcaacaacgtggtggccgagggcatggtgatccatacccactctccccgtgtgcgggaggcccgccgggtgaacctgcggctgctgctgagccagcatgagatccgctgcaccaagtgtacccgcagcggcaactgccgtcttcagcagctggccaacgactataacctgctgggggagcactacatcaaggacctgcggaatatccccacggatttcagcaaccccgtggtgcggatcgagaaccgctgcgtccgctgtatgcgctgtgtccagatctgcgacaaggtgcaggggatgcacgtatgggacctgatgggtaccggctcccacaccaccatcggcgtggggaagtaccgcaccctgggggagtccgactgcaccttctgcggccagtgcgtggtccactgtcccgtgggtggcctgcaggagcacgatgacaccggcaaggtgttcgatgctctggccgaccccaataagatcaccgtggtgcagatggcccccgccgtccgggtggcctgggcagagtactaccatctgacgccggagttcgcctcggcggagcgcatggtcaccgccctgaagcagatgggctttgactacgtgtttgataccaactttactgccgacctcaccattatggaggagggcagtgagttcgtggaccgctttacccatcgggagcggtacacgtggcccatgttcacctcctgctgtcccggctgggtgcggttcctgaagggccagttcccggattataccgacaatctctccactgccaagagtccccagcagatgttcggcgctctggccaagagctactttgccgagaagatcggcgtggaccccaagcgcattttcgtggtgtccatcatgccctgcaccgccaaaaaaagcgaggcggccctgcctaccatgcggaccgtcagcgacgatcccgacgtggatgtggtgctgaccacccgtgagatcgtgcggatgttccggggcgagcagatcaaccccgccaccatggaggagactcccttcgacagtccgctgggtaccggtaccggtgcggcggtgatcttcggtgcctccggcggtgtgatggacgccgccctccgcagcgcctattatctggtcaccggctccaatcccgaccctgatgccttcagcgccatccgtggcgtgaagggttggaaggaggccaccttcaccattccgggggtgggcgacctctccgtggcggtggtcagcggcctctccaacgcccgccagctgatgaccgatctggaggagggaagggtccactacgatttcgtggaggtcatggcctgtcccggcggctgtgccggcggcggcgggcaacccatccacgacggcacggagatggccgaggcccgtggaaatgtcctgtggaacatcgacaagaagtccccggtgcggttctcccatgagaacccggaaattcagaccctgtaccgggagtacttgcgtgcgcctctcagtggccgttcgcaccatctgctccatacggatcacgagggctggaagatgcccaaccagaagtaagagataaaaagaggactctgagccatcggctcagagtcctcttttttatgcagcgtcaagcagcaccgtcatccacggggctggaagggctgacccgtcaccacgtccagccatgtgaactgtccgccctccagcaccatgcagctgtgggggctgttctccttgggcagggctgcggagccgggattcagataggtgtaacggccgcagtcccggcgcaccggcacatggaagtgtccgcacagcaggatatctccctgccgcaggggcggtggcgtgtccggcccgtggatgtggccatgggtggcgtggatggtgaggccgtccagcaccagcagggcggagtcggagagaatggggaagtggagaaccatctggtccacctcggcgtcgcagttgccccggacgcacagcagctcgtccgccatgtcgttgagcagcttggccacggcgggcggctcatagccctccggcagcgggtttcgtgggccgtggtacagcaggtctcccagcagcaccagccgctggcagccggtatcccgatagagctccagcagccgccgggtgtaggcggcggagccgtggaggtcggaggcgatcatcagtttcatgagaaaaactcctttcggtggagaatatgtctcattctaccagccttggaggagaagggcaagctttttctgccccttacgcccgttcccgccgcacaagacccagcagcaggctcactgccagcatcaccgccgccacactgacccagcagaagcccatatcgtacaggggcagcttccggcaaagctccgtcacagcgcccagcgacagctgtgcggcatccaacgcatagatgacgctgacggttccggtgcctgccaccaccagagagtagacccaacgattcttgacccataggctgtgggtcagccccagcaggatcagcacaatggccacggggtagatggcgttgagaatggggatggagatgctgaggatggcgttcagtcccagattgcacaccaaaaaggagaagcctgtcatcaccagcacccactggcggtaggagagctttccgaaaagggtggagaaatactgggagatggagttgataagccccacgcaggtggtgagacaggccagcgtgaagatggccgccagcagcacggctcccggtgcgccgaacagttggtagacgatgcaccgcagggtccatgcgccgttctcctgaatgggatacacgccggagctgcacatccccatgtaggacagcatggcatacaccagcgccagaatggttccggcgaagatacctgccagaacggtgtgccgcatccgatcgcgcttttccgtcatgccgaaggaacccagcgtggtggcgatcaccaatccaaagttcagggcggcgatggtgtccatggtctggtagccctcggaaaagcccttcaggaagggggcggcgtcataggccgtctgggacggggccacgttcacctctccccggaacagaaagcaaacgaacagaaataccagcagcaccagcagactgggggtcaggaagtggccgatgcggttcaccagcttccccggtgtcatacacagccacagagccaccagaaagaacaccagcgagtacaccagcatccacacggtggtattggcactctccggcagatagggggccaccgccatctcgaagggaacagaggcggcacgggggatgccaagaccgggcccgatggagagatagatcagcagggtgaagacgatggcgaagcgcttgcccacctgttgccccaaccggtccagcccgtcgaagcgggctaccactaccacacccagcaccggcagcaccaccgccgtggccagaaagcccagcatggccggcagggtgtggctcccggcgttctgccccagaaagggcgggaagatgaggttccccgctccgaagaacagggaaaacagcataaagctcaccagcagcattttgttcctactcaatttcatgtcgatactccttgtttttttcaaaatttccgcaaaaaaagacccgtcccaaattcctttgagacgagtcttgctatacaatacccgcggtaccactcaaattgcacgacgaaaaacgtcctgccacttcaggctctatcaagccctatgcactcacgtagcctacacggagtctcctactgacagatgcgttgggggactcggctcggaagggataagagttctggcgctgtccgccgggcttccaccgtccccggctctctatgcgacgtgctgccagctccgtcttcgtcatcgcttttgatgttcacttgtcacggacatcataccatcccgtaaagaacttgtcaagagggaaaatctcacgccgacgcatcgtccttcaccggctcctcgccgtgaagctcccgccggatggcccggaagcgctggggaacctcctcctccgccatgcggatggggacgtccgtggtgccggcggcctgcgccgtctcgtaaaaccagcacttgtattccactgtctccagcgtgtgctgcatctcccggatctgatccagcagaacctgccgctggtggtggaacatctgcagtcgggtgtcgatggtgtcgtctccctgcatggccagctggatgtattgccggatgtcacggatggacattccggcctttttcatgcacccgatgacctgcagccactcgaagtccgacttccggaacagacggattccgccggaggagcgctccacaaagggcagcagcccctccttgtcatagtagcgcagcgtggatgccgggatatccagcagcttcgccatttcacccacggtatagaccattttccaattcctccgaaaaaattttgcaaaaccccttgacttaaagtgtactttcagttttagagtatagataagctttaagagcatcatacagcgcagaagcgctgctgtcaagactccgtttctcggagccggtcagcgacgaagcatacagcaaactgtaaggaggagagccatatggcagtcaaacagacggcggggcgggacgccctgggggagttcgccccgaaattcgcagagatcaatgacgatgtcctattcggtcaggtatggagtcgagaggacaggctatccctgcgggaccgctcgctggtgacggtggtggccctgatggcgcagggcttgacggatgaatccttccgctaccacctgctcagcgctaagaaaaacggtatcacccgtgaggagatcgcagagatcgtcacccatgcggccttttattgcggctggcccagggcgtgggcggtgttccgcatggccaaggggatctggacggaggaggatgccaaatgattttgcaggagacctatacgctggcaaacggtatagccatccccaagctggggcttggcacatggttcattgacaacaacaaggcggcgcaggccgtccgcacggcggtggagctgggctaccggctcatcgatacggctcaggcctacggcaacgagcagggcgtgggcgagggcatccgcacctgcggcctgaagcgggaggagctgttcgtggccagtaaggtggcggcggagcacaagacctatgaggacgccgcccgctccattgacgagacgctggagaaaatgggcctgacgtatctggaccagatgctcatccactctccccagccgtggagggagttccggactgaaaggcggtattttcaggagaacagggccgtctggtgtgcgctggaggatgctcaggcagcgggaaaggtgcgggtcatcggtgtctccaattttctgcgggacgatctggagaacctgctgaccggctgccgggtgcgtccggcagtgaaccagctgctgctgcacatcgccggtacggacctgcccttgctggactactgcacccagcaggacatccgggtggaggcctattcccccatcgcccacggcgaggccctgaaaa

SEQ ID NO: 12347 - DNA, 61374 bp, Unknown
  gut microbiota DNA sequence
atatcgattttaaccgtcctttgcaaaaaccggcaggcgccacagggggcctgccggttttttatgctcgggtcaggggtcagggcggttcctctcataaatggcagctgcgatgcaaatgcgctgatccgtctgccgttttccagcagcacgcagctttgttcctccatatccggtcaactcccttcggttagaatagactaacttccgtgctttcaaaaggccgccgtcagcggccttcccataagctgtctgtcttatctatatggatcgtactgccagttccgtgcaaacacaagatgcttctcccgcttggggaaatcttttcggatgggtgcgatgcggcgacgggcgctgcgtccattcgcagcctaaaaagggacccctgcggcgaggccgcagggggttccttttctatgcagggatcgaccgtatctgcagaaattgctgatgcagggtcctcttacattttctccggggcgctgcagccaatgagggtcatggcgtttttcagcaccgcacgggtggtatccgccagcttcagccgggccagcagcaccggcttctcctcgcccttgatgcggcaggcggcgtagaatttgtggaacgccgccgccagagcggtgaggtagcggttgatgtggctgggatcgtagtcccgtgccgccagcagcaccacctgaccataggaggcgatctgcttgatgagggcctgctccgtctcgtcggtcaggaggctgaaatccacggcatcggcggccgggacggtatagccctcggcctccagattcttcagcagggtgcagatgcgggcgtgggcgtactgcacatagtacaccgggttctcgctgtcctcccggacggccagacccagatcgaactccatctgcgtctccggcttggcgttgaagaagtagcggcaggcgtccacggggatctcgtccagcaggtccgtcaggctgatggccttgccggtgcgcttggacatccgcaccacctcaccgtcccgcaccagcttcaccagctgcatcagcacgatatccagccggtgctcaccgtccagccccaaagcgtccatggcacccttcaggcgggccacatggccgtggtggtcggcgccccacacgttgatgaccttatcgaagccccggacggcgaatttgttgcggtgataggcaatatcggcggcgaagtaggtgtaaaacccgttggcacggcgcagcacgtcgtccttcaggcccagcttctcgatgtcctcgtcggacttgccggcctttttcaggttctccgccaggatccggctggtggccagccacagagcgccgtccttctcataggtatagccccgctgggtcagcgccttcacggagtctgccacatagccgctctcgtggagggtggactcgaagaaccatgcgtcgtactggatgccgtaccgggccagatcggccttcatcttggggatgttgtgatccagaccgaatttggccagcgcatcgtgtcgggtcttttcgtcgcagtccagatacttctcgccctcctgctgataaaacagccgggccaactcccggatatcatcgccatgatagccgtcctccgggaactccacagcgtcctcgccacggatcagctgctgataccgggcatccagactccgggcaaacttatcgatctggttgccggcgtcgttgacgtagaactcccgccacacgtcggcaccggacttctggagtacggaggccagcgtgtcgcccagcacgccgccacgggcgttgcccatgtgcatggggccggtggggttggcggagacgaactccaccatgtacttctttccggtcagcgtgtcgttgcggccgtagtcggcgccctccgcctccacacaggccacggtatcgccgaaccagcggctgcccagccggaagttcagaaagccggggccggccagctctacggaggtgaaataggtgtccgtcaggtccatctgctccgtcaggatctgggccacctgccgggggttcatcttcatggccttggcggcagccaggcagaaggtggtggtatagtcgccgttggcggtatccttggggatctccaccgagggggtcaccgtcacgccctccggcagcaggccggcggcggccgccttctgataggcggcggtggtcagggccagcacctggtcctttgcgctttggatcatattcattgcggggtcctccttcattcttgatatagctccagccggaccgtcagcgccgacaccggcgtctgtcccatgtgcagggaataatccagcgtaatgtgtccttgttcctcctgctccaactcccacaacagctcatgggcggctacgtccagcgccagcacgccctcctccgtgggcaggtgcagggcagtgggggcggcggggtccagccgcatccggtagctgttgccgctgcggagggtcacgcagccgcagtcctccagccacagctccgaggtcatgagactgccgtcctcatcgctgcgggcctgataccgcagctgccaccccgacggggtgcgctccagcgtgccgctgccccgaaagtgcagcacatcctccatgtccgggagccgggtgcggctctccacatggaccttcacatttccttccatgacggcctcctcagtatcgctcgatgtccaccagccgcacgggagccgtaggctcctcctgcaggaagcggcgggccatctggccgaagccctccggccggtcgctggtacacagcagcgcctgtccggtcccctccggggccagcagctgccgccgggccagcgcatcatgcagggtgtggacggactctgcaccggcgttcaccagcgccacctccggccccatgatctcccggatgatatccgtcagcaggggatagtgggtgcagcccaggatcagcacgtccagcccctcctgccgcagaggctccagatactcacgggccaccgtctcaatgaccgcgtcgccgggctgatagcggccgttttccaccagcggcaccagcagcgggcaggcccggctcaccacatggatggtttcatccagccggtgcagcgtccgctcataggcgccgctgcggacggaggcagcggtggcgatgaggcccacccgccggttccgggtcatggccgccgccttccggcaggcgggctccaccacccccaggatgggcaggtcgttttccgcctgcagctggggcagggccgtggtggatacggtgccgcaggccaccagcactgccttaatatcgaaggagcgcaggaagtggacgtcctgccgggcgtatttcagcaggatctccggcgagcgcccgccataggggacacgggacgtgtctccgaagtatataatgttttcagagggcatcagccgccgcatttcccgcacggcggtcagcccccccagaccggagtcgaacactccgatgggccgttggtccatgactgggcctcctttccggcatccccgtgacgccgcagtgtatcacgctgcataataaaacaatcatattatactatggaagctctcctttctcaagtgaaaatttggcggatttccccggttttttcagtggtattttcccgccgggtctgttatactgttgcatacagtaaaggccctatcggcggcgtggaggtgtatccatatggagatcaaaatgacagagaagcagttccggcgtctgctggatctggtgtatatcggcaactggatcctcaattccactcggggcgacgatcgcatccgccagtatgacgaggtggagagtctggtgttctcccagtgtctggcccatgggatggcgccgctgacggagctgtatcaggggcagctgatcccctcacaggcctttgccgagggcggcatccacgaggccatcatggcctatgaggacaccaccttcttcgagatactggcgcaggagctggccctgcgggacatggatgatccccccatcacggaggagaattacgacgaggtcatgaaccgcatgaacgcctatctgggggagttcgaggcccacggcaccgaccacatctccgtggacatggaataacgcactgcataaaaaatctgccgggagagcacttccggcagattttttatgcaccggcgcaggtctgctgatgaaagagccggggacggaagctccgtccccggctcttttgatttttgttacgcctcagcgcttcagcacttctcgtagatggtggcaacgcccatgccgccgccgatgcacagcgtagccagaccacgcttggcctcgggacgcttctgcatctcatgcagcagggtgacgatgatacgagcgccggaagcacccacggggtggcccagagagatggcaccgccgttgacgttgaccttgctcatgtcgaagtgcagctcacgggccacagcgatggactgagcggcaaaggcctcattggcctcaaccagatcgatgtcgtcgatggtcaggccagccttagccatagcggcacgggaggcaggcacggggccaacgcccatgatcttgggatccacaccgccctggccccagccaatcagcttggccatgggcttcaggccgtacttctccacagcctcggcagaagccagcacgatggcggcagcgccgtcgttgatgccggaggcattggcagcggtgacacgctgggtacccttgtcctcggtctccttggcaccggtgacctcgaaggtgtgaacgacctcggggttgggggactcaggacccacggggaaagcgccacgcagcttggcgatgccgtcggcggtgacgccggccttggggaactcgtcacgcttgaactccacgatctccttcttgaccttcacagggacgggaacgatctcgtcgtcgaagcggccggcggcctgagcggcctcggtcttctgctgggaagcagcggcgaactcgtcctgctcacggcgggtgatgccccagatatcattgatgttctcggcagtggtacccatgtgatagttattgaaagcatcccacagaccgtcacggatcatggtgtccacgatcttcttgtcacccatgcgggcgccccagcgggcatcgggggaggcgaagggggcagcgctcatgttctcggtaccgccgcagaccacgatgttggcatcgccggacagaatggcacgggcgccctcgatgacggacttcatgccggagccgcagaccatgccgatggtgtaggcgggaacggagtaggggataccggccttgacggagacctgacgggccacgttctggcccagaccggcggtcaggatgcagccgaacatcagctcatccacgttctcgggagcaacgttggcccgcttcagggcctccttcaccacgatggcgcccatctcggtggcgggggtgttcttcagggaaccgccgaaagaaccgatagcggttctgcagcagttgacgacgtacaagtctttcatagtatcttttcctcctaatttgttttgggtccctttttggctttccgatttgccttggtttccattaccttatctatcgtaccatttttagcaaaatagtcaaggggagaatctcataaaaataggaaataattccagagttcccttgtttcgggagaaaatcagtccccggagccggtgctgccgccatccttttcgccggagttatcgctgtccgtactgctgcccgtgccgggatcggcgctgccggagctgaactggctgctaagctcggactgccgggccgtgagacggctgtaaaagtccccggcgtccagcttgtcatagagaccctgattgtattccaccgtcagctcgctgcgggcctgagtcacgttttccgtgaacatctcgtccagcacggagccctcgtccagcgtctggccgatggccacataccagccttcgtcggtggcaatgacatcgctgacctgtcccggctccagcgcagagaaggcggcggacagggtatcccccagcgtctcggcgctgaaggtgcggccggtgtccccggcctcgatgcccaactgctgggccatctccgcatacagggcatccttatcctcggcggtggccagccgggcggcgaagtcctctgcctgcgcctgagagttctcaccgccggaggcgggccagtacagcagcttcaccgttacgtagcccttttcctgagcgaaggcgtcgatggcctcctgcgtggggtgcatggcgctgccgtcggcggtatacagatcgtgaatccgtgcatacagcaggtacatccggttgatgctgtcgaaggtatcctcgctgatgcccagcagctgcagctgctgctgatagccctcctcgccgccgtagtaggtgacatactgctgccgctgctgctgaagccgggcctcgtcctcctccgtcagcgatacattgtactgtttggcccactgccgcagcagggcgtagagcttcaccgtctccacggcgtcggccttggcataggacccgtaggtcatgccgttggacacctcggcgctgaaatccagattcggcacataggaggtcaggtactcacagtcataggccagccagtacaggtactcctccgccgagatatcctcgccgttgatgcgcatcagcacggcgtccggatggatgccggtgacctcgtagtaaaggccgtccgttcgttggccggcgctcatccggtcaccggaggcgatccacagcaccatcagcaccgagaccgccagcatcgcagcaaaacgtttcatagggttcctccttctgcgggcgtttcgcccgaaatttccttgcgtttgagagtcagcgcctccaccagatgcccggcggcgtccagcgcctcctcgccgggcttcaggtgcagcgtcagcttgggatgctcccccgccgacagcagcaggcggctgcggtaggcaggcagagtgcataccgccatgaggctggggacatccatccgctggcccagactcagcagcagcgtctggcccttctgggtaatatccgtcaccccggtgtcggcggctgccgcccgcagcagcgccacatccagcagcgccgtcaccggccggggcggatcgccgtagcggtccgtcagctcgtcgatgaggtccgccgccgcatcgttatcccgcagggcggcaatgcgccggtacaggtccatccgctgccggtcggaggggacataccgctccgggatgtacgccgccaccgtcaaatcggcggagcactccggtcggatctcccggcccttcccctgctgctccagcacggcgtcgttcagcagcttcagatacatatcatagcccacgctcatcatgtagccggactgctccggccccagcagattcccggcaccacggatctccagatcccgcatggcgatgcggaagcctgcaccgaagtccacatattcccggatggcggacagccgcttgctggccacctccgtcagcaccttgccggggcggtaggtgagataggcgtaggcccggcgggaggagcgcccgatgcggccccggatctggtgcagctgcgccagacccagccggtcggcgtcctcgatgatgagggtgttcacgttggggatgtcgatgcccgtctcgatgatggtggtacagaccagcacctgcacctcgccgtcggccatctgctgcatcacccggctcagctcctgctcggacatcttgccgtgggccatggcgaggcgcacatcctcccccagccactggcgcagccgtccggcggtggactcgatgttttccacccggttgtgcaggtagtagacctgtccgccccggttcagctcccgccggatggcctccgccacggcgggccactcgtgctccatgacgtaggtctgcaccggctggcggtccctggggggctcctcgatggtggacatatcccggatgcccgacagggccatgttcagcgtccggggaatgggggtggcggacagggtcagggtgtccacctgacgcacccgctcccggagcttctccttgtgggtcacgccgaagcgctgctcctcgtcgatgacgagcagccccagatccttgaacaccagattcttcgccagcaggcgatgggtgccgatgagcaggtcgatctttccctgcgccgcccgctccagaatgtccttggtctgcttgggggtgcggaaccggctcagcacctccaccgtcaccgggaaggagcggaagcggttcatggcggtggcatagtgctgctgggctagcaccgtggtgggtaccagaatggcggcctgcttgccgtctaggatgcacttcatcaccgcccgcagggccacctccgtcttgccgtagcccacatcgccgcacagcagccggtccatgggtacgggcttttccatatccgccttgatctcccggatggcctgtaattgatcgtcggtctccgtgtagtcgaaggcatcctcgaactcctgctgccacggggagtccggggagaaggcatgacccgcctcccgctgtcgctgggcatagagcttgatgaggccctccgccagatccttggcggctgccttggcccggtgggtggtcttggcccactccgtgccgcccagcttattgagccgggtgtgctcggtatcctccccggccccgatatacttgctcaccagatccagcgccgtggccggcacatacaggcagtcgctgccggcataggcgatcttgatgtagtccttctccaccccgtcggtgggcatccggatcatccccacgaagcggccgatgccatggtgctgatgcaccaccagatcgccgggggtcaggtcggcgtaggattggagcttctgctgattgctgtcccgcttggggcgggcctttttggccttgcctgccagcggcgtggtcagctgaccctccgtcagcaccgccagctgtagggccgggtactcgcatccggcggacagagtacccagcgtaatgagcaccacgttccgcaccggggagcgctccccctccagatccagtgccgccgggatcctccgggcctccagcagctcctgtaaattccgggcccgtacctgtccgccgcacagcaccatcacccggcagccgctggtgagatagtgggtcagatccgtcaccgccgtctccagcgatccgccgtagccggacagctgccgggcgtcgatttgcagcagggccttgggggccagcagataccggctggtgggcaggctctccagttggcacacggggaagcgctccagctgccgggcaaagtccgtctccggcagggctgcttctgccatggggccgcacaggatgccgctctccatggcggaggtgacgtccgccttcatctggctcagccagcccttcagggcctctgctgtgcgtccgctttcgctgacgcacaccagacactccttgggcagatagtccatggccgtcaccatctccgggtataccgccgccagaaaccggtcgctgccgttggggacgatgccctgacgcagcaggtcggcatccgaccgcagctgccgggccacgggcttatccttcatccgtcccgccagcgtctccagccgttcggcggtctcctccgccgcaccgtcccgccacaggggcagcacctcgccggccggcagcagcagcgcctcccgacagttctccgtccgccgctgggtggcgacgtcgaagaagcccagcgagtccacctcgtcgtcaaaaaattcgcatcgtaccggggcctcggcaccgggggaatagacgtccagaataccgccccgcagggcgaactgtcccggcccctccacctgctccgtgcaggtatagcccgccgccgtcagccgccgggccaactcctccacctgataccgcccgtcggagcgaagggtgaagctgcaccgctccagcacctgcgggggaatgcatcgcagggccagtgcatcggcggtggtgacgatcaccggggactcctcttgccggatgcggtacagagcctccagccgccggtattcccattgacggctcaccgccgccagctcccgccagtggagctcccggcccgtcagcaggacaggctcccggccggtgagggaccgcaggtccgccgcctgccgccgggcctccccctcgtcggcgcagagcatcagcaggggccgcccggacttcagccgcagcgctgccgccgtcatggcccggtgcaccggactcaggcccgtcaccagcgccgggccgccgccgctctccatcagctgcgccagctcctgtatctcccggagctgccacagctcccgcagcagagcttccatcctgccgcctccttccgatgatgaaatgtccgctcccagcgcacatgggacgggaacgccttcggggggcgtatacggcagtatacgcccctatgctgtaagttacctgaaaaagcagagaaatatgcgtgaaaaatgatgtgtgtttgcctccgggcagaaaggcgccaaagaacgccagcagaaaccaatggtttttggatttcctttaccttcaagagtttcgttcgatatgagatgtcgtgggaattgactcagcagcagccccgctgccgctcccgcccagatgaagaaactggtggttctgccgcttgggagtatggattcccccggtagaagaactgcccccttcaaccacccaatgtagcggcagcgtgagtagaagaacgccgattccctgcttcggcggaatttaggaagcaactcttgcacacaaaaggaagtccagaaaccatcggtttctggcggcattttttgcatactttttgctgctgttggcaaaaagtatgccgtcggagacaaaaaggatgatgggccgccggaggcaaaacagaaaaggctgtcggaaaacttcccttcaaaggtaaagcaaatgaatcagttgaaccggttcatggcccggtcagacccctgcgagatcaatacctccgcagcgtcaccggcacggtccagcgcctccatcagcaccttctgatcctcgcccagagggcggccgatgacccagtccaccacgtcatagcccgcctgccccggagcgcctacccccaccttgatgcgggggaactgatcggttcccagatgctggatgatgttcttcaggccgttgtggccgccggcactgccgccggtgcggatgcggagcttacccaccggcagggagatgtcgtcggagatgaccaccacgtggtccgccgggatcttatagaatcgggccgcctcgcctacggattcgccggagaggttcatataggtctggggcttcatcaccagcaccttttccccgttcaccatccactccgccgtccacgcccggaagcgcagcttattgaagcggaagcccttccgccgggccagcccgtccaccgccagaaagcccatgttgtggcgggtactctcgtatttggagccggggttgcccagccccaccagcagccagctgacgccgctgcccttgcgctgaaagatcataggtccacatcctttgccgtgtgaattatataaaattttccgggatcattctatgagatcggctcccaaaagaaaaactctgcattttgtgcctccggcggcggtatttcttccggtttgttgttctacgcccggcactcaaaaaatacgactatatattaacatagaagcttgaaaaagggtagcgaaactttgccgaaacacaagaggagtatcctccgccccgcacaaaagccgaacagacggcgtctgttcggctttttcacaggctcgctctgtccgctcaccggcacagcatcagggggatggcaccggggaggttccgcagctctacacggggggcgctgggggcgtactccccgtccagcgaccagggcaggtcctcatcggtggtgacggtcacctgctgcacatggcggaaaatgacgccggggccgttgtagtccatgcggctgatggcggcgatgaggctttgcaggtcgatggccgtcttgggcatccgcagcagcagcaactcaaaggctccgtcgtccatctgcacccggctggggtccagcttcatgatgccgcccagagaggtggagttgcacacggctccgaagatgaactccccctcgaagatctcctcccccgtctccacccggcagcggtagggccgcagggagtccagatccttcatgccctccagaatataggcgaagtgacccagagcgttcttggtggcctgtggcacggagtaggagctgcgggtaaaggccccgaaggaagccacataggcaaagtatcggtcgttgtggcggcccacatccagatagaaggggtggccgtttacgatgctctccgccgccttcagcggcgtggcggggatatgcaggctggcggcaaagtcgttggtgctgccgttggggagatagcccacctccggacactcaggcagctgcatcaggccggacaccatctcgttgaaggtgccgtcgccgccggcgcagaccaccagatcgtatgctccgcccagctccgccgccgcacgggtggcgtctccacgtccctcagtgaggaataccttcaccagatagcccgccttggaaaagcaggccaccgcatcaaacagcggtgcaaaggacttggtgcgccccgcacgtggattgacgataaacagaagctttttatccataccggttctcctcttttgcacacggttctcggttttgtgtttccgcagaagacagcatagcacttttattatactcctctctgccggaaaaagcaatgggtgctaccggagaagtcctgaacggtttctgcacacattcttaaagaaaaatttgcccggcgggcttgcattggcggcgggctttcggtatgatataagatattatggtacgttgtgcgtacctacttcggcggaaggagtccacccatgaagcagcaaaaaagccactatttcaaatggggcctgacggtgtttctcaccgtttgcgccatccttgctttttacgatacattctatatgaacggcaccctccagcgctatctgagcaagctggtgacggtgctggccccggtgctgtacggcttcgccatggcctatctgctggcacccatcgtcaactggatcgagggcttgatccgtaaggggctgaagcggctgagcaagggtcaggagcccaagctccggggcggtctgctgcggggtgtcagtatcctgctgacgtgggccgtggtggcatacctgctgtatctgttgatgagcgtgctgatcccccagctcatcgacagcgtggccatgcttatcaacaacgccgaaagctactataataagatatatgtctgggtcaccaacctgctggagaagaatccggagatcgccggttgggtggagaagaatctggagagctattacaacgacctcatgaaggtgctgacggagcaggtactgcccggcgcccagcagatgctcaccaccatcaccggcggcatctggacaggcatctggggtcttgtgaccttcaccaccaacttcctggtgggcatcatcatctccgtgtacctgctggccatgaaggagaagagtctggcccggtgctgcaagctgctgtatgccctcttgcaggaggagcaggcccgctgggtggtgcgggccacccgcaagacgaatcagatcttcagcggcttcgtccggggcaagatgctggactccctcatcatcggcattctgtgcttcatcggctgctccatcttctcactgccctacacgccccttgtgagtgtggtggttggcgtcaccaacatgatccccttcttcgggccgttcctgggcgcagtacccagtgcgttcctgatcctgctggtgagccccaagcagtgcctgatcttcatcgtgttcatcatcgttctgcagcagatcgacggcaacatcatcggccccaagatcctgggcgatgccaccggcatctccagcttctgggtggtggtggccatcaccgtgggcggcggctttgccggggtgctgggaatgttcctgggcgtccccatcttcgcctgcctgcagacgctggtaaagtacctcaccgaccggcggctggaaaagcgtcatatgccgctggaggcctgcgaatacgtccaccgggatcaggagcccatgcctccggaggagcctcccgctccgccaacggagaccaactgacagcgcagctcccgcatcggcatcccctcaggggatgccgatgcttttttgcgggctgccgggttttgccggggaggtgtgagcgctttccccgcatttttttgcaaaaacgaaactttctcttgcaaaccgtggggaaatgtggtacattgcacttcgacaactgcatatcgacaggccctcgccgggtgatgccacacgatcacacaggccgggggcgaccattatttctggcctgccgccgaaagggcggcaaggaaggagaagacatgaagaagagactattggctcttttcctgacgctgggactggtctgcaccgtactcaccgcttgcggagacggcagcaaaggccagggcggacaaggaaataacggcggcgaagcagtcagcggcggagagatcaccgttggcatcgccaaggacctggatgacagtcttgaccctcaccggatggtgaccgcaggaaccagagaggtcttgttcaacctgtttgagggcttggtaaagcccaattccaagggtgaattgatccccgctgttgcggagcgctaccagctgtctgaggacggaaggacttatacctttaccctgcgtgagggtgtgaagttccacaatggcgcaacggtgacagcggaggatgtggtatattccatcgaacgctgcgccgatacatcggagggtacgcctctggtgccggcgttttctgttatccaggaggtcaaggccgttgacgaaaagaccgtgaccatcaccattgcccagcgggatctggagttcatcagctatctcaccagcgccatcatccccaagggctacgacgatcaggctacccatcccgtgggtaccggcccgttcatgtacgtgtcccgctccccgcaggagaacttcgtcatccagcgctttgacgattactgggggatccccgcctatctggataaggtgacctataaaatttacgagagcgccgatgcgctggtgacggccctgaagggcaagtccatcgacctgtgcgcccatctgacctcgtcccagacggctcagctggacagcgacttccggatcctggagggtaccatgaatctggtacaggcggtgtatctgaacaacgccgtggcaccctttgacaaccagcaggtgcgtcaggccctgtgctacgccatcgaccgccagagcatcatggacatgatcgctgacggccacggtacggcgctgggcagcagcatctatccggccttcaccaagtacttcctgccggagctggtgcagaagtacccctatgaccccgctaaggccaaggagctgctggcacaggccggctatcccaacggctttgacatgaccatctccgttccctccaactatcagccccatatggacacggcggaggtggtggccgagcagctgcgtgctgtgggcgtcaacgtcaccatccagcccatggagtggggcgtgtggcatgagcaggtctataagggccgggacttccaggccacgctggtgggcctggatgccagtgccatgacggcccgtgcgctgctggagcgctttacctcggatcacgccaagaactttgtcaactacaacaatcccgactacgatgcgctgttcacgcaggccctgaacgcctccgacgacacgcagcaggcggagatctacaagcagatggagaccatgctctccgacaccgccgccaacctgtacattcaggatctggcggatctggtggccatgcgtcagaatctggcggggctggagttctaccccatctatgtgctggatctgtccacggtgcattttgtgaaataaggacggcgagaccgtccccatagaaatgaggcgatgaccatgaaatatgcggcaaagaagatcgtgtggatgctgctgaccatggtcatcgtctcatttttggcctttctggcctttcgcatcattcccggcgaccccaccgccaagctgctgggcgaacaggccaccccggagcgggtggaggccctgcggcaggagctggggctggaccgcccgtttctggagcggtacgtcagctggctgggggatttcgtccggggggacatgggctcgtcgtacaattacagtatgccggtgagccagatgctgcaggggaaaattcccgtgacggggcttttgaccttgctgtcgtttctgctgatcgtggtgctgtccatcccgctgggactcttcaccgcccgccatagcggcggagcgctggataaggccctgacggtggtgaatcaggtactgatggcggtgccggccttctttaccggcatcctgctgacgtacctgttcggcctgctgctgcggtggttcgtgccggggagcttcgtctcaccggcggagagcttctggcagagcgccggctatctggtcttccctgccgccgccatcgccatcccccgcatcgccatgacggtgaagatgctgcgctcggcgctgctggcggagatgaacaaggactacgtccgcacctcgtacagccggggcaacgaccggcgggccaccctgtacctccatgtgctgcgaaacgccctgccgccggtggtgagctttctggccatgacggtggcggatatcgtggcaggctctgtggtcatcgagcaggtctttgccattccggggctggggcggctgctgctgacctccatctccaaccgggactatccggtggtgcaggccatcgtggtactggtggccttctgggtggtgctggtgaacctgctgggggatctgctgaaccagcggctggaccctcgtctgcggctgacggattgagccgcacacatttgtaaagaaaatttttatggaaaggggggcgggcttcttgctgctgcaccagaaaaagaatcactatctccgcatcggccttgccatcacggcggtcatcacggccatggcgctggtgggctgcttctggacgccctatgcccccacggccatgtccggcagcgagaaattcgctgcgccctccctgcggcacctgttcggtacggacaacttcggccgggatattttcagccgggtcatggtgggcgcccgcaccaccttcttcatcagcgcctgcaccgtgaccatcggcgccgtggtgggaacgctggtgggcgccctgaccggttatttcggcgggctggtggatgaactgctgatgcgggtcaacgatgccgtcaccgccttccccagcatcctgctggcgctggtgttcatctccctgctgggcttcggcacctacaacgtcattctggcgctgggcatcgccttcatccccagctacgcccgtgttatccggggggagttcgcccggcagcgggagatgaactatgtgaaaaacgcccggctcatgggggccagccacctgcggatcatgctggtacacatcctgcccaacacccggcaggtgctgctgccgacgctggccatcgggtttaacaacgccgttctggcggaggccagcatgagctttctgggcattggtgtcaagccgccggaggtgtctctgggctacatgatgtccgagtcccagagctacatggtccgtgcgccgtggtatatgctcacctgcggcagtgtcatcgtgctgctgatcttaggggtcagcctcatcggcgagggcctgcagcagaagaaatgggggaggtagcgccatgctggagatcaaggaccttcatgtgcagttccatacctccgaccacgaggcagtacggggcatcgacctgacggtgcaggacggcgagatcatggggctggtgggcgaatccggctccggcaagaccgtgacggccatgatggtgtccggcctgctgcggccggagcaggcggatttccggggccgcatcctgctggacggcgaggatctgctccacgccggcggccagcgcatccgtgccattcagggcaaggacatctgcgtggtgtttcaggagcctatgagcgctatggaccccaccatgcggatcggtaagcaggtggaggagtgcctgcgggtccacacggacctgtcggcgcaggagcggaggcagcgggccctgcaggctctgcgggacgtggagctgccggacccggagggggtctatcgcaagtacccccacgagctctccggcgggatgctccagcgggtgatgatcgccgccgccattgtggcccggccccgtctgctgctggcggacgagcccaccacggcgctggacgtcaccattcaggcccagatactggccctgctgaagcggctgaaccaggagatgggaatgtccatcctcttcatctcccacaacctccatgtggtgcgtaagctctgcacccgtgtggcggtgatggaaaagggctgcattgtggagacggggccggtggaccagatcttcttccacccgcaggctccctatacccagcggctcattgccgccattcccacaaggaggaagctatgaacagcgaacccattctggaggtgcggcacctgaatgtgtggtatcggccctccggcgtgctgcgccggggacggcagcaggtgctccacgacgtgagctttgacctgtaccggggcgagatactggggctggtgggggagtccggctccggtaaatccacgctggcccgtgccattttggggatgctgccggactgtgagggggagatcatccatcacagcaagcgccctcagatggtgtttcaggacccggccagcgccatgaaccccagccgcacggtggagtggatattgtccgaacccctgcggatctacgggaaatacgacgccgccgagatgcggcggcgggtggcggaaattatggagctggtaggtctgccgccggagtgcggcaaaatgtacccgtcggagctgtccggcggccagcggcagcgggtgtgcatcggcacggcgctgatccagaagccggggctcatcatcgctgacgaggcggtgtcggcgctggacgtcaccattcaggctcagatattggagctcatcgcccggctgcgccgggagtacgggctgtcgtacctgtttatctcccacgatctgaacgtggtgtatgagatctgcgaccggtgccttgtgatgcaccggggacgcatcgtggagcagggaccggtggaggagctttacgaccatcccaaggaggactataccaaggcgctgttagcagcggcggagtgagcgcatatgaccaaccaactgaaagagaaattactggcctacggcaccaaggccgagccatttaccgtacacaatcacatccgggtgacggacctgcaggacggcgaggcccgtgtggagctgacgcttcagccggagagcctgaaccgttgggggacggcccacggcggcatcctgtttgccttagcggacatcgccgccggaacggcggtcctgaccctgcggcaggaagtgtgcctcactgtcaacgcctccatcgactttctggatgcggcggggctgggcagcaccctcatcgccgtgggccacgtggatcgcatgggcaagtctctctgcttctgccacacggacatcaccgacgagacgggccgcctgctggcgacgctgcggacggtaatggatctgacgggccgcccgctggagctgtgagcgctatgagggagttttacagacgccaccggggactgcaccggtggcttttggccgtggtagccctgctggcagtgtatttcgccctgcggccggtgccggggctgatgaactggctcagccgccacgtcatcatgccttgggagcgggcggtggccagcgtctgctatctgttccgcacctctatggcagaggtggcatatatcgtgctgctatcggtggctatcttctatgtagccaatgtcctccggcggttggtgactcagccccaccggggccggactctgtaccgcttcttcctgacggtggtgtgcagcgggctgagcatctatgcgggcttctgcctgctgtggggcgtcaactactatgccgactccttccagcagcagtccggcatctatgcccgctcctgtaccgtggaggagttagaggccgtcacggcggactttgcccgccagctggcacaggcggcagacaatgtgcagcgggacgagaatggctgctttgccgtgtcccggcaggagatcttcgccgccgccacgtcggtgtacgccccctcctatgaggagttcccctgtctgcggatgaaggatcacacgcccaaggccatcagctgctccacagcgctcagcgccatggacttcacgggcttctacttccccttcaccggagaggccaacctcaatgtggactgccctgccagcttcctgccctccaccatcgtccatgagatggcccatcagcggggcatcgcctcggagcaggagtgcaacttcatcgccattgccgtgtctctggccagcggcgacccggtgtaccggtattccgggctgctgatggggtatgtgcatctgggcaacgccctgtaccgggcggacccggaccggtggcaggtcatccgggatacactgccggatacggtggtggcagacctgcggcagaacagcgcctattgggcggccttcgaggggccggtgaacgacgctgccagcaaggtctacgactccttcctcaaaagcaatggcgagagccgtggcgtccagagctacggcaccgtggtggatatgctcatggcgtactacgggtaagtcaggttgcggtaagaggagctgcaaattccccaaaagcgcaagaacaggccccgtccgatggacggggcctgtccggcattaagctaacggtgtgattttcgtttcgataaaccgaatgtggtcagcgatatcgctttccgcaagatggttcaagtaaatgtcctcggcatccatatcgtcccacgcttcgacgactctatgtataagtacaaaagtcatatccggttcataggggctgtgtaaatgaacctgtccattacagagatatctttgcacatccgttgcctcctttcctttgaatttgttttcttattacattataccgcatcactgcacgcaaaaataatcgaaaaaatgtaataagaaagcaggccctcgtcctatggacgggggcctgctttcttatcaattgcaaatggggcagggcgagaagccccgctgtacagcattttcggtattgtatacccaaaaggaatcccctctaaacttgtagcagctgaacttgtgatataggtttgtaccgtcatcttcaataaaaaccacatagtcatctataaaggatgcaagtttctcatagctggcaatgtcgcgatccaaggagcggatatccgcattcaggcgtacaatctgtttttccagatgaagcatagtagattctttcgtggttatctgcttctccagatcagtcacctcggtttgcagcttttgcacacttacggtttggaggattccaaatccaacagcaagtacaatgagcagtgataggccgatgtaaacgatcgtgtgcttgtttagggcaagccgcttagtaggctccttagcggaggtttgatacggcgcctgtgaagatgtggaggtcggatttatgggcgccatcacctcgatgggctcattggatacaccttcagacgcagtctcacttctcacggacacagtctctgtatcagtcggcatattggcagaatgggtggctggagatgctacgggaatattatctgtgatgttggtgactttctggattttgcttccgcagtactggcaaaattcgctatcatcaggcagattgtggttgcatttgctgcaaatcatgttaatgattcctcctccaaaactcgtgtgccacatcggctgcaaaatttactgttggctatgagttttgcgccgcattttcggcaaaatagaatttgtccactttcgccagcagtcccagtctctccttcatgaaagccggacgaaggggcatcgcccaaagaggcggaagtctcgtcccgctgtggcaacagacgcttttcaaaatatttgacatttagccgataccatataaaatataatacaatcgagataacaaaaaatacgataagtgcggaaatcatatcaaaatttctcacgtaggtttcaacaccctgctggtatgcggtatagattgtttcaaaaagaagaaccttgcgagtgaaacgcacaaaatggggataatcgccgccagacttaactgcgatgagtatgcagagaacaaattgtgccactgcaccggcgaaagagagtgttaaccaccatatttttgtgtatatagccaagtttagacggaagctttccagaacggcaagcaaaaaaaggccacttagaataggccgcacttttgtatagaaggtaaaccatttcgtccccatcagcttattcatattctgtctccccttttcaaaaacacgttatgctaaaaagaagttacgaaagcaatattatcataatttggcgagatatgcaaatgaaaatactgcatatcgcacagtgccacaggccccgtccgatggacggggcctgtttcgataccggcactcccggaatttttctccacggagacgaaaaatacattgcgtctgaccagaggagatgacaagaaggatacgggcgtccgcagtcggaaagcacgccggggtctgatgacccggccccataaaaccaatagggggacgcatggcgtccccctattggttttatttatcagacaatgaagaaatcggagatctgcccgtacaggatcatcagcatacacagcggcgtgatatacttgacgcagagacggaagaaatcatagacccaagggcggttctcgccgttgaggaggatctcctgccgcagggtatccggcttcagctcccagctgatcatcaggcacatgagcagcgcccccaagggcatcagcaggccctcggccacgctgtcgaacagacccagccagctggtgctccagccgggcagcttggcgccggccagacccagcagctccgccggggagatgtgattgctgcccataccgtcggcgcagaccagagcgcacagggccgcacagatcaccaccgcaatggcggaatacagcttgcggcggtcgcccttgcccttttcccgtgccttatcgcagaaatgggccacgatgacctccagcatggagatggaggaggagatggcggcaaagaacaccagcaggtaaaacaggatgccgaacacgggaccggcgggtcccatcttatcgaacacgttctgcatggtgataaacagcagctccgggccgcccaaagctccgttggggtccagggcaaagcgtccgggaatgacacacagaccggccatcagggccaccacggtatccatgcccacgatgatcatggcgctcttgcccagatcctgcttcttgtccagataggagccgtaggtaatcatgacaccggcgcccaaagacagggagaagaacatctgcccgccggcggctgtgagaaccttccagaagccgggggcctcgtcgatgatgccgttggccacggcccagccggggacgaacatatacttcaggccgtccgccgcacccggcagggtgcaggagcggatgatgcagatgatgaggatgaagaacagggccggcatccctacggagcagacccgctcgatgccgccgcctacgccgctcatgaccaccagcatggtgatgagcatgaaggccagtgcaaaggcgatggacacgtcgggctggctcagcagcccctgaaacacgtcggcgccgcccaccccattggtgccgaattcggcgccgatgaggttgccgaagttcaccaccacatagcgcagacagtagccgcccagagcgctgtaaaagctgaagatcagcgccgcagcggcaatacccagccagcccagccacttgaagcgcttggagatgctctggtaagcgcccacagcgccatggcccgtcttgcggcccagcgccagctcacccagcatgatgataacgccgcagcacagcgccagcgccagatacaggatcaggaaggggaagccaccgttggcacccattttgttggggaagccccatatattgcccagccccacagccgagcctacagcggccatcagaaaaccgaagtttgaaccgaagcccttgcgatcgttcatcgtgtgtttctcctctccggtgcataacgtataaaaccctaaatattatacagcattttaacataagatacaacgattttttccgcaaactccgttggatacacatctatttatccagcaaaatgaggcagaccgcatatttagccggagcactccacgatttttgatgttttcgggaaaaagtgttgacaccgtggcagagatgtggtatattaagtgttgccgatatccgccggtgtggtggaatggcagacacaggagacttaaaatctcccggtagcgataccgtaccggttcgagtccggtcaccggcaccatccggtttttctgaatatcgcggagtagagcagttggcagctcgtcgggctcataacccggaggtcgcaggttcaagtcctgcctccgcaaccagatcgagtgttcataaccaacctgagagttggatgtggacactcgatttttttgcctacatttgtgtctctttgatcagcggatacagcacatccctcgcacacgatcccgtggcccctgcattttccagaaacccccaacagccgcagctacatatttttgccgccattgcagaaaataggcataccgccgatgaagaagggcaagcacacccaccatcgccggtaacaaaactcaacagctggaggatgtatatagatgaaagcaactgggatcgtgcggcgcatcgatgacctgggccgggtcgtgatccccaaggagatccgccgcaccatgcgtatccgtgagggcgacccgttggagatctacaccacacgggacggggaagtcattttcaagaagtactccctcatcggcgggctggaggacttcgccgcccaattctgcgacaccctgtcccgcaacacggatttcaccgccgctgtcaccgaccgggacggcatcgtggccgtagccggggccgggaagcgggagctgctgggcaagaacctttctccgcagctggagcagatcatggagcagcgcagcatctatcagtaccgctccgggcaggagcggctgccggtctccgagagcaccgggcagtacgcagcggcggtggccgcccccatcctgtgcggcggcgacgtgttggggctggtactctttgtctcagcggaggatcgtctccccggcgagggggagtacaagctggcccaagccgtggcgggttttctgggcaagcacatggagacctgactgcaaagggagccgggagagcgatgctctcccggctcccttcgcccgtttatcccagcagtccgaaggctccatggatcagcatacagaccgccatccccaccgccgtcggcagcaccatggccagaagcgtccaccggcagccgccggtctcccggcggatggtgaggcaggtggtgccgcaggggaagtgcagcaggcacagggccatcatacacagggccgtctccgtggtccagccgctgtgcagcaaaatgtcccgcagcgcctccagcccgccgcactccgtcagcgtcccggtgtgcagatagcccatcagcagaatgggcagcacgatctcattggcgggaaagcccagcagaaaggccagcagcaccatgccgtccagccccatgagccgtcccagcggggacagtaccccggcggcccgctccagcagagagacgcccccggcgtccatgttccccatcccccagatcagcagccccgccggggccgtcaccgtcagcgcccgtcccagcacaaacaccgttcgatccagcagggagcgcaccagcacccgccccacctggggcaggcgatagggcggcagctccagcgaaaaaaaggagggctgtcctcgcagcaccgtggcgctcagcagcttggacatggccagcgtcatggccacgcagaacacgatgacccctaaaaacaccgccgctgccagtgccgaccgccccggtccggcggcatcccccagaaagaacaggctaatcagggcgatcagcgtagggaagcggccgttgcatggaacgaagcagttggtgaggatggccaccagccgctctctggggctggcaatgatgcggcagccggtgacgccgcaggcgttgcagccgaagcccatggccatggtgaggctctgccgcccgcaggcgcccgccgcccggaagcaccgatccatgcagaaggccactctgggcagatacccggcgtcctccagcagcgtgaacagggggaagaagatggccatgggaggcagcatcaccgccaccacccacgccaccgtccggtagatgccgtccaccaccgccccctgcacccaccacggcgctcctgccagcagaccccgcagtggttcctccagcgccgtcagccaccggctcagcagccgggagggggcattggccccctgtatggtcaggtagaacaccagccccagcagcaaaagcatcaccggaaagcctgtaagccgggaggtcagcagccgatccagccgccggtccggggcgtgggggtctggcccggcgcaccggacgcactgccgcccgatctcctccgccagcgccaccaccgacgccgtcaggctgtcccgcagggcctgcccggagagcgctcccagccgttgctgcgcccgctgccacagggactgttcctcctctgtgggagggcttccccacagcagcgccacggcccggcggcgggacattcccgtctccagcagtcccagcgccgcctccaccggcgggacgtaggtcagcttccagccgtcctcccacgactcccggcggcacatcgctgccgcctgccgccgcagctccgccaagccctttccgctgcgggcggcggtggccaccaccggcacatccagcagctgccccagacgctctgtttggggtgtgacaccccggcgggccgcctcgtccatgagattcacgcacagcaccagccgctgggtctgctggcggagctgcagggccaaaatcagccctcgccgcaggcaggaggcgtccactaccacaatgacggcatccgcctgcccgctctgcaaaaacgccccggccacttcctcctccggcgaatccgccgccagagaataggtccccggcagatccaccagccggaaccgctgccccgcctgcgaaaaataaccctccgcccgctccacggtcttgccgggccagttgcccgtgtgctggcgcagccctgtcaggcggttgaacacggtgctttttcccacattggggtttcccgccagcgccacggtatatgtatgctccaccctacctcctccttccctgcggatagaccattgtatgcctgtcacctccgccgggtgcggggagggtgcggatgggcctccaagagcgcacaaaagcccgccagcggcgggcttttgcgatgacggagaggatgccggggcagacaataccctcccggtgccaacaaaggcggcagccctatgggctgccgcctgagtctgtcgagaaaagtgagaacctctcgtcaacggggaggaagggtgtgtgcgggaaacccgggaagggtgtcctgcacgatgatgatccccatttttcagaacttttttgaagttctgaaaaatgcctcagcgtgtcgaaaagactttttcgatacgctgaggcggcagccctatgggctgccgccttcttactctgtaaggaaacggaatcactcggccttttccacggcctcggtgcggtagatgaagcgcacagcgccgtccatgccgtccgtcagaccggagaagctgcggtagttgcgggagacctccaccgtggcggtcaggcgctccgccagaccctccacgtcgtcgcccagcacgctgaccagcttctccacgccctcctcattgaactgcttcaatccatcggagagctgcatggcgccgtcccgcagctgcttcacgccgtccagcagggcgggcatattgctctggagccgctgagcaccggcggcagcctgatccacaccggcggtgtagctattcaggcccatgtagaacacgttgtactgatccagctgctgcttcaggctgcggatctgcacggcaccggcggaggcttgctccgtagcggccatgatcttctgctgcacctcgtcggaggccatggtctcctcgatcttcagctgtacctgctgctccgtggcggcgtcgatcttctgctggacctcctccgtccccataagggccgtcacattctcggagatggtctgctgcatagccggagtctgcatctgcagctccacggcggcatccacttgcgccttcagctcaggactctgctgatactgctccatggtatagcccatggcgttgagtacctgccccaacacctgctggcgcacctgctccgtcacctgagccgctacctgctgctgcacggcctcggtcacagcggcacggatctgatcccgtgcggcctccacggcggcagtcacctgctcacgggcggcctgctcggccagcgtaccggcctcgtccagctgggccagcacgccgcccagcacggtggcgtagttgtcaatggtcagggaggggatggtgatgcccgcctgcgccagctggggctgcagctgctcatcggccatagccagcagggaggtaaagacctgcttggccccggcgttcagggcgctgctgttggagctgagctggttcaggccgtccgtcagctgatccacgccgtcagacagctgtccgcagctgtccagcagcgtgcagagtccgtcatacagctgggaggaaccgtccatcagctggtccatggcatccgtgagcttgcccagagaatcggacaggctccccagatcgccggaggtaaggtcgtcggtatccacctcattgaggaggctgttggagacgacggtgagggtggtttccagcgtgaagtccgtcacatcggcgctgatctccacatagtcgggcaggtccagctgctccttgctgatgcccagatcctcctgcaggccggggaaggccatgcccatgacggcgatgcgatcgccgtcgttgatgagcttaccgttggagacggtgacattggagaagtgggaggtatccagcagggcgccggtaagggccacgaaggggacatacaccttctggctgacgccgttgacggtacgcacctcatactggttgttttcatactcgaagcggatggtcaccttgccgctcttgcccgccagctcgctgggggtgacggtcttgccgtccagggtgtagtggatgctcatgctcaccggcagctccttctggatggtgccggtccagcagtcgtccttcacctgctgggcgtcgttcaggctctcgatggccttctgggcctcggcgggcagagcgttcttgatccagtcgctgaccagaattttccgcgtgctgccgtcggcagcggtcatgacgtacaccgtctcatccttgacggcctccgtgtcagaggcggaggcggccgtcgccacggcggacggggcctcggtatcattggcgtccttgcccacggcgtaggtggtgacgccggcggcgcctacggccaccgccacggctaagatcacagccagaaatttattctttttcattttacaacctcctgtttaccaatgagatgggtcataccacgggtggtgcggcacacgatgccgtcgcacaggatcagcagagccggcagcaccagcagcaccagcagcacgctgatgatagcgccacgggccatcagcatacacatggagcccacgatatcgatgttggaatacagcgccacgccgaaggtggcggcgaacaggcccatgccgctgacgatgatggagggggccgaggtccgcagggcggtcatgacggccttcttcttgtcctcgccattgagccgctccgccttgtagcgggtggtcatcaggatggcgtagtccaccgtagcgcccagctggatggtactgatacagatgggggcgatgaaaggcagcgactgacccagcacatggggcaggcccagattgatgaagatagccagctcaataacggcgatcaggacgaagggcagggagaagcttccctctaccagcgtgatgatgataaagatggcggcgatggagatggcgttgactaccttgaagtcgtgatccgtcgtctcgatcatgtccttcatacagggggcctcaccgatgagcattccgccctcgtcatacttcttcaggatggcgttaagggaatcgatctgcgcatcgacatcatcggaggccaccttgtactcggagttgatgagcagcagctcccactggtcgctctccagcatggagcgcacggaatccggcagcacctccatggggatcatggggcctaccacgctctccatgcccaacacatacttcacgcccggcacctgctccatctcgtcgatcatggaccggacgtcgctgtccggcagatcggcgttcaccagcagcatatgggtggaggcgatgtcaaactcctcggagagcttcttgttggcgatgacgtactccatgtcctccggcaggcactggcccatgtcgtagtacacctcatcgttggtcttatcatagctgatgtaggccggggcaacaagcagggcgaagatcaccagaaacacggggaaaatcttgcacacgcccttggcaaagcctcccatatcggggatcagggacttatgccgtgtccgctgcagaggcttatcaagcaccaggatcagggacggcaggatggtcacgcagcccagcacgcccagcagcacacccttagccatgacgatgcccaagtcacggcccagcgtgaaggacatgaagcacagggcgatgaagccggcgatggtggtggcagagctgccgatgacggaggtaaaggtgttgtggatggccaccgccatggcctccttgtggtcgctttgcagggtcagctgctcgttgtagctgtgccaaaggaagatggagtagtccatggtcacggccagctgcagcaccgcagacagggccttggtgatgtaggagatctctcccaggaagaagttgctgccaaggttatacacgatggccatgccaatgctggccagaaacacgaatggaaccagccagccgtccagcagcagcatcatggcggcgcaggcacaggccacggccagcgccacatagataggctcctcctgctcgcacaggtccttcaggtccgtcaccagtgccgacatacccgacacgaagcactgcttgccggcgatggagcggatctcacggatggcgtccatggtcacgtcctccgaggtggcggagtcgaagaacaccgccagcatggtggcgtcgtcggtattgaactcgttatacagcttatccggcagcagctccatggggatggagaggtccgccacggaatcgtaccacagcacgctctccacgtggtccacctgctggatcttctccttcagctgggccacctcctgcaccggcatatcctgcaccacgatgaaggagaaggctcccttgccgaagtcctccttcaacgtctcctgcccgatgacggtatccatgtcgctgggcagataatccagcatatcgtagttgatccgggtacccagcatcccaaacaccgccggcaccagcaggatcaatgcgatcatcaggatcagaacacggttttttaccaccgctttagacaatcccattgcatctcggtcctttctcacttgatctcaaattcgtctgtctcgatgacgtccggctgctggtggcggatgatcttcactgtcagcagagccaccagcagattcatcacgccgtccagaaacagcgacgcacccaggagcatggtcagcgcctgcgccccctcgccgggccgcagcaccagcagcacgcccagcacaccggcgcacgccgccgccagcaggatggcccaccaacggtcgatgccaaagcgcttggcgtccacggcgatctgcaccttgaacagcccgtccgacagcaccagaatgccgtacaccacgcacagaaagccgatggtctcgccgggatgggtcagtgttacgatgcccaaggccatcagcagcacgccgaaggccagatcgtactggaaggccagccggaacaggtcacgggacagataccccgccaccttcacggcgccaaacacgatcatcccgatgcccagcagctctccgatgacggccaccgacacgccgggccatacaaacagcaccacgcccagcacgcacagcagcaccgacatgatgatgtatcctgttttggccgctcgcataggggtcacagaacgcatgatacgcatctccctcacttttgatggtctgagtttaccgctttcggcggcgggagaaaatggacaaaaaaatgccgggtgtctgaaagtcagacacccggacgcaaattgcccagtttttaggcagtcagggggcatttgcctaaattttcaatggtcctcccggctgcgctcgatgataagctccggcaggccgtggcacaggcggctgatacgccgcagctcctccagcgcctcatcctgcatcccgccgctgatccagtcgatgcacattccgaagagttggcacttgatgaaccggatcaccgcccggcggtccgcctccggcagttggtgctgggggaaggcggtatcgatgtaggtggtgacagcgtagtcgcacaggcgcatggtgctctcctcgaagaggtcacggttcacggagtggtagatgtgcatcacggcgctgcggttgtgcagagcgtagcggaaggccatctcgcagcactcgtccagcgtggagatggtggggtactcctcaatgagttggtcggtgtaggaggtgatgatctcagcgataagggaggggatatcctgaaaatggtagtaaaaggagttgcggttgatgccgcacttctccacaatgtcccggacgctgatcttgttcaggggcttttcgttgagcagctgcaaaaacgccgtttcaatggcctgcttggtaaaatttgccatacacacctccgtctcttctgcacacgctctctcggaaaactgattatagcagatttttccccggctgacaaccctcccaaagcgctcaaaatggggcatactatccctaccgtcatgaccgacggcagccaagaacaggaggtccatgccatgcgaaagaaaaagccctttcacgacccggcgccggatatccacgactttcccggcgttccggagagtaccttcgatctggtgaaccagtacggcacctacaacatccagcccacctcccacacggagaacctgtttcctctcatcgggccggagctgccggagcgctggcgcaccatgcgtctgggaaaggacgatctggaggacttgtagcggaagtctgcggggcagacgcatcaggggcgggcgcatttgcgcccgctcctgatgcgcttttctcttgcaggctgtgtcgaaatatggtaggatggatgtataccatatggtatagtgacccccaaatacatgattcggaggaaagagaagcgatgaagcagatgaaacgggccgcaggtctgctgctggcgctggtactggtgctgagcatggccgcctgcggtaagaaggacggagacggcggcgacagccaatccggcttccagcgtggcacgattgaaaacggcatttacaccaacaccttcgtgggcatcggctgccagctgagcgatgactggacctactacaccgacgagcagctggcagagctgtccggcgtggtggccgagagcagcgaggagatgcagaaggccatggaggatggcaagagcacctatgatatgttcgccagcgccatggagggccttgtgaccataaacgtggtgtatgaggatctgggcgctctgtacggcaagctgctggacgaggcgggctatctggagatcgccgtacccaagctggaagatgctctgacctccatggggctatccaacgtgaaggtggagcagactccggtgcagttcgccggtctggttcgggagggcgctgttatctccggcgagatggacggcgtccccatgtatgagacgctggtgtgcatcaagcaggagggctatatgtgctgcgtgaccatgtgcagctggacggaggatatcaccgccgatctggtggagctgttctatcaggcataagccaagggtaagcaaatcaaaaagggaggccgcagacaatgcctgcggcctcctgttttttggtttattacagctccggggcggcgttggtgcgctgggagcgcagacggtaagtgaccttcttcagcttccggcttctcatggagctgatggccgtggggatagcgcccagcagcgtgaaggcatacagcttcaccagctccccgatgtaggtggaggaatcgatgatctcctggcgcagcatctccgggatcatgcggaagcagtccagcaggctcagctcgtagtagtccttcagttcattatagacggcgatggaccagtccagctgatagcccacataggtcatgcccagcatcagcacgatgctgaccaccagacccacggtggagaaccggccgcccagcagctcataacccttcatggtgcagatggccatgacgataccgctgactgccgccacgtagcccagctggcccagcagcacgatgcacgccacgcccagcagagaacccagcagcgcacccacgacgccggccaccacgttctccttcttgcccagctccgcctgctggttctgctcctgcagatggcccagctgctggtagcagctgtcgcacagcagggaggggacaccggtcatgatgcaggggtccgtctccacggcgctgccgcagttctggcagcagttgtcatagccggaggcgtgcagaaactccaccacggcggctacagcctccgccagcttctccacctgattgggattgccgaagcggacattcagggtcagctccacccggctgcgccggacggagaagcccgtcaccagacgggtcccctttacaaactggcggatggcggactgatccggctcctgccccagcttgtgcagggacagggtcataacggcaaggccctgatcgttgcgccggagcatggtctggtagccgccgacgctgccgaagaggatgctgctctcgccgtccaccgtcaggtgcagacgctgggcggtctggtccagaaaggtcttttctttttgagtcatggggtagttctccttttctttctttcacatggtttacacacaactaggccggaggatcgtcagaaggagacgacctcctccttgggcttttcgcagggggcgatggctgtgacatacagcaccgggccctcgccctgataggcgtcattggcctctttcttcaccgtggcggtgatctccacccactggcggttcttgaacctctccagtccctcgcccttggccaccagagccaaaaactgcatatcgttttcgcagcagaccatggcgaagcggccggggcagtggacgcccttgaacttcttagagtggcacatgacggccttataccgcacggtgacaccgtcgtagcggtcggggttgtccatcatatccacataccagacaccgtagtcgtcgtccggcacatccagatggccgtcggagagatcgaagggggacatctccggagtgacgtactcctcgctggtgccgtcctcgttctccagatagatatcggcccggcggttcaccatccgcaggttgcggctgcggagctgggcccgcagctcctcgttgcagtggttgaagatcagcatatcggcgttgctgatcttctccatcatcagctggcccatattctttacatacatctcgaagcttctggcgtccaccagacacatgatctggtagaggatccagttggcaggcaggccatctcggtacagaggctcgatcatccacataccgttatactcgatgatgacctgcttgggtcggtactgcttctccagcttcttgaacagctccggagtcagctgactctgctcgtccaccgtgtaggtaaacacattgcccagcacacgggggtcgtactccagctccccctcctcgcagcagatcagcagggtgcggtcctcctcggcaaagccgtcccggaggataccgttgatgaagccggtttttccggaatccagaaagccggcgatgagatagacaggaatatccatagttcctcgctccttacaggtgttacaggctgaacagctctttgagcttgtcctccttcagctgggcgccgatgacgcacaggcggccggtgtagtcggcgctgccgtagcggacgtcctgctcctcagggacatagtcgaagtgcagccacttgccgccgctgggaacgatgcccttggcccggaggatggcaccgtagtcgccggtatccagcgccgtcaggatgcggcggatgtcctcctccgtgtaggagtggaccgtctcggcgccccagctggtgaacacctcgtcggcgtggtggtgatggtggtggcaggagcactccgggtcatcgcactcgccgtcgtggtgatggtgatgctcatgctcgtcgtggtcatgatggtggtcatgttcctcgtggtcatggtggcagcagccctcgtgatggtgatgctcatgttcgtcgtcatcatcgtcgtgatgatggccgcagcagcagtggccctcgtcctcgtcgtggtcatgatgatggtgatgctcgtcatggtcgtcatgctcatcatggtcgtggtggtgatggtggtgctccgcctcctccgcctcgtgctcggcctgcatcctggccagcagctcgtcggccagagagaccttttccacagcggacagcagagtcttgccgtccagctggtcccacggggtagtgaggatggcggcggtgggattcttctcccgcagcagagccacagcggcctccagcttttcctgagacagcttctgggtccgggagaggatgatggtgccggcggactcgatctgattgttgtagaactcaccgaagttcttcatatacaccttcaccttggtggcgtcggccacggtgacgaaggagttcagcttcatgtccggctcgtcccggacggtgttctccaccgccacgataacgtcggagagcttacctacgccggagggctcgatgaggatgcgatccggagcgaactgctcatggacctggcgcagagccttgttgaagtcgcccaccagagagcagcagatgcagccggaggacatctcgctgatctgcacgccggaatccttcaggaaaccgccgtcgatgctgatctcgccaaactcgttttcaatgagcaccagcttctcaccctgataggcctcgctgagcatcttcttgatgagcgtggtcttaccggcgcccagaaagcccgatacaatgtcgatttttgtcataaaacaacccttcttttctcctccgccatggcagaggacaatttttctcttatatcataccctatttttccaaaaatgcaagagggggagacgaccctccgccgccggggaggaaaacttttcttgacaggatactcatacggcgttatactgtactcactataaacgaaaggaggcgtacaccatgacgaagagcaagctgaccagtaaggggatcatcgtgtgcgccgccggatcggcccgataaaggggccgatgtgaccgtaccctgtgtgcgtccccgtccgggggcgcattttttgtacgctgccggacgccggcggcgtttggacaggcggtctgcgggccgccgggagagagaaggaggcttatggaagagaagcaatcgacattcaagctgtcggggcgggagaaggccgggctcatctggcactatctgcgcccctgctgggggcattttgcggcggcgctgctgtgtgcatgcctgtccatggcgctcaacgccctgacgccccagatcatccgtatcacggtggactccattctgggatccgaggaggccaagctgccggcgctggtgctgcgggtactgccgctggagacgctgcggcaggagcctgtcacggcgctgtggtgggcggcgggagccgtcatggtgacggcactgctgcggggcctgtgcagcttcgggcagcgggcccagctgtcccgtgggtccgaggcctacgtcaaggggctgcgggatgacctgtaccggcgcatccagtatctgccctttgcgtggcacaagcagcatcccaccggcgacatcatccagcgctgcacctccgatgtggacgtgatccgcaccttcgtgtgcaaccagctggtggaggtggtgcggacggtgttcctcatcatcctgtatctgtggatcatgttccgcatgaacgtgaagctgtccctgatcgctctggccttcatccccattgtgggcctgtcgtcgggggtgttctaccggaagatctcctcccggttcaagaccgccgacgaggccgagggcgaggtgaccgcctgcgcccaggagaacctcaccgccgtgcgggtggtgcgggcctttggccgggagaagtatgaggaggacaaatttcaggccaagagcgagcgatatgccgggctgtggatccatctgggaaagctcctgtcggtatactgggcatcggggacgctgctaacgtgcttgcaggtgatggtcatcattctggcgggcatccatgagagcgtggccggggccatgactctgggtgccttcgtggccttcgtcagctacaacgagtctctggcgtggcctgtgcgttctctgggccgggtgctgtcggatatgagcaaggcgggggtgtccatggaccgtgtgggctacatcctccgctccccggaggagcaggatcagcccgatgacgttcccttccccggcggggacaccgtatttgaccatgtgaccttcggctacgaggggcagcctgtgctgaaggatgtgtccttcaccatccgggagggggagaccttcgccgtgctgggcggcaccggctccggcaagagcacgctggtgcatctgctggaccggctgtacgacgtgccggagggttccggccgcatcaccatcggcggtgtggacctgcggcatatccggcgcagcgacctgcggcggcacatcggtcttgttttgcaggagcccttcctgttctcccagaccattggagagaacatccgggcagtgcggcccgatgcgccggaggatgccatgcgccgtgcggcggccatcgcctgcgtggacgaggcggtgacctccttcccggaggggtatgacaccatcgtgggggagcggggcgtgactctctccggcggacagaagcagcgggtggccatcgctcggatgctgatgcagcaggccccggtgatgatcttcgacgactccctgtccgccgtggacgccgagacggacgagaagatccgcaccgccctgcgccggtccaccggcaatgccacggtgctgctgatctcccaccgggtcaccaccctcatgcaggccgaccgcattctggtgctggacggcggccgggtggcggagctggggactcacgcccaactggtggaaaagcccggcatctaccgggatatctacaacattcagatgcagagcgccgaccgggcgctgttggaggaaggggggagcgagcatggcggccattgatgaaaaggaatatactcaatccttcgactggaggatctggaagcggctggggccgttcctgcggccctatcggggcgccttcatctccatgctggtgttcaacggcatctgcgctctggtggacgtggtgctgcccctgttccagaagtacgccatccagaattttatcgaaaagaacaccctgacggggctgctgccctatgcactggcgtatctggcggtggtggtggtgcaggcactgtcggtggtggcctttgcccgaaactccatgcacatcgagatgaatctgggcaaggatatgcgtggggcattgtttcaccacctgcaaaccctgtccttctccttttataacgtgaccccggtgggctatctgctgacccgtgtcatgagcgacaccaaccgcatctccagtatgctggcgtggaactttacggatatcctgtgggcaatgttctatgtgctgggtacctttgccgccatgctggcgttgaactggaagctggcgctggcagttatcgccattgtgccggtgatggccattctgacagggtattttcagaaccgcatcctccactggaaccggaaggtgcgtaagctgaactcccgcatcaccggcgccttcaacgagggcatcaccggcgcacgcaccaccaagacgctggtgacggaggagcagaccgccgacgccttccgcagtctcacccgacagatgcacgactccggcatccgggcagcccggcttaatgcggtgtttatcccgctggtgctgttcttcggcaccatggcggtgtctatcgtgctgctgcggggcggctatatggtgctgaatcaggcgctggagctggccactctgtcggcctttaccacctatgccgtcagcatcttcgaccccatccagatgaccgccgccaatctggcggagttcatctctctgcaagcctccatcgagcgggtaaccgacctgatggacgaacagccgcaaattcaggacaccccggaggtcattgagaaatacggcgacgccttccaccccaagcgggagaactgggagccgctgcggggcgagatcgagttccgggatgtgaccttccgctatcccgacggcggcgagaacgtgctggagcacttctccctccacatccctcaggggaccacggtggccatcgtaggcgaaacgggggccggcaagagtaccctcatcaatctggcctgccggttcttcgagcctacggagggacatatcctcattgacggcgtggactaccgccagcgcagccagctgtggctccactccaacatcggctatgtgctgcagaatccccacctgttctccggcagcgtccgggagaacatccgctacggcaagctggacgccaccgacgaggaggtggaggccgccgcacgggccgtgtcggcggatacggtggtgtccaagctggaaaatggctgggacagcgatgtgggtgagggcggcgaccgtctctccaccggcgagaagcagctgatttcctttgcccgtgccgtgctggccgaccctcgcatcttcgtgctggatgaggccacctcctccatcgacacccagacggagcagctgatccagaacgccattgaccatctgctgacgaaccgcacctcctttctggtggcccaccggctctccaccatccgcaaggcggacgtgatccttgtggtgaaggacggccacatcgtggagcagggtaagcatgaggagctgctgcggcgcaaggggtactaccacgacctgtacagcaagcagtttgcccaggagaacgccgcccgcatcttgggcgagggcagcgcccaataaagcacatatcagagcaaacagccccattcccggcgctgctgaactgcaccccacttgttagatatctaacaagtggggtgcagttcactgatggcttccgggatctttgccggagggcctccctatctgttcataaaattttcatattattcctgttgccattttgtaactttttttatataataccttatggtgacataatacggcgcagcccgacagggttcgtcgtttcaaatgcagcgggccgggtctccggcaacgagggatatgatatgattcgattgaaggacgttgaaaaaacatacgaaaacgggacggaggcccttcagggcatctcctttaccattgaggacggggaatttgtgtttctggtgggaccctccggctccggcaagtccaccatcatcaagctcctgaccggcgaggtcatccccacggcagggcgggtcatggtcaacggcttctccatgagccgcatctccgaccggcagatcccctatatgcgccgcaccatcggcgtgatctttcaggacttccggctgatccccaaaaagacggtgttcgacaacctgagccttgccatgcgggcggtgggggccacgccccgtgacatccgcacccgcatcccctatgtactggagctggtggggttgaaggggatggaggaccgatatcctgacgagctgtccggcggtgagcagcagcgtgtggccattgcacgggcgctggtgaacaatcccagcaccatcgtggccgacgagcccaccggcaatctggatcccaaccgctcgctggagatcatgaccctgctggagcgcatcaacgcccttggcaccaccgtggtggtggtgacccacgagcgggatctggtgaaccacttcgacaagcgggtcatcatgatcgatcacgggcaggtcaacggcgacggcgtgggaacgtatgaggtataacagatgaagcacgattttcgatattttttccgggagggcatccgcaatatgttctcccacggattcatgtccttcgccgccatcggcgtgacggtggcgtgtctggtgatcatggggaccttttcgctggtggcctataacgccaacgagaacctgaaggatctgcagaaggagaacgccgtgctggccttcgtggatgagaacctctctgacaacgaggccaaggccctgcaatccacgctggagaagattcccggtgcggcggactgcaccttcgtctcccggcaggaggcacgggacagctacgtggagcagtacgatgaggacgacctgtacagcaacctggatccctccatttttcgccatcggtacgttatccatctgacggacgccgcacagatgcagcaggtggtatccgatctggaggccacccccggcatcgtaaaggtccgggcggacgaggccatctccaacgggtttttgacggtgcggaatgtggcaagcctcatcagcatcgccctcattgcggtgctgctggtgatctcggtattcattatctccaacaccatcaagctcaccacctttgaccggcgggatgagatcgccatcatgaagatggtgggcgccaccgacggcttcatccgatggcccttcgtctatgagggtctgctcatcggtctgatgggcgccgtcatcgcctttgggctgcagtggctgctgtatgaggccatttccaagggcattgccgggtctgataccctgcagctgctgcgggtggtgtccttccggaaaatttgggggccggtggccggtgtgttcggtctggtagggatcctggtgggcgtgggcggcagcctgaccgccatccggaagttcctgagagtataaggaggagtgcagcatgagtaagaaaaaatggtgcggcctgctggccgttctcatggcggtgagcatcgtgttcaccagcggcgctctgcgcccggtgaacgtctatgccgagaccatcgcagacctgcaggagcagtcggaggagcaccagaagaagctggaggagatcaaccagcagatcgaggaggccgaggccaacaaggccgatgcgctggagcagaagaacctgctggatcagcaggcggacgtcctccgcagccagatctccaacgcccagcagcagatcgatgcgctggaggcggagctggcggacaaccagcagaaggaggagtcccagtacgacctgttctgccgtcaggtgcgggatgaagaggagcggggtaccgcctccttctggtcggtgatcttcaaggccaccagcttcagcgatcttttgggccgcatcgacttcatcaacgaggtggccgagcacgaccagagcgtcatcaacgacctgcggcagctgcgccagcagatgcaggccgaccggcaggcgctggaggagcagcgctcccagctggagagccgccagacggagctggacagccagctggaggcagccacccagctcattgccaagtacaacgaaacgacggacggcctgaacgatctggccgctcaggagaaggcagccgccgatgagctggacgctcagatccaggcccggagggaggaggaaaaccggaacaacggcggcgataacagtggaggcagcggcggtggcggcagcagcggctccgatgagacgccctcctccgacgggtacatctggccctcggactgccggctcattacctccggctacggcgggcgtgaccagcccacccccggcgccagcaccaaccacatgggcgtggacatcggcgcctcctacggcagctacatctatgccgtgaagtccggcaccgtagtgggttctaagtacagctggggcggctacggcaactatgtggagatcgaccacggaaacggcaacttcaccctgtacgcccatatgagcgagcgtctggtggaggtgggcgagtatgtggagcagggcgaggtcatcggcctgtgcggctccacgggcatctctaccggcccccacgtccactatgagatctgggagaactacagccgcatcaatccgctgaaccgtctgccggggtacatcccctattggtggtaagcggccttttccccacctgcaccgcttggtgcaggtggggaattttttatgccgtctttctcccgccgccgggccatagactggtggaaaggggggctgtgcatggtgggatatgtgcgatgggaggagaagcggaaaaggctcaccctgcggcgctgtccgctgggagacggggaggtgtgcctgttggagggcggcggacggctgaatcggcgggtacagcgccgggtgcggcaggcggcgcaggccatggccgacgccggggtgcggtatgcggcggcaccgccggagtgggcggcgctgctgcttccccttcggctcccggccccggtggcactgcggcgggccatgctggggcagctggtggactgcgcctgtaggcagctgggactctgccggtcacaggccagtgtggtgctgcgggcctcccggcccgacggggccgttacggaggcggcggatctgctggcccggcgggtaaggtatctgtcgccgcagctgggccgggggcaggaggagctgcggcgatccctgcggcaccggtacgggctgggagagggcggtccggcggcgcagctggcggtatgcttcggcggggcggcggagggactgccctccctgctgatcgaagaaagccgtcaggaggtacggtatgtatgggccgagccgtggcgggaaaaaatgaagccgtgggcagcggaggagccgctgctggcggcgctgctggcggagggaagccttccgccgggtgcggctgtcccggtgtgggtaggacttgacaccggcggggaaagaacttataatgcagagtgatatagtgtctgtactatttttgttatagtgtttatactaatctcgtgcggccatgccgtatttgtcaacagaaaggaatggattccatggtaaaagaattcaaaatgagtcaggagcggtacgacgagctgaaaaaggagctggattacagcaagaccacccgtgccgacgagatcgcagagctcatcaaggaggccagaggcttcggtgacctgtcggaaaacagcgagtacgacgaggccaaaaatgagcagggcaagctctactcccgcattgccgagctggagaacatcctgctccacgccgtcatcgtggacgagacggacatggattccgacaaggtatccatcggctgccgtgtcaccgtgaccaatctggataacggcaagacgctgccggagtacaccatcgtgggctctcaggaggccaacgtcatggagcggaaggtgtcggaggattcccccttcggcaaggccctgatgggcagcaaggccggcagtgagatcaccgtggaggcccccaagggcgtcatccgctaccgggtggacaagatcgaacgataaggagaccatatctatggcacagcagaatcagaatcaacaggacctgcgggaaattctccagatccgccgggataagctggcagccctgcaggaggcgggtatgaaccccttcgagatcacccgctatgacgtgacccatcacgcacaggaggtcaaggaccagttcggccagctggagggacagaccgtcgctctggcgggccgccttatgagcaagcggggcatgggcaaggtgtccttctgcgatctgaaggataagtccggccgcatccagatctacgcccggaaggacgagatggacgaggaggcctatgaccgcttcaggaaatatgacatcggtgatatcgtaggcgtcaagggcgacgtgttccgcacccagaagggcgagatgagcatccgggcccatgagatcaccctgctgtcaaagtccctccagcccctgccggagaagttccacggtctgacggacaaggagctgcgctaccgccagcggtatgtggatctcattatgaatcccgaatcccagcggaactttgagatccgcagcaagttcgtggcgtatctgcgccggtatctggacaatatgggcttcatggaggtggagacccccgtgctcagccccattgccggcggcgccaacgcccggcccttcatcacccaccacaacgctcaggacatcgatatgtatatgcggatcgccacggagctgcacctgaagcggctcattgtgggcggtctggagcgggtatacgaggtgggccgcatcttccgcaacgagggcatggacaccaagcacaacccggagttcaccacctgtgaactgtatcaggcctacaccaatctggacggcatgatggacattctggagggcatcctcaccggagccgccaaggagatcctgggtacctaccatatccagtggctgggtcacgacgtggatctgacccccagctggaagcgcatcaccatggccgatgccgtgcagaatgtcaccggcgccgacttcatggccattgagggcgatgatgacgccgccgtggagctggccaagagcgtaggcgtggacatggagggcgtggcccggaagtggggcaacgccctgtacgagaccttcgaccagaaggtggaggagacgctcattcagcccaccttcatcaccatgtacccggtggaggtgagtccgctggccaagcgcagcccggaggacccccatctgacggagcggtatgagatgttcgtctgcggctgcgagatgggcaatgccttctccgaactcaacgaccccatcgatcagtaccagcgcttcaaggctcaggcggagaagcgggccaatggcgacgaggaggccgacatgatggacgaggacttcgtgctggcgctggagtacggtatgccccccaccggcggtctgggcttcggcatcgaccgctgcgccatgatgctctgcggcaccgactctatccgggacgtgatcctgttcccgacaatgaagccgttggacgctgacaagaagggttccaaggaagtttcggctcctgcggaggctgctcagactgctcccgttgtggaggaaaaaattgatttttccaatgttcagatcgagcctttgttccaggatcaggtggattttgacaccttctccaagagcgatttccgggctgtgaaggtcaaggaatgcgaagccgtgaagaagtccaaaaagctcttaaagttcgttttggacgacggaaccggcgtagatcgggtcattttgagcggaattcacgagtattatgagccggaagaactggttggaaagacctgcattgcaatcaccaatctgcctccgagagcgatgatgggtatcgactcctgcggtatgttgatctcagccgtgcatcacgaaaacggcgaggaaaagctccatttgctgatggttgatccccacatccccgccggcgcaaagctgtattgattggcccctgatcgggctaaaaaagcctctcgtacaccaatccgtacaccaatttacaccaagggtgcaccacggatgccgagaaaaatgtgcgttggtcatatttttgaactgctttcattgtacgaccatggagattcaatgagctgctttgaaaagcttgaacaattccagcttgtcgaagagaaaaatcgggatcgtgcggaggaaattatgaacgaagaatgcttgatctgcaaagccccacttacctatctcgaagccgatattctgatggaatgtgagatttgccataagaaagaaaacagcaagacgcgctgcgtgaacggacactatgtatgcaacgaatgccataccaaagggcttgatcgcataattgcgttgtgcatgacaagcgcatcgagagatcctatcgccatcattgaacagatgatggcgctgcccacctgtcatatgcacggtccggagcatcacgtgatggtcggagcggcgctgctgacagcgtaccacaacgcaggcggagacattgatcttcgcagcgcattgacggagatgatgaatcgaggacggagcgttcccggcggcgcttgcggcttttggggtgcttgcggtgcgggaatcagcacggggatgtttgtgtccatcatttcgcagtctacgccgctaaccaatgagccgtttgcactgtcccacaaaatgacggcaaaatcgcttcaagcgatcagtgagatcggaggtccacgctgctgcaagcgggattccttcctctccatccttgctgccattgactttgtaagggagcatttcggcgttgagatggaaaagccggaggtcgtatgccattactccgcgcaaaacaaccagtgcatcggaaagcgctgcccgttttccaaggtgaatcattgagaaacagcaaaacagttagttaggagatgatcgtatgagaatcctatctgaattatcttggttgtgggaaacgctgggcattgcgcttgcggctgcggctgtctgcatagcttgcgccgcactgatctgcaaggcagcgaagcagaaactcagcaaaaaggtgttggcagccataggagcagcggcatttgtgggtgcgattctggcggtcattctgatcgcccggacgccgatgccgctttgacaggacagaatgtgcagagcgatgagatcaactcagtatggcggcgctatgatgaccgagaaagaaaagatgcagaagcagatgctctacgatatggactatacgccgagaacactggatgagatgataggtgtgcttttccgcaagtaaacagagaaggccggagcatacgctccggcctaccttcagcgtggcgaaaaagtcttttcgccacgctgcggcatttttcagagcttcaaaaagctctgaaaaatggggatcatcctcgtgcaggacacccttcccgggtttcccgcacacacccttccgccccgttgacgaaagtgtcccgctcttttggcaggttcagggagggccggagcgtatgctccggccctccctgattttcggttatttttccacaggcagcgttccctgtcggatcactccaccacggggagactcttcaccacggcggcgcagcgggggcagaggtcctcgtgaccggccacggtacccacgctggtgagcatcttccagcagcgctggcacttggttccggcggcaggacgaacggtaacggacaggctgtcgccagtctccacacggacctgagacacgatcagcaggtccgccagagcaccctcctccatctggctcaggaaggcatcctcggcggggacagtgaggtccacctcggcctccagactcttgccgatggtcttgtcggcacgggcctgctccagtgcgccgttgacggcggtacggacggcggcgatgcggtcccagcgggccatctcctccggggagagggcgtactgggtgtagggctgcaccatctcgttgaggagcacattgcgctcatcgtcgccggtgcggtggggcatggccagccagatctcgtcgcaggtgaaggccagaatgggggcgaacattcgggtcatggcatccagaatcaggtacagggccgtctgggcgctgcggcggctgaggctctcggccccgtcgcagtacaggcgatccttgatgatgtcaaagtagaaggagctgagctccaccacgcagaagtcgttgacggcgtgggacaccacatggaactcgtagttgtcgtaggcggtgaacaccttggcgatgagggcgttgaggcaggtcaaggcccacttgtccagctccagcatatccgccggggccaccagcgtgttggggtcaaagtccgtcaggttatccaggcagaacttggcggtgttgcggaacttcagatagttctgggacagctgcttaaagatctcgtcggagcagcggacatccacatggtagtcggaggagccggcccacaggcgcagcagatcggcgccgtacttgttgaacacctctgccgggtccacgccgttgccgagggacttgtgcatggcacggccctgaccgtccacggtccagccatgggtgacgcactccttgaagggagcgccacggcccagagcgcccacggcggtcagcagggaggactggaaccaaccacggtactggtcaaggccctccagatacatggtggcgggccagaagccctgcgtgcgctccatggaggcgaagtgggtggagccggagtcgaaccagccgtccagcgtgtcgctctcctgctcaaagccggcggacttgccgcagtgggggcaggtgaagccctccggcaaaatctcctccgccgtcatctcgaaccatgcgttggagcccttctcctcgaacaggcgggagacggcgtcgatggtctccggcgtgcagatgggcttgccgcagtccttgcagtagaacacgggaatgggcagaccccagcggcgctggcggctgatgcaccagtcggtgcgctccaggatcatggagcgcatccggtccttgccccaagcaggcacccagcgcacgtcctcacaggcggcgcaggcctcgtccttgaaggactccacggagcagaaccactggggagtagcccggaagatgatgggcttcttgcaacgccagcagtggggatagctgtggacgatctcctcgcaggcaaagagagcgccgctctccttcatatccgccagaatgacggggttagactcctcggtcttcatcccggcgtacttgccggcatagtcggtgtggcggccctgatcgtccaccggcaccaccatatccataccgtagcgcaggcaggtctgatagtcgtcggcaccgaagccgggggcggtgtggacgcagccggtaccggagtccatggtgacgtaatccgccagcaccagacggctggtcttaggcaggaaggggtggctggccagcatattctcgaagaaggcgccggggtgggtctccacgatctcgtagtgttccacgccgccgatcttcatgaccttttccaccagcggccgggccatgatatacatctcgccgccgtcggcacggaccacggcgtactcctcctgcgggtgcagggcgatggccaggttgccgggcagggtccagatggtggtggtccagatgacgaagttcagcttgctcttatccagatgggagagcttgcccagatcgtcgtacatggggaacttcacatacaccgtggtgcaggggtcgtcctgatactcgatctccgcctcggccagcgccgtctcgtcgtgggggcaccagtacacgggcttgaggcccttgtagatgtagcccttctcatacatcttgccgaacacacggacctcctgcgcctcgaaggcggggtccatggtcttataggggtgatcccaatcgcccaccacgcccatgcgcttgaagccctgccgctggacgtcgatatagtggtcggcaaactcatggcaggcggagcggaactccgccacgctcatggccttgcgattgagcttgttctgcttgatgatggcgctctcgatgggcataccgtggttgtcccagccggggatatagggggtgtagtagccccgcatggcgtagctgcgggtaatgaagtccttgatggacttgttcagggcgtgacccatgtgcagggcgccgttggagaagggagggccgtcgtgcagggcgaagcggggcttgccctcgttcttcttcagcagctcgtgatacaggtccagctcctcccagtgcttgagcatctccggctcccgcttgggcaggcccgcccgcatgggaaagccgctcttggtcatgttcagcgtctttttgtactccatgtgttacctccgtgtatgaaaatatatttgaaaacaaaaaaatggcccttgtctccgtaagagacaaaggccactaagaaacctctgcggtaccactcttgttgccgcaccgggtgcggccgctctgccccacgagccgtgggggaagggaagataacggccctctgccgtccgggcttactgccggttcagccggatgctccggggtgatcttcgccgctgtcctccgtgtccgccttgcaccatacggcggctctcttggcatcggagggacgggctactgtccccatccttgcagatatgcatattctccctttactatacccacttttgcggggtttgtcaacgggaaaagtttacttattcatggccaccagcgccatggcgcccatgcccacatacaccacgcagaacaggatcagcagggcggagatcacggtatccatggtgccgcccaccttgcgcttgccgggatagcgcttgcggacgtagtacatgaggccgcacacggcccccaccagcaccatcatccatgcaccggccaccacgttatccttccacacggtgctgcgcagcaccagcgccgccaccagcaccacgaataccacgccaatgagcaccttcatggtggtggacatcttctccggctcctgccgggcggaggtgctgcggaccatggagccggtatccttctggtagttggagccgttcttcttgtgatggacgttcttgttggggttgccgatggccttgcgcttatcccgctccatacgggcgtagctgttggtcatatcatagggttctttcttcgccatgttcattctccttcgatcggtaaatgttccagctctctgcggagcaggtcaaaggcgcagtgggacgccagcatccgcacccggtcccggccgctgccgcagttcatgtgccgcaccaccgtgcgctccggggtactcagggccacgaacaccgtgccgacagggtttccccggtcatcgccgtctgggccggccagtcccgtggtggccacggacaggtcgctgccggtgatacgccgcacaccctccgccatggctcttgccaccggctcggacacggcgccatagcggtccagcgtctcctgcggtacgcccagcacagaggccttcacctcattggtataggataccacacctccccggaacacgcaagaggcacccggcagatcggtgatgcgttttgcgatgaggccgccggtgcagctctccgccgccgagaaggtcttgccgtgctggtgcagcaggtgcagcaccgtctcctccaatccggagacgtcgatgccgtagaggtaggcacccagccgtccacgcacctgctccagcagcggtgccatgcgctcctcgcaggcggcggggctgtcgcccttagcggtgagccgcagcatcacctcgccggtcttggcatagggggccagcgacgggttcaccgcctgatccatcagatcccccagcagctcctgcacctgcggctccgacaggccgaagatccgcaggtcgtgggagaggatggtctcgctgctctggcggcgcagccacggcagcagcgccgtctccgtcaggtagcggcactccgacggtacgccgggcagcagcactgccgtcacgtcgccggcgtggaacacgcagcccggtgcggtgcctacccgattgcagaacacctcacaaccctccggcagctccgcctgatgcagggtgccgggcggcatctcccggtggaagatgatgtcgaagttgcggcggatgtctgccgccgcctccgggtggaaggtcaggggaacatccagcacccggcagaccgtcgccttggtgaggtcgtcataggtggggccaaggccgccggtgaagatcagcaggtccgcccgcttccgggcgatggcgatcgcctcctccagccgttgggggttgtcgcccaccacggtatggtacagcacgtccacacccacggaggccagcgcctgcgacagctcctgtgcatcggtgttggcgatgttgcccagcagcagctcggtacccacggcgatgatctctgcgtgataggtcataggctcacttcctttgatgatttgcctgatgggatttttgtcagcaggttcttttttgtgcctccggcgggtaactttctgccaacagctggaaaagtggaccgtcgggggcaacaagccaaaacggtcagcaaaaaccgccttctctcacttgatcttcacgatgtcccggttctccatggcccgccggaccagacccgccacgtccagcgcctgctccatctcccggacctcctccacatggggcttcgtcttggggtggcggggggtgaacaccgtgcagcagtcctcatagggcagaatggaggtatcgaaggtgccaatatggcgggcgatacggacgatctcctccttatccataccgatgaggggacgcagcaccggcagcgtggcggcgtcctcactgacggccagcgccgccatggtctggctggccacctgccccagacactcgccggtgaccagtgcgccgcagcccagctcgtgggccagagcgtccgccagacgcatcatgaaccggcgcatgatgagggtgaagtgatcctccgggcagctgcggcggatctcctcctggatctccgcaaagggtaccacatggaccgtcaggcggccgcaccacggcaccagctcgcgggccagctgcagcaccttctcccgtgcctgctcgctggtatagggaggagaggcgaagtggatcatctccagctgaacgccgcgcttggccatcatatagctggccaccggggagtcgatgccgccggagagcaggctcaccgcccggccgcccatgccgatgggcaggccgccggcagcgggctcggcgggggcgtggacgtaggcggcatcctcccgcacctccacatacaccgtcaactccggatggtgtacatccaccttcaggtggggataggcctcgtgaagctcgccgcccacccactggctcagctggatagagctcatggggaaggacttgtcggcacgcttgctctccaccttgaagctgcgggccgccgtcagggcctcccccagatacgtcttggcggtggccagaatggcctccttctccttggggcagggaacggcccgtgcaatggcgatgatgccaaacacctgcttgcaggcggcataggccccggacagatcgcaggtctcctccgccggctccacatagatggtactctgcttggagtagatgcggaacttgccgaagcgggcggtacggcggcggatgttgctcataagcttcatctcaaagctgcggcgattcaggcccttcaggaccacctcgcccagcttgcacagaatgatctcattcatgggtacttctccttcatatcttcttggttattatcattggggcgcatcacttcagcatggcgctgctgcggtactggatggcctccgccagatgggtcgggaggatctgctcctcgccctccagatcggcgatggtgcgggccatgcggaggatgcggtcgtggctgcggcctgtcaggcccagccggtcgaaggccccctgcatcagcttctccccggcggcgtccagccggcagtactgcccgatcatggcaggggtcatataggcgttgcaggtgacgccggtaccctcgtagcgccgctgctgcacctgtcgggcggcgttgacccggctgcggacctgctgagaggtttccggctgctccttgcggcgcatggcctcgtactccaccgacggcacctccacgtgcatatcgatgcggtccagcagggggccggagatacggcgcaggtagctttgcacctgaccgtccgtgcaggtgcagcggccggagggatggccgaaccagccgcaccggcaggggttcatggcgcacaccagcatgaaccggctgggcagggtcagggagccggaggcacgggtgatagtcaccacgccgtcctccaggggctggcgcagagtctccagcgccgccttgtcaaactccggcagctcgtccagaaacaggatcccgttgtgggccagagagatctcccccggccggggtaccgtgccgccgccggacagggacaccggggaggcggtatgatgggggctgcggaagggacgatgggtcaccagcgggtggctgggctccgtcagccccgccacggagtagatctccgtggtctggagggactcctgccgggtcatatccggcagaatggagggcagccgccgggccagcatggacttgccggagccgggggagcccaccagcagcacattgtgtcctccggcggcggcgatctccagcgcacgcttcacgttctcctgtcccatgacctcggagaagtccggcatgggcagcgtctcgccggtgggctgccatcgctccgccggcgggatgggcgtctcgccccggaggtgctccagcagctgggcaacattttccaccgggtacacggtgacaccgtcggccagcgtggcctcggcggcgttccgggccggaacatagagcttgcggatgccgcaccgggcggcgcacagggccatgggcagcacccccgccaccgggcgcagggcgccggtgaggctcagctcccccagaaaggcggcgtcctccggcaaaggcggcagctcctccgaggccgtcagcagccccagcaggatgggcagatcgtagaccgtcccctccttccgctggcccgccggggccagattcaccgtgatgcggctgacggggaaccgggcgccgcaggtcttgaccgccgcccggacccgctcacgggattcccgcacggcggcatccggcagacccaccacatcgaaggccggaagtcctcccgacaggaagcactccaccgttacctcatatccgctgatgcccgacagccccaacgagcgcaccgacaccaccattgctccgtcaccctttcccggaagttccgcagttttctctttattttatcacagttttctccggcaggaaaccctttatcgctccccggcggcaagatttccggaaaaatgtctgaaccaccgtgataattttcacgcaccatgaaaaaaaagtgttatttcgaggagttttttcatttttgacatttacatcccggaaagactgtgctacaatcacaatgtatggtatgtttggtctctcttaaaaaacggtaacacgttgacaaaaaaaggaggttcatttatggaaagaaaaatgaaatccatggatggcaacaacgcagcggcgcacgtttcctatgcgttctctgaggttgcggccatctatcccatcaccccgtcgtcccccatggcggacttcgtggaccagtggtccgccaacggcctgaagaacatcttcggcacgaaggtcaaggtggtggagatgcagtctgaagccggtgccgccggtgcagttcacggctctctgggcgcaggtgcgctgaccaccacctacaccgcctctcagggtctgctgctgatgatccccaatatgtacaagatcgcagccgagcagctgcccgccgtgttccacgtctccgcccgtactgtgtccacccaggcgctgaacatcttcggtgaccactccgacgtcatggcctgccgccagaccggctttgccatgctgtgcgagggcaacgtgcaggaggtcatggacctgtctcccgtggcccatctggccgctctggagggcaaggtccccttcatcaacttcttcgacggcttccgcaccagccacgagatccagaagatcgccgtgtgggattacgaggatctgaaggatatgtgcgacatggacgccgtgaaggagttccgtgctcacgccctgaacccggagcatccccatatgcggggcagccacgagaacggagatatcttcttccagcaccgtgaggcctgcaacaagtactatgccgctctgcccgccgtggtggagaagtacatggacaagatcaatgccaagctgggtaccgactaccagctgttcaactactacggcgcacccgacgccgaccgggtcatcgtggccatgggctccatctgcgacgtggcggaggaggtcatcgactacctgaacgcccacggcgagaaggtgggtctggtgaaggtccgtctgttccgtcccttcgccccggaaaagctggtggccgccattcccgccaccgccaagcgtgtggccgttctggaccgcaccaaggagcccggcgctatgggcgagcccctgtatcaggatgtagtcaccgctctggccaacgccggcaagaacgacgtgcaggtcatcggcggccgctacggtctgggcagcaaggatacgcctcccgcctccgtgttcgccgtgtatgaggagctgaagcgtgacgagatgaagcgccagttcaccatcggcatcgtggacgacgtgaccaacctgtccctgccggaggacaagaactgtcccaacaccgccgcccccggcaccatcgagtgcaagttctggggtctgggcggtgacggtaccgtgggcgccaacaagaactccatcaagatcatcggcgaccacaccgacaagtacgtgcaggcctacttccagtatgactccaaaaagaccggcggcgtgaccatcagccatctgcgcttcggtgatcaccccatccgctctccgtactatatcaataaggccgactttgtggcctgccacaacccctcctacatcaccaagggctataagatggtcaacgacgtcaagcccggcggcgtgttcatgatcaactgccagtgggatttcgaggagctgaaccaccacctgaaggccgacgccaagcgctacatcgcccgcaataacatccagctgtataccatcaacgccattgatctggccatcgagatcggtatgggcaagcgcaacaacaccatcctgcagtccgctttcttctctctggccaaggtgctgccggaggaggacgccatccgcttcatgaaggagaaggccaaggcctcctacctgaagaagggtcaggatgtggtggatatgaactacaaggccatcgacctgggcgccaccgcctacaagaagatcgacgtgcccgccgagtgggccgacgccgtggacgagccggatacccgtgagctgaagggtaagccggagctggtgaagatggtcaaggagatcctggagcctgtgggcaagatggacggcgacagcctgcccgtctccgccttcaccgagcacgtggacggtcagttcgagttgggcgcctccgcttacgagaagcgtggcgtggccgtgtccgtccccacctgggacgccaacaagtgcatccagtgcaaccagtgcgcctacgtctgcccccacgccaccatccgtcccttcgctctgaccgccgaggaggccaagaacgccccggaggccgccaagatcgtggacgtgaaggccggcaagggcaagggtacctatcagtttaccatggccatcagtcctctggactgcatgggctgcggcgtctgcatcggcgtctgcccggtgaacgccctgtctatggttcctcaggagggtgagcttgcgcagcaggatgtgttcaactactgcgtggccgaggtggccgagaagaaggatatgcaggacaacaccgtcaagggcagccagttcaagcagcccatgctggagttctccggctcctgcgccggctgcgccgagaccagctatgcccgtctcgtcacccagctgttcggtgaccatatgtatatctccaacgccaccggctgctcctccatctggggcggtcctgcggctacctctccctactgcgccaacaaggaaggccacggccccgcatggtgcaactccctgtttgaggataacgccgagcatggtctgggtatgtacatcggccagaacaagatccgtcaggatctggccgaggagacccgccagctgatcgccgtggagtgggctcgtcccgagctgaaggccgccgctcaggcatggctggacaccatggaggacggcgaggccaatgcagaggctgcccgtgcctatgtcaaggctctggaggacagcatctgcaccgtggatgagctggccgctgtgcctcagttcgctgagcacgccgccgagctgaaggctaagggcgctctgttctgcgactgcgaggcctgcaccatcgccgctgacctgctgagcaagaaggagtatctggccaagaagtccatgtggatcttcggcggcgacggctgggcctacgacatcggctacggcggtctggaccacgtcatcgcctccaagcaggatgtgaacatcttcgtgttcgataccgaggtgtactccaacaccggcggacaggcctccaaggcctccaacatcggtcaggtggcccagttcgccgctgccggtaaggaggtcaagaagaagagccttgccgagatcgccatgcagtacggctacgtgtacgtggctcaggtggctatgggtgctaatcccgctcagaccatcaaggccatcaccgaggccgaggcctatcacggcccgtccctgatcatcggctacagcccctgcgagatgcacagcatcaagggcggcatgatgaactgccagaaggaaatgaagcgtgccgtggactgcggctattggaacctgttccgcttcaatcctgctgctccggcaggccagcgcttctccatggattccaaggcgcccgccggcggctatcaggagttcctgatgaacgaggcccgttacagccgtctgacccgtgagttccccgatcgtgccgaggcgctgtttgcccggaacgaggaggaggccaagaaccgctatgagcatctgctgaagctcattgagatgtacgacaagtaatctcggttcgcagaataaaataaagggagcgctgcggcaatgccgcagcgct

SEQ ID NO: 12348 - DNA, 32546 bp, Unknown
  gut microbiota DNA sequence
cgtacacccggctatagatgcggagacttttgcggttccatcggatcagcatagcgatgacgagagggatgaccgtatttcaatccactcaatccacgcattccatgaggagtgcgacaatttgtccggagtgatgcgattgtcagaagtgaaccgaggttatccggagccaacacgagcgcagatgccgcaaaacggggaaaagcttgttttttcctcttcttgattgaacaaaatttttattttgttcaatctcgcatatcgtctcaaagcctctccttcctgcgggtatcggtggcaccatggtagcggacaagcgtgagcaagtcaagattgaacaaaataattgttattgttcaatccgtgcggttaatgtggtctacggagctggtgcgactaagttgccagttgcttgatgatgacaacgtacaacgaaaccagcgtgtgtgaacagtagtcacacacgctggtttttcttaccgcgaagaagtctgaccggggtacctcttttcagaagtcccctaccctgcaacacgcaagatagcaaaagcaccggccaaacggtcggtgcctttacggtatttcaatgcgaaagggtattgccatgcatgactgaactttgttaatcccctgacaaaaatctgcgaatcagcggaagttgcagggggtaatactgaaccccctgcccttgtgagacatgcacaaaacagcgggaaaaaattgtgcagcctcacgaagattgtgaaatcgtaaactaagattctcaaattctcagagattacaggggtaatactaagtatattataccagataggcgaaaaagtgtcaaccagaatttttttgaaagtgcatttacaaaaaaccgcagtccgcaggaaccacggcggggtcggcttcggagacgagcaccgcaagcggcgaagcctgaggatcgcaccggcgcagccgttccaatgccctgctgcatgaacgccgcaagcggcgcacgcagtcgcagggcgaacggcaccaccggtgcgatcctcacccgcctgcctacgaactgcggcaaaaataaaaaaagattttaccatgggtaaaaacaacgggaaaggctatggggataagaaaggacacggggaaccgcccgcaaggagcatagaggtgcctcaaaatagcagcaaacagggtcggcagcgtctaccgaggtgcggcggactatcctacttgcactgagttgaacaaaacatcatccattttgttcaatcttgtgtgccgaagaaaaggctcccccgctggagccgagatgccgttttgcgtatcatagccgacgaacaaatgtttgtcaagtaagtcatcatgtcgtgtggctcaatcaacccctccctctttagccggaggggttgattgagtctataagaacctattatggattagaaacttgaagcttgcgtgatatctttgatactccggcagcgatagcgatatcgttaaatacttcccaaatacttctaaatcctgtcacgcttctaaaatttcccggagctttgccagtcccttgcgctccaagcgggacacctgtacctgagataccttcaggatacgggcagtttgctcctgtgtcattccccgaaaaaaacgcagaagtatggtgatcctttcccgctccggcaggctgtcgatggcttcccgcagcgctattttttctaccatcccctcctccgggctgtctgtccccaaggtggattccagcgtcaggccgtcgatggtctcctgctggagggattccagcggcccgttggccaactctacggcggcgacctcctccacagtcattcccgtctcctgcgccaattctgacagctgcggttccctccccagtgtatggcgcaatcgttcacgtgtataaaacagggtctggcccttttcccggaggctgcggcccaccttgacggagccgtcatcccggagaaaacggcggatctcaccggcaattttggggacggcgtaggtggaaaactgtgttccatatgtgagatcaaatccctttacagccttgataaaaccaatacatcccagctggtagaggtcgtctgtatccacgccgcagccgctgtatcgcttgacgatgctccagataagccccacattttccgtcaacacctgctgacaggcgtcattgtcgccattctgcgcccgatccaacagcgtcagcagctcgctcatcgcttcgccgggacacgggaggcgatacgcttacgcatggtgacggtggttcccttgccgggggcagactttaccgccagttgattcataaagctctccatgatggtgaagcccataccgctgcgctcctcgccgccggtggtgaacagcggctgccgggcctgctccacgtcctccatgccgcagccccagtcacgaattaccaactccagcgtctgattttccagcagccgcagcttcatgacgatcttccccagctgatttggataggcgtggacgatggcgttagtcactgcctcgctgacggcggttttgatgtctcccagctcgtccagcgtaggatccagctgggcggcaaaggccgctgcggccagacgggcaaagccctcgttgctgctgcggctcaaaaattccaaggtcacatagttctccggtctccgcttcatatgtactcccctctcatcgtatggtcagataacgttggagccccgccgcatccagcactcggcgggcctgtgctgcggcaccgcagacatctgccgtgccgcccagctcctgcatccgctgccgggcccggatcagcagggcgatgccggagctgtccataaaggtcacgccggagagatccagcgtcagctgtgtaggcagggccttctcaatctcctgatccagccgccgcaggagccccttagcgctgtggtggtccagctcacctgagaggcggatgcagatatggcgggcctcgcattttacagaaacttccattgggatcgctccttcgtgcaaaaaataaaatcaccgcagatccttcgatctgcggtgattatacatgatgaagcggttattttctgtcaaaaacgggggcttggaaaaattagccacgcatggccgccgcggactcctccagcttggcgatcagcgcacgggccttgtcagccttctcccgctcggcattgaccacggcctccggggccttggacacgaagctctcgttttgcagcttcttctcgatgcgggccagattctcctctgccttggttttctccttggcgatgcgctccaactcctgccggatgtccaccaactccgccagaggcagatagagggtggcgttgtgggtggccacggtgaccatacccttcagatcctccggagactgcgcctgaacctccacctcgctggcgtaggccagccgcataatgaagtcacgtccgccggcatagatatccggggtctgagtgacgatgaggatcttggccttccgggagggcggtacgttcatctcagagcgccgggcccggacggcggaaatggcgtccttcaccgcctccatggcgttttcctcctgagtaaaggcgaagcgctcctgatactccggccactgggcccggatcaggaaatcgccctcgtggggcagcgcctgccagatttcctcggtgatgaagggcatgaagggatgcagcagctccagcacccgcagcagcacatagcacagcacgttctgagccgccagcttggcctcctcgtcctcgccgtacagccgggccttggtaagctcgatgtaccagtcgcaataggtgtcccaaatgaagtcgtagatcttggcggaggccacgcccagttcataggcctccatattatccgtgacctcccggatgagggtattcagcttgctgagaacccacttgtcctccagctccagctgctccggtagctgtacatggtcgatggtgaggttcatcatcacatagcgggaggcattccagatcttattggcaaagttccgcatggcctcacacttctccacaaagaagcgcatatcgttgccggggctattgccggtgatgaggttgaagcgcagggcatcggcaccgaacttgtccgccatctccagcgggtcaatgccgttgccgagagacttggacatcttgcggcccttgtcatcccggaccagaccgtggatgaacaccgtcttgaagggctcctgcttcatctgctccatgccggagaagatcatacgggccacccagaagaagatgatatcgtagccggtgaccagcacggaggtggggtaccagtacctcaggtcctcggagtccttgttgggccagcccagcgtggagaagggccacagagcggaactgaaccacgtatccagcacgtcctcctcacgggtcaggtgggtgcagccgcacttttcgcaccgggtgggatcctgacggctgacgttgatgtgtccgcactcgtcgcagtaccatgcgggaatctggtggccccaccacagctgacgggagatgcaccaatcatggacattctccatccagttggtataggtcttggtaaagcgctccggcacaaacttgatggtgccgtccttcaccacccggatggcctccttggccagaggctccatcttcacgaaccactgggcggagatcaggggctccacgtcgttgtggcagcggtagcaggtgccgacgttgtgggaatagggctcggtcttgaccagatagccctgctcctccagatccttgacgatggctttgcggcactcgtagcggtccatgccgttgtacttgccgccgttttcgttgatggtgccgtcgtcgttgatgacacggatcacctccagattgtggcgcaggcccacctcaaagtcgttgggatcgtgggcaggggtcatcttcacggcgccggtgccgaagccgatctcgcagtaatcatcacccacaatggggatctcacggttcatgatgggcaggatgcaggtcttgccgatgaggtgcttgaagtgctcgtcctccgggtttaccgccacgccggtgtcgcccatcatagtttcaggccgggtggtggccaccacgatatcgccgctgccgtcggccaacgggtagcggatatgccacaggtggccgggcttgtcggtatactccacctcggcatcggacagcgccgtcagacagtggggacaccagttgatgatgcggcttcccttgtagatgagacccttgtcatatagctcgcagaaggcctcacgcaccgcctgagagcagccctcgtccatggtgaaccgggagcgggaccagtcacaggaggcacccatcttcttctgctgctccacgatacggttgccgtacttctccttccaggcccagacacgctccaggaacttttcacgacccagatcatagcgggtcaggtgctcctcctcccgcagtcgctcctccaccttgatctgggtggcgataccggcgtgatcggtgccgggaagccacagggcggaatagccctgcatccgcttgaagcgggtgaggatatcctgcagcgtggagtccatggcgtggcccatgtgcagctggccggtgacgtttgggggaggcatgacgatggaaaagggcttcttcttcgggtcggcgtccgccttgaagcagccgttgtccatccacatctgatagatatgcggctccacctcacggggatcgtataccttcggcaattctttacgcatatgttctctccttctgatttggattttatcatcaaaaaaaccgccccgctccgccgatgcggaacaggacggactgtgatccgtggtaccacctgttgttcgggatgactcccgcactcatagggcaagcgccccgccccgataacggagggcaaaccgttgggacctactgccgtgttcagtccaaggctccgggacgacttgggcggcgcatcacgggagcttacacctgccgctccctctcttggcttccgcactccgcttactgcttcccttctgtgccgttacacaatatgtatgcagtataatacactcccggaaaaaagtcaagttcccctttccctctgggcggggcggtgttataatagggagtatctaagagaggaggcgccgccttgcatattctggagcatttgcgtaccgtgaaccgacaccgccatctggtgcggaaatactgcttccggttgggactgtactggcagggactgacccatgatctcagcaaatacagccccacggagttctggcgcagcgccaaatactatcagggctaccgcagtcccaacgatcaggagcggctggtcaacggcgtcagcctgtcatggctccaccacaagggccgcaaccgccaccattttgaatattggatcgactactgccggggcgaggacggaacgcccttcatcggcggctgcaagatgccggtgaagtatgtggcggagatgttctgtgaccgcatcgccgcctgccgggtgtatcagaaggagaaatacaccgatgcctctccctacgactatttccagcactccaaggggcatctgtgccggtcggagcacggtcacggcttcatccatccggagaccagcgagctgctgacccggtggctgctgcttctgaaggagcagggcgaggacgccgccttccttcagatccggcaggagctgaaggagctgcggagagcgtaaataccggacaaaagccgctgtcgatccattgtgtcgggagcgcctttttcttttcggtgtttttcacaggctttcctttgatttatacagcatattgcacaatttctatgtagggaatcccattaaaaaatggcagcagcaggggttgtggaaggatgtgcgccgtgatatactgtatgatcgtgagaggaaaaatggtgaaaaagaggaacatatgatggagaaaaacgggaaaaaaagtttattttcgattgaaataaccacagggtccctgtggaaaaatattctgctgttcagcctgccgctgatgatgacgcaggtgctggaggtgctgttcaacctcagcgacgtggccattgccggtaaatttgccgactatctggcgctgggcgctgtgggctccaccactctgctggtatccctgtttacgggactgctcattggcatcggcagcggtgtcaacgtggtcgtggcccgtggactggggctgggcagtcatgaggacgtggagaagaccatccacacctccctgctcatctgcagcggtatcggtatcgtggtgtgcctggtctgtctgctgctggcgaagcccatgctgctactgctgaataccaaggaggacttgctgtccggcgccgtggggtatctgcggatctacgctctgggtatgccggccatggcggtatacaacttcggcaatggtgtcctcagtgccgccggggacacaaagcggcctctgctgtatctgagcattgccggcgtggtgaatgtggccctgaacctgttctttgtgatccagtgccacatggccgccctcggtgtggccatcgccagcgccatcgcccagtggctgtccgctctgctgatcatgcggcatctgatgagccaaaaggatgcctgcagagtgcatctgaaaaagctgtgcatcgacaaggccgccgccaagcgggtgctgatgatcggcatcccctccggcctgcaaaacgccatctttgccgttgcaaacctcttcgtacagatcggcgtcaacagcttcgattcggtgatggtatccggtagctcggcagctgccaacgccgatacgctgatcttcaatatgatgtcagccttctataccggctgcgccacctttgtcagccgcaactggggtgccggaaagacggatcgtatcctcaagagctaccgtatcgttctgctgtattcctttctggtgggcagcatctgcggcggactgctgctgctgttcggagacaagttccttggacttttcgccaatgaggcggacgtgatcgccgccggtatgcagcgactgaagatcatgggcttctccttcggcgtcagcgccctgatggacgccagcattgccgcctcccgtggaattgggcgcagcatcatccccaccatcatcgtcatcatgggctcctgcgtgttccgggtcatctgggtgtacacggtgttcgcctacttcggcaccatcccctccctgttcctgctgtacatcttctcctgggccatcacgggcattgccgagtgggcctacttccggcacagctacaagaaatacatcctgcacggacaaatatggtaaacgaacgccccggccagttgactgaccggggtgtcttttttcggttctggttgcatatacaaacaactggccctccggcatactcggagggccagttttacagcttattcaggatacgcttactcggcgtcctcgtccccgtcgttcagcagagcacggatggacagggagatcttttgcttctcctcatccacagcggtaatcttggcatccacgatctggccctcggacagaacgtcaccgggcttctcgatgcggcgatcggcgatctgggagatgtggatcaggccatccacaccgggaacgacctcagcgaaagcaccgaaggtcatcagcttcacgatacggacggaagccacgtcgcccaccttgtaggtctccatgaacttgtcccaaggattgcaggaacggtccttcacacccagagagatcttgtgcttctcaggatcgaaggagatgacgtacacatccagcgtgtcgcccacagaaaccacctcagcggggttcttgatgcgggaccaggacagctcggagatatgtaccatgccgtccacgccgccgatgtccacaaacacgccatagctggtcatggacttgacggtgccggtatagtgcttacccacctcgatgctctcccagatggcggcctgagcagcctgacgctcctcatactgcacggcacggatggaacccaccacacggcggcgggcgcgattgacctcggtgatccgcagggagacggtctggccgatcatctggctcagatcagcaccacggggctgaccgctctgagaggcgggaacgaacacacgcacacccttgacgttgacgacgatgccgcccttgttctcctcggtgaccttgccctcaagagtggttttgttctcgcaggcctcagcgatatcctcccagaccttcacggcgtccagacgcttcttggagagcatagcgtagccctccacgtcgttgacacggatgatgtaggtctcgatctcgtcacccaccttcaccacgtcctcaggcttcacgctggaatcggcggacagctcttccgcggaaatatagcctgcctgcttgcagcccagatccacctgaacctcggtgggacccacggccgtcacgataccggttaccttctctcctgtatttaaagtcttaaaggatttgtccagcagttcctcaaagctctcttcctggggttccatgttcttgatttcttcgctcattgttgtatatacctccttaatgatgcccgccggggtggacgcgccggccgtaagccccgccattgtgcatccggaaagaaagcccgtcgtcagctcccccgcctgttcgatctgatacacgacagggcaagccttacggcagatctccgctaaatgcttcgtgttggcacttttacgatctccgaccacgaccattacgtcagcctgagctgccaattcggctgcctccaactgacgcctatgcgtagcgctacatattgtatcaaagatttttgcgtttgtacacagtttttttaaaatttctttggaagtttcccaaattgttcggatgcaggtggtctgagccaccgccgtcagggacagagactgccgggaaggcttctgcaggagccatttttcaagctcctccggccccgggaatatgacgctgcgatccgaccagctggctacacccatgacctccggatgccgaggctccccaatgataagggggatacgcccctcccggtcggcctgcgccaccagctgctggatccgcagtacgttaggacaggtggcgttgacacacaccgatcccagttgctccagacggtcaaagacctccttgcgctccccgtgggagcggatgatcaccgtctcgccggggcggacctcctccacggagtccacctgtctggcccccagcgcctccagctctgccaccacatggacgttgtggatgatgctgcccagcatggcgcagccgcccttttcacgggctgtctcctccgccagcttcacagcccgctccacgccgtaacagaaaccggcgcttttggctactcttacctctgccattggattccccccagcgcataggcccgacgcatgatctcctcggcgttggactgataatcctccgccgttcccttccggccggtatataccgggtcgtagggctttccgatgatgatggacacccggtgaaacaggcgcttgtcccggccgatgaacaccggcaccagcggcacgccggagcgaatggccatcatgcctacgccgcctttgacatccacgctgccgggctctttgacccgtgtcccctccgggaataccagcagattccagccgtcccgcaagctctggatggaggtcttgacggcggcgatgtcggagtttccccgatccaccccgaatacgccgatggcccgcagaaaggctcccaccacgggaattttcatcagctgcttcttggccatgatccgcagggggaagtcctgccgcatggcgcatatcagcaggatggggtccacggcgctggagtgattggcgcacagcagtaccggctgatccttggggagattttccagtccctccacccgcagcgggtgaagaaacgtgacaaagggccgccatgtggcccggataaagcggtaaaagcgattttttaccatccgatcctctcctttatcatgtgcagcagggcctcccggctctggtcaaagtccaaatggctggtatccagcagcaaagcgtcctccgcctgccgcaggggtgccgtctcccgatggctgtctgcccagtcccgctggaggatatccgagagcacctgattgtagggctgcggcgttccccgctgctccagctccttcatgcggcgctgggcccgaatctccggcgaggccgtcaggaagatctttacctccgcctgcggcagcactaccgtgccaatatcacgaccgtccatcaccacactgtggctgcgggccagctctcgctgcatctccagcagaaaggcccgtacctccgggatggcggagaccaccgaggcccagcgggagatttccggacggcggatgacgtccgtcacgtcctccccgttgagcagcatacgctgcaggccgtcctcaccgtaggccatgctcacctgaatgtccggcagcagggcgatgatggccgccaaatcatgcgggtctgcctcccggcggcaggcgtacaggccgatggtgcggtagatggccccggtatccacgtagaggatgcccagctctgccgctgcggccttggccagtgtgcttttccctgcgccggaggggccgtcaatggccacggcgtatctcttgttatccatgcgattcgctccttgttcctctgcggcactgaccccggcacaatggccggtggcccatgcgatctgcaaattaaaaccgcccgtataggcgtctacatccagaatttccccggcaaaatacagcccctgtaccagcttggaggccatggtggcaggctgcacctgccctaccttcacgccgccggaggtgatgatggcctccgccacaggccgtggcccagtgacgggcatggtgaagcgcttcagcagctgcaccagcgcacggcgctgctctctggtcacagcgttggcctgctgctgggggtccatccccaaacggttcagtatcaccggcaccatgctgtggggaaccagaccggaaaagatgcgctccacgctgcggttgggggcctcacccagatcccgcaggatgcggctttccagcttctgttcgtccagcgcaggctttaagtcgatgctgagacggtaggtctccttctcccaattccgcagatgggcgctggccgacagcaccagcggcccggagacgccgaagtgggtgaacagcatctcgccaaattcccggaagatggctttccctttccggttcagcaccgtcagctctacgtttttcagagccagcccctgcatctgccggcaggcctcgtcctcactgaccagcgggaccagtgaaccgtggggcgggacgatctcatgccccagctgcgccgccatgcggtagccgtcgccggtggatccggtggcgggatagctgacaccgccggtggccagcaccaccgccttcgccgggtaggtatccttctcaccacggacgccggtgacagcaccttcctctgtctcgatggaaaccgcccggtcgtgcgaccagtgcaccttcaggcgatccagtcggtgcttcagagcaccggatacatcgaaggagcaatcagactggggaaagacccggttgccccgctccgtttttaaggggacacccaactcctcaaaaaaagccatgacatcctggctattaaaggtggaaaaagcactgtaaaggaattttccattacgggggatattttgcagaagtgcctcctccgtacagttgttggtgacgttgcagcgtccttttcccgtgatattcagtttttttcccaaccgctcgttgggctcgatcagcgtgacttgcgcccctcggccggcagcggcaatggccgccatcattccggcggctcccccgccgataactaccactcttttactcatcttccgttttcccgaacacactgtattgtgaccagacccgctccagctcggagaaggtttccggcacctcttcgtttttccgctgacccaccgtgacgatcagggcattcagcagactcagcggcgctgtgatggagtccacaaaggaaatcatgtcactgcggaccagcagcgctgccgaggccagcggatacaggggggccagcgtactgtcggtgatggccaccacatccgcccccttttctctggcgtactgcacggcattgacggtcattttggagtaccggggaaagctgatagccagcagcacatcaccgggctgcacctgcaccagctgctcgaaggtctcccctgccacggcgttctgcaccagtgtcacatttttgaagatcaggcggaaatagaagttcagataccccgtcagaaacgatgacgagcgcatccccagcaggtagatgtgctgtgccttcagcagcttgtccaccatctgctcgaactgcccccggtccacctgctcgatggcggtacggagactgtccatatcccgctgcatgacgctggtcagcagatccccctgcatctggtcgttggacacctgaatgcgctggatagaggtgagctttccacggatcagctcccgcagatcccgctgcatctccggatagccctcgtagcccagctgggcggcgaagcgcaccaccgtggactcgctgacctccaccatctgtcccagccggctggcggtcataaaggccgccttgtcatagtgctccagaatgtaggcggcaatgcgcttttgtcccttggaaaactgtggcatttgctggcgaatggtatgcagcacgttgttattcaaccccatcgcttcccttcaagtcttgtaattcctcatctgttaagtatctccacttgccagatggaaggttccccaaatgcagggtatgctcctgcacccgccgcagccgcagcacggaaagccccgcctgacggcacatccggcggatctgccggttcttgccctgatggatgatcacctccaacaccgccgtctcccctttttgggacagacggcgcacctgtgccggttgaatgggctccccctccagcatccgcatccgggagagccgttcctcggccccctccagagcgccggataccgtcacctgatagactttgtccacctgatgccggggatgcagcagctgttgggtcagggtcccgtcattggtgaacaacagcagcccctcggaatccttatccagccgtcccacggggaacactctccggccgcagtccgccaccagttccgccgccgttttgcggccccgctcgtcggaaagggtggtgacgtaccctctgggcttgttcagcatcagatacaccggctccggtgccgcagccacaggccttccgtccaccagcagggtatcccgctccgggtcgccgctctcccccagtccggccacccggccgttgagggtcacacgcccctgccgcagcagttcctctgccgcacggcgggaggagataccgcagcgggcgatccatttttgcaggcgttcctccatgggatccctccttacggcccgaagccaaattcatacagggtggcgtgatccgcccagtcgttgccgtcctgtaacgtgacggcaaccagagttcgcccgtttcgccggacgcagctcaccagcgtccgccccgccgcacgggtgtagccagtcttgagaccgatgcacccgtcgatgctgcggagcagccggttatgattggtcatggtgcggccgcccaccgtaacgctgcgggtggagcacagccgcacaagtgtttcgttttttacggcgcaggccgccagacgggccatgtcccgtgccgtggaatagtggccctcctgatccaaaccgttgggatttgcaaaggaggtaccggtcatgcccagctccgccgccttgcggttcatctccgccacaaagcgctccagaccgccgcagtggtccgccagagccagcgccgcatcgttgccggagcacagcagcagaccgtacagaagctcctccaccgtcacccggtcgccgggcttcaggtacatggaagagccctccgccatgtggtgccgggtcaccgtgaccatatcccccagaccgccacgctccagcaccaccaaggctgtcatcagcttggtggtgctggcaatgagcatctgccggtcgggattcttttcgtacaggacctcccccgtatcgccgtccatgagaatggccgctgtagcggaagtatctgccgcccacgccgtgggcaggcacagcagcacgattgccgtcactgccgtcaggattcgcttgtacacaggatcaccctcttccctcaggtgatcctattctattccgtcagaagctctctttttcctctttccgcttatcgatgaagtgctccacccggtccatgacctccggaaccatctccaccatgcgggccgccgtggtcacggcaggcacgcccaccggcagcacacgggtcacaccgtccttcaccaccagaaacgccaccggctccaccttcacacctgcagtgctggcgccgccgaacatggcgggggtctgcttgccgtagtccccgccaccgcagccaaagccgaagctcagccgggacacggggatcagggtcacgccgtccggcgtctggatgggctcaccgatgatggtgttggagtccaccatctcccgaattttgctcatggaggcatccatcagatcaataagggagtgattcttcttctcgttgttttccatagtatagcttcctttctttatgatgcggtctgctcctgtgccggcggcggagccgctttcacagattgttcgatttcctttttccgtttccgcagccatttcagcagcgggatgccgaagcccaagccgatgatgagcagatcaccgatgcggaaagcgacacctgcctctccctctatttgggtgcgggctgcaccgaaatccgttcccagatggatgtgcgggtccggtatcttcagcagccgttccagctggggcatcagcgtccacatggcgctgctggcccagccataggtctgcgccacggcagcaggatcctccccggcaaagaccacggacagacgcagggggtcgatccgcatccgccgccgggtccgagccagcgcccgcttcaggccctcccacaggtacggcagcgccgagcggacatcctcgaagctcagagagagcttttcccgctgcttggcaggctccttctcctgtgcttctcccttggcttttttcttctgcttggtcttttgctctgtctccgtcttttccggccggggcagcagctggatgcgggccggaccggctatgaccgtcagctccagctgttcaccgaagcggaggtgtactcccacccgcagcagcagaagcaggataagcagcagcaaaatgccgccgatgatccacagtgccgccaagccactcccccctttcgccgtttatacggcaatcttacgcatttgtatcattcagcacggagccgtcctccgccagacgcagctggccgtcggtctccatccccggcatctccggcagatcctccagcgagttcaggtggaacgcccggaggaacgctttggtggtgcggtacagccgtggtcttcccggcacctgcagccgcccgcactcctcgataagatgccggtccagcagcagccccacggtataggagctgtccacgccacggatctggtccacataggcccgtgtggtgggctggtagtaggcgatgatggtcagcacctccagcgccggctgggacagcttggcgggcttgcgtatctcaaaggcccgacggataacgtcggcatactccggggcggagcacagctgccagctgtcctccagacgcagcagccgcatcccacgccgctcaaagctgtaatagtccataagcttttgcagcacaagctccgctgttggtcgatccaactccgccgccagacagatgcggtcgatatgcaccggttcgccggaggcaaacaggatgccctccacggcggcctcgatctctttcatttcccgtgtttccacgctcattcctcctccgtctcctgacaggtcaccgtgcagtcggcggcagagcccgccaaccggatgatatggttccggcacagctccagcaccgccatgaatgtagccaccaactcgctgcggctgcggctgccacggaacagcagcaaaaaccgggtgatgccgttccttttcagccgctccaccaactccttggccttccgctccaccggatacggctcccgcttgacgatctcgtcaaaggcccgcagcggcggtgtctccgcctgaccccggcggtccagcacttcctgcatagtaatgaccagatcccccggctcctgatcgtactcgtataccttgccccgcttcatgggctccggcccacgagtcaggatgctgcggccaaactcgctcatgggtcccatgcgctccgtcagcttccggatgcgggcgtaggcatccccacgctgccgctccgccagagactggatcagggcgtccatctcgctctgggcctcttcatcctcaatgctcagcagcatccgggtcttgatgtacataaggtgagccgccatggtgacaaattcgctggccacctctaaatccatctgcttgcgctgctccagatacgccagatactggtccagaatcagtgcaatggggatatcctgtatctcgatcttattcttgttcagcagaaacagaatgagatccagaggtccctcgaagtcctccagtgtctcccctattttgggctgtaccactttttccagtttgaaaatgggatgatccaatgttgacacctcaagaaaggccgacgatccggcagaatatccgaaatacccacgcaatggcgctgttcagcgccccgctgcccacgtccagcagcaccaggccccacagcacgaacattccgatgcgctcataccgcagcatcgtgtcgtacatccgatccggcagcagggagaacagcaccttggcaccgtccagcggcgggattggcaccagattgaaaaggcccagaccgatggagagcaccgccgtagacactagaaagtccagtatcccctgattcagcgccgaataggcggcgtgatccaccatgatccgggcgcccaccaacagtaccaatgccagaagaaagttggaaaccggccccgccagcgccgtcagcgccatgccctgcttgggctttctgaagtagcggggatccaccggcaccggcttggcccagccgaagcccagcgtcaccatcatcagaagacccatccagtcgatgtgccgcagtggattcagactcagccggtgcatccgcttggcggtggggtctcccagggcataggccgccagcccgtggcaggtctcgtgggtggtcagacacaggaacaccgatgccagccgcagtaaaatatttcgaagggagccgaagtccagcgctgcccatagttcttgcaaatagttcaaagaagttttctcctatcgacacaagatcatgtcgattataccagatactatctccaaatacaaggtaaaataaccaactcctttcccattgtttcacaaaatgaaactttcagttgacttgtcataaaacgcctgctataatcagtacgaatatatacaaggaggctatctatgggttccttttcctatcatgtgggccagcggatcaagaagtaccgcaagagccgtggctacaccatcgagcagttttcggccatgatcaacaagagcaaggccaccctttccaagtacgaaaacggcaccatcaccatcgacatcgagaccctctacgacattgctcaggcgctgaatatcgacctgaagtgctttatcgactatcagccgccggtatttcatcaggagcaggtgctgacgggcaatttctatttcaacaccccgcaggcctatatgtactactttgacgggcgcatccatcagctggtgcgctctctgctgcgcttttcccctgccgtcgacggcgagggcatcgacgtgatcctctatatgggagtggagagcttcgacgatccggatcaatgtcagcacctctttaccggcgagatgaagccctacgacaccatcactcatatggtgctccacaaccagatcaatgcggcggaaaaaatgtacatctgtatgctcaaccccatgcaaacccgcaccccggcggttgggatgctttccggcatcggcagctcccccttcttcgcccccgtggccctgaaggtgctgatctccaaggaactgctggaggagaacgaccggctgctggacaccgtgaagctggataaggacgactatcatctgctgaaatactacaacatgatggtcatcaaccgtcccgcctccctgtttctggagccctgagaaccccgatatgggtaaaaagagctgtaaggctaagttgccttacagctcttttattcagctcattttcacgatctcacgccgcagacgcaggatgatgcgtttttccagacgggagatgtaggactgggagatgcccaagcggtcggccacctccttctgtgtcagttccttctgcccccacaggccgaagcgcatggtgatgatagcccgctcccgctgggacagcatccctacggcgtcgctgagcagcttgcggtctgcatctgcctcaatgggccgcagcaccacgtccccctccgtccccagtacgtcgctgagcagcagctccttgccgtcccagtcggtgtttagtggctcgtcgaagctcacctccgtccgctggctgctgtttttccgcaggaacatcagaatttcgttttcgatgcagcgggaggcataggtggccagcttgatgttcttatccgcccggaaggtgttgatggccttgatgagtccgatggtgccgatggagatcaggtcctcgatgttgatgccggtgttttcaaaccggcgggcgatatacaccaccagccgcagattccgctcgatgagcgtctgccgggcctgtgggtccccctgctccaggcgggcgatgacctccgtctcctcctctctgggcagaggcggcggcaaggtgtcgctgccgccgatgtacatgatcttatcccgcctgcgcagactgtgcagccacgccagcagccgcctgaacagctttttcatgcttcctcccctccgttccgccccacagggcctgatacccgccgccgtcgctgaccggccccggcgacagggccaccagcgtccggggatatgtagtgccgccgatctgcacgctgtcactgcaaaccgccagcagcagtccctccggagctcctatgctgcaaaagggcagcagactgaaccgtctgcccaagtccgtggcgtggagttgggccatgcgctcctccggcggggcccgccgggtcacgattcgttccacctccggcggcagaagcccgcccagcgacgtctgctccagcaccagcaccggctgtccggtgacggggcttcgcagggtgtttcccgtgtcgtgcagcacccgcacggcacgactctgtcctccgatggatatggttgcgtccatgatctctcctcccccatgtctggccgcctgccggaataccagatgcagcagcgcataaaatcccagcgctgcacccagcagcactggccagctgatctccgcccgatacagtctccctacatatgccgctacggagccggaggccagccccagcgccagcaccagaccgcccagccctccggccaacagaaaaaacagcgccgtcagccgccacggatgggactcccgccgccacgccgtcagcgccatggcaactcccatagccgcccggcacaggggatgcgccagccagccaagtcccggtaggaacaccgccccggcatacaatgccccgccggcagcgcacagggccagccttcccctccgcagggggatacccgccagccgggccgtggtcaggagcaataggtaatccaccaaaagattcagcaggaccacccgatccagatacaccaccgtcacgccgcttccccccttccgctggacacattataccgtccgccgccggaaaaaagcgtcaaaaaaagagaggaccccatcggtcctctccccatgtaccgcatacgccgatccccggctgtgggttcacaggctcaggtatggcacaatgagcgttgccagcatcaagacagccagcagcagagccacgcccatggccagataacgggtccatttgggtctcatatcgattcctcctctgtaattatgcgtttgatacttttctccagctttcggcggggggccatgacctcgtgtccgcagccgcagcagcggagcttcaggtccatccctacccgcagcacctcccagcggcggctgccgcaagggtgttcttttttcatctctacgatatcgtgcagcttcagatccataggcgctcctttcgttcaagcacgcctgtaccggcgcatagtatgggatatctgaatgtaagggtgtgtcatgatggaagaatataaatggccgctgccggagggattctggaaaccctgtacgctccggcagctgcaggaggcactggcgtcccacgaaatactcgcctctcccgtcctgcggtgcgatgcccagcgcaatctgcaccttcggccgggaggctgcggcggcatcatcccacaggatcaggtggcggcaccgtttctctccggcgctcagcgggatatcgctgcgctgtcctgcgtggggcgcagcgtctgttttcaggtgacgggtcagcgcatagcagccgacggcagcacggaatttcttctctcccgccgtatggcacaggaggaggccatggagcacatcctacgccacgggatgcccggcatggtgattcggggacaggtgacgcatctggcacccttcggggccttcgtggatgtaggctgcggccttgtggccctgctgccgctggcgaatatctccgtggcacgcatccgccatccggcggagcgcttcgccctgcaccagcgcatccgtgctgtggtgcagggcatcgacccacagcaaaagcgcatcgtcctcagtcacagagagctgctgggaacgtggctggagaacgccgcccgcttccgggtgggcgagacggtgccgggcattgtccgcagctgcaagccctatggctgcttcgtggagctgacgcccaacctgtcgggcttggcggacagccgggaggatatcccggagggacggctggtgtcggtctacatccgctccatccagcctcagaccggcaagatcaagctgcagatggtgcaggagctgggacagccagacttccccacgccgctgcactatcagatcaccggcggcagcgtcagcggctggcgctatcgcccttgatctcgtcccagtagcgcttggcggcctgctctgttttgttggggccgtattcgtagtaaacagcgtcctttacaaggtctggcaagtattgctgctttacatagtgattggggtaaacgtggggatatttgtaggtcgggaccttccccgttccggcgctgtcggcgtggacattctgcaagtgccgtggcaccggccccaccttgccgcggtcgatgtcctgcatggcggcaatgatggcattgtgggcggaattggacttgggagctgtggccagcagcaccgccgcctctgccagcgggagccgtccctccggcaggcccagctgcagggcagcgtccacgcaggccttcgttaccacgatggcctgtggataggccagccccacgtcctccgctgcgatgaccagcagccggcggcaggggctcagcagatctcccgccgccagcagccgccccagatagtacaccgccgcatccggatccgagccacggatggatttttgcagcgccgacagcaggtcgtagtgctgatccccctcccggtcataccgcatggcgctgcgctgggccagcacctgtgcatcctccgtcgtcaggagcagccctccgtccctaggcttggcggactgatacagcagctccacagcgttgacagccttgcggacatccccgccgcacccggcggcgatgagccggggaacctcctcctcccacgagaggggcaggctgctgcgctgctgctggagcgccaacgcccgctccacggcaggtaccgtctcctccggtgtcagggccttgaactcgaacaccgtgctccgggaaaggagggcattatacacatagaaaaaagggttctccgtggtggaggcgatgagggtgatctttccgttctccatgaactccagcaggctctgctgctgctttttgttgaagtactggatctcgtccagatacagcagtaccccgttaggagccagcatggtgtccacgtcgctgatgaccgcctttacgtcctgcagggacgccgtggtggcattgaggtggtacagggtctttttcgtccggcgggcgatgatgttggcaatggtggtcttccccgtgccggatgggccgtagaaaatcaggttggcctccgccccgctctcgatgaggcggcgcagcagtgctccctcccccagcaggtgcttctgtcctgctacctcatccagtgtctgaggtcgtatttcatctgccagcggccgcatcacggcacctcctcttcgctgcggccggaagctccgtgtccgcaaaatcagttggattataccacattcttttccgatttgcaccccctatttgcatttttcccgccggtctggtacaatgggtgagaggtgatgcacagatgaaaaccaaacaggaggtctccgccatcatcacggcactgaaggccttgtatcccgacgcacaatgctcgctggactacggcaaggactatgagctgctgttttccgtgcggctggcggcccaatgtaccgacgcacgggtgaatctggtgaccccggcgctcttcgcccgctaccccacgctggaggcctttgcggaggcggacgtggatgaggtgggacaatacatccactcctgcggcttctggcgtgccaaggcacgggatatcgtagcctcggcccgtatgctgcgggaggcgttcggcggcagagtgccggacactatggagcagctgctgcggctccccggcgtggggcgcaagaccgccaacctcattctgggggacatttacgggcaggagggatatgtctgcgacacccactgcatccgcatcaccggccgtcttggccttaccgacggcagcaaggacccgctgaaggtagagcggcagctgcggcagtgcatcccgccggaggagtccaacaacttctgccaccggatggtgctccatggacgggccgtctgcaccgcccgctctcccaggtgcggggagtgtaccctgcggccctattgtgactttgggcagggcgcagaaaactgaatacttatatcagactgccggaagtacgcattgcttccggcagctttttgcatgaggagcaggcacttttcccgctgccgccacatatattggcagtatcaagacctatccaaggaggcagcttatggatcagaaggaacttatcgaccgactgcgccgggaccctaaggccgtgcagtcgctgatgacctccgccgacggtcagcggctgatgcagcttctatctggcggggacggtgggcgcacccttcagcaggccgccggagaggctgcggcaggcaacaccatgcagatggcgcagatgctcaagagcatcatgtctaccccggaggggaccgccctgctgcggcgcatccgggacagtctgcagggatagagaggaggacggcagtgtgtcggagatggacgagaaactgaatacactgctgtcagaccccggcagcatggcccggatcatgcagctggctcaacagctctccggaactatgggcggtgcagagaagagtacaccggagccgccacctcctccgcccgccgatcctgaggatcagacgggcagagggacggcaggctttggcggattgggcgggctggacccggcgctgctggggaagcttctgccgctggcacaggaatacggccgcagcaacagcgcctccatgcagctgctgaacgccctgcggccgtttttgaagccggaaaagcagggcaaggtggaacgggcggcacatctggcaaggctcatccatctggggaaaaaattcctgtcggaatgggagggatagcgtgtataaccggtacatccgcaacgagcagggggcatacagccgcatcccccaacaggaaccggctccggggcccgtttccgggcgaccgccccctcccccgccgtcggagcccccgccgccgccgggcggcgactcgtcaccgggcagtcctccgccgggagggccgccgcccaagccgcaggagccatctccccgtccgccggagggacggtttctggaccggctgctgtcccggctccatctgggggacatcgactccggggatctgctgcttctattgatcctctttttcctgttccgtgaggaggctgacgaggaggtcctgattgccatcgggctcctgctgattttgtaaaaaaggaccgagcggcacagccgttcggtccttttttacgttgtaagaatcatctcctgccacggcggaagatcttgcccagcatactgctgaccagtccccgctcatagcggttcataccgaagagccacagactgccagcatagaccgccacgaatacgcagccccacagaccaatctgtaagtagctgcccacctgagcaaagcgagcaatcagcaccgctacgatagccggcaccagcatggagggcagcagctgggcgatgcgccgccagaagcggctcacatccagtccgatcttcctgcggtagtaccagttgatgggcaggacatttcccagcagtgtgacaatgaggatactgctggcaacgcccagcaggccccacctccggcacagggggatcatcagcaccacgttgacgcctgccgccgccagatagacccaggcccggaacttgtgcatccccttggcccgcaggatctccagccccacgaactggatggaggacatgatggtggagagaaacagcaaaatcgccacgggatagtcgatggcaaagctggcgtcgcccttggcccacagcaccacgaaggggcggcccaccgccacaaagcccagaaacacgcacatgagcatgatgaattgcaaacggcctgcacgggtcatcagccgccccaactcacgggtgggggtgttggaggccaccatgcggtgtacgcggggggccagcacattggagatggccatggcgaaggacagatagtacacgttcagctgattggcattataatacacggcactgagctccgtgccgtggatccatgtggtcatcagggtaccgataccgtagttcacctgatccaccaccacggcgatgaacacatagaaggtaaagcccatcatgctcttcatgagggcgaagtcgtagccacggaagctgatgggcatccgcagacggatgagacagtagaaggcctccaccacgccgctgacgatggtcagcatcagactcaggatagcgatggccggcgagtgataccccaacagcagcagcgggatggagatcatggggctcagcaccgacttggccatggccaccagcttcaaaaacagataccgctcgttgatattgacattggactcgaacacgctgatggggaacgacagagccgcattgacggacatgatccgcagcagctcggcacccagcgccagctcctcctccgtccacttggcaccgaacacgttctgcggatgcgccgccagtgtgaagcccagcaccagcagcaccagacccagcaccgtgtaggtcacaagaaacattccgttcagcttggccatggtccggcggtcctgcgccaccttggcctgagagtaataccgcatataggcgctgcccagacccatactcagcagcagaagatatgcaatgatggggcctacggagccgtatacgccgtattcactggtccccagctgccccttcatgatgggggcatataccagcgagaggatggtactcactgccatggagacataggagaggatcgcacccgcccgcacttgatttacctgcaaaaagtcatctccttccgggcagtcataccgtctgccgaaaatatgatatcagtttattataccgtatttgtcaccccctgtaaagcgccaagtttcgctcacagcggcaaaaacattggagatgacggcggcccttcaggggatgcaaaactggcggagaggtatctctccgccagtctctcatgctctgggatgagccttgttgtagatatccttcagctgcttttgaatcacgtgggtgtatatctgtgtggaggagatatccgcatggcccagcatctcctgaatggctcgcaggtctgctccgttctccagcaggtgggctgcaaaggagtgccgtagggtgtggggcgtgatgtccttttcgatgcccgccgtctcctgatagtgcttgatgatcttccaaaagccctgacggctcatgcgctcgccattcatgttgacgaacagggccgtctccgtctcgttggcgatgatccggggccggatgtcccgtatgtagtcctgaagggccttcaccgcaccgtggtacagggggatgatgcgctccttgcctcggctgctgcaccggatgaagcccgctgtcaggttcacatccgtcacgttcagcccgatgagctccgatacccggatgccggtggcgtacagcagctccagcatggcatgatcccggaagcccttctcgtccacgcagcggggctgctccagaaacagctccacctctttgttggtcagtatctccgggtacttccgctctgcccggtgggtcaccaccgccttggcggggttggccttcatgaccccggaggcctgcatatacccataaaaggatttcagcgaggcggcgctgcgtgtcacggtggccggggacttcccccgccgctccagatacctcaggtactcgttgatggtatcggtcttgacccgccgcagatcggctgccccgttttccagcagccaactgcggaactggttcagatcccgcaaataggagctgacggtgttggcggaggcgtgcttttcctgctccagatagctgccgtatgccgcaatatgatccgccaaggtcctcaactcctctcatgataatgttcccagtgcccactgcaccagcctcggtaccagcgtcagctccagcgccatacccagaagcagcagcgccccgcagacggccagcttcctccagcggttcctctcccctaccagcacggccgggtaaatgctgcacggcagcacgatcaggcaccgcacgccgaaggctgccaaggccagtaaaacgccgctgcgccccagcgcagcagcgaagcagcccgcagaaaaggaaagaaaaaatccctccgccgccagaaccggcaggatcagcgccgccccggcggcgccgcaaaagcccagcaccgtcaccagcagcggatagcgcaggtacacccctgccacccgcagcagcgaggcggtgcgatccgttgtctcaccccatacggcggcgtactgccgcagataggcggccagctccgtccgggatgcctccggcacgctccgggccgccagctgccccagcagaatgcccccgcagaagcagagtcccagcagcgccagccgccataggccggtgtgccgtccgggccatctgtgaaaatgtgatgctcgtctcatgcggccagtcacctcgtctcatcctatgagacaagccggccagatagaagcgcaagttctgcggtcttgccgcagcacgacataactcacgaggttgccataacatatgatagggcaaacgctgcattttcgcaagagctttttgctggcgctgctgttttttgtaaattatgttaaatagttatgtaaagtgtgttatgtgaatctcgaaaacctcgaagaatccccccctcccccacgcaaaggaaggacaagatatggggcgggatttttttagaccgccaccacatcttgccctcccccgtcccggcggcgcagggatacttcatccgctgccgccgtcatggcccgtcaagcaaaaaatgtctcacagagagattttcgtgattttcaccatggaacactctatatcgttcctcgatgtttctgcccccgccgaacaggcttcttttttcgatgccgtctcccctgccccagcacggctcccagcagcgtaccagccaccagcgccagcgtgatccccagaccgtgatgggcaaaggccgccgtaccgaacaccgtcagacccaccagccagatcaacacataagcccctgccgccagcagcagcgaagcctgcacggtgccgctgcgcccccgcaccgccacccgcacgcccagaaatgcgcccagcgcccaaccgccataaacccacgcagccacgctccccatgggcaggatgcccttcaccgccagcagcgccccaatcacatccgccgcaatgctggaaagaaacagcaccatcaaccccagccagtcccgccggccccacgtcagtttccctgcggacataaaaatacctcccctgaatcgctcttactgcaagcatattcaggggagggtgctttattcgcttttattcctcggtcttatcctcggtggtctcctcgaccttctcctctgccacaggctcacccttggacttcttggcagggcgctgggcaacggccatctgctgatccagcgtacccacagaaccgatggcggacttgacgaactccatgcggacccgatcctcgctggtctcgatgaccacggtgcggtcggtgatggccaccacacggccatagatgccgccgatggtggtcagccagtcgcccttcttcaggctgttgcgcatttcctccgcttgcttcttccgcttattctcaggacggatcaggaggaaatagaaaatagcgatcatcacgacgatcataatgatcgtggaggtcatgttgccggcaccggcagccgtcgtgccgtctgtagcatatgcgaactgaatcatgggacaaaactccttttttcacaatatggtatgtattatactggattctgtgtccgtttgcaagagggacaggccagttttttggaaatccgctgcagaacacccagatcagagcttttcaccgagtttttggctgtactccgcccggaagtccgcaaagcagccggcgtcaaggctctcccggatgcgccgggtcagcttgttataaaagtacagattgtgcatcaccgccagacgcatccccagcatctcctccgccgtgaacagatgacggagataggcccggctgaaccggcggcacaccgggcagtcgcacgccggatcgatgggccggtcatccagcttgtacttggcgtttttgatgttcagggagccctgccacgaaaagagctttccgtgtcgggcgttgcgggcaggcatgacgcagtcgaagaaatccacaccacgggccacgccctcgacgatgttgctgggggtccccacacccataagataccggggcttgtccttgggcatatagggctccaccgcctcgatgatgtcgtacatcacctccgtgggctcccccaccgccaggccgccgatggcgtagccgtcgcagttcagcttggcgatctgctgcatatgccagatccgcagatcccgataggtagccccctgattgatgccgaacagcatctgatgagggttcaccgtatccggtagggcattcagtcggtcgtgctccgccttgcaccgctccagccaccgcagggttcgctcacagctggccttggcatagtcgtactgggccggattttccacgcactcgtcaaaggccatggcgatatccgagcccagatgggactggatctgcatactctcctccggccccatgaaaatgcggtggccgtccagatggctggcgaaggtgacgccctcctccgtgatcttccgcagacccgccagagagaacacctgaaagccgccggagtccgtcaggatggggccgtcccaccgcatgaaccggtgcagtccacccatctgccgcaccacgtcatcgccggggcgcaggtgcaggtggtaggtattggacagctcgatctggcatcccagctccttcaagtcgaaagcatcgatgccccccttgatggccccctgcgtacccacgttcatgaacaccggcgtctgcacctcgccgccgtgggcgcaccgaaaacggccccgacgggcggtaccctccgttttaatgacctcaaacatggaatttctcctttatcatcgtggttatacttcccctatcttaccagattgcgccgtcaagtcaagagagagataaaaaggttgaagcggcgggaaacgtatagtataatatatgtcacggaattttcccggaaactacggaagaaacaggtcattttctatgaaaaccagtgattttaattttgaactccctcaagagcttattgcccagacccccattccccggcgggatgcctcccgcctgctggtgctggacaaggataccggtgcatgggaacatcgccacttctacgatctgccggactatctgcggcccggcgactgtctgatcctcaataactcccgtgttctcccggcccggctgctgggtcatcggctccccggcggcggagcctgtgagatcctgctgctcattgaccggggtgagaacacgtgggaatgtctggtgcggcccggtaagaagctgcgcaccggcgcccgtgtctccttcggagatgggcagctcaccgccgagatcaccgaggagctgcccggcggcaaccggctggtgcatttcgagtacgagggcatttttctggaggtgctggaccgactggggaaaatgcccctccccccctacatcaaggaggagctgcaggaccgggagcgctaccagaccgtctactccaaggtcaacggcagcgccgccgcccccaccgccggacttcacttcactccggagcttctggagcgtgtgcagacaatgggtgtaaaggttggatacgtgacactccatgtagggctcggcaccttccggcccgtgaaggaggacaccattgagggtcacgagatgcacagcgaatactgcgtcatcccacaggaaacggcagatctcatcaacgagaccaagcgcagcggcggacgggtcatctgcgtcggcaccacctcatgccgcactgtcgaaagctgggccgccgaggacggcaccatgaccgcctccgccggttggacggacattttcatctatcccggctaccggttcaaggtgctggacgggctgatcaccaacttccacctgccggaatctactctcatcatgctggtatcggcgctggcgggacgagagcacgttctggcggcctatgaggaggccgtccggcagcgctaccggttcttcagctttggcgacgccatgttcatcgccagcggtgcggtgccgcaggcgtgagtatatcccctttgatacgcataaaaaatctcccttcgatagctgggtgtatgtaagacagtattgcgctaagattgacgaagcggcacgaaaccgcatgaagctgatcgtg

SEQ ID NO: 12349 - DNA, 29942 bp, Unknown
  gut microbiota DNA sequence
atatttcagatgctgaaaaaatatattccgccgattgcatgccttgataatggcgctgcggctgtcactggtgaaaaacagcacgccgatgtcggagcgattcgtttccacatcctgcagcacctgatccatgtttccctcaaaatagcccagatgatatttttgattcttaggctggcatacaatgtgctcaaaggcatcgataccggagacatggtgcagggaagatacgcaaaaatactcgcactcccccttgtggtttttatacttgtcatccaaatcctggtagatatttgtcagcagctgtgtgtccttcaggaatgcctctccctggcgcgtcagcgatatgcccttactggttcgctcaaaaagaaccataccatattcccgctccaagtttcggatcgactcggatagactggattgggagatgaacagcgactctgccgccttgccgatagagcctgccttgctgacggcccggacatatagtatttgctttaatgtcatcgttttcacctcatacttgcgctgctgtcgcagatggagacctctcgccactgtttgccccaaccgacaccgctggaatggtaattgtgggacatctccctgattttagcagcattcttgttaaaaagcaacctccaacattataaattaacctccccaaaaccctgtttttacctgaaagccatcggtcttaccgatggctttgcatcgcttatttgttcttcaaattctacgggtgctggcgtataatgagttcacgcaaaataccacccatggaaaagaaccggactgcttgtccgtatcaaccaatggagggagcgaccctgaaaggaggagcctatgatagccgaacacacgcaaaccgccaccgaggcccccgttgttttgcagtgtgttgacctgtgcaagtgctataacggtgtcgtacaggccagcgatcacatcaatttcaccttgcgccgcggcgaggtacacgcctttctgggggaaaacggtgcaggaaagagcacactgatgaaaatgctctacggcatcgagcagcccgatgagggtcagatgttcctttccggcgagccagtggtgctgaaaagccctgctgacgccattgcccacggcatcggtatggtacaccaggagctgatgctgattccgcacctgacggtggcggaaaacattaccctggggcaggaggtcaggaccagaagcggacggctgaaaaagcaggaagcgtcacgcagtatccgggagctggccgcttcctatggcttagatatagaccctgatgcgctggtggacaaactgaccattgggcagcgccagcgagtggagatcgtcaagctgctgtatcgcaaggcggacattttgattttcgacgagcccaccgccctgctgacgcctcaggagtccgatgcgctgtttgatgtgctgcgccgcctgcgggagctgggcaagtccacaattttcattacgcataagctgcgggaggtctatcaaattgcagaccgcatgaccgtgatccggcagggccggatcatcggcaccaccacccctcaggaaaccggtatggaaaagctgacgcagatgatggtgggcaaaacggttcccaccgggcgccgtcggccccaccccattggggaggaagcggtgctgcaggtaaagggcctcagcgtgcagcgccgtggcggcgccgctgtgcaaaatgtcaccttttccattcgctccggcgaggtgctgggcgtagcgggcatcgagggcaacggacagacgcctctggcgcaggcccttctgggcctttgccgctcctcctccggcagcattctgctggacgggcgggagatcaccggccgcacaaccaagcagattcgcgatgccggcgtgggcagcattcccgatgaccggcaaggcatgggcctcatcctcagtatgcggctctttgaaaatatgctgctgaatgcctacgacgaaaagccctatgccaaaagcccactgctggaggactgggcggccgcccgccgtgatgcgcaggctaagatcgccgattacagcattgtggccaccaatgagtcggttgtggtcggcaccctctccggcggcaatcaacaaaaaatcgtcgtcgcccgggagcttgaccggggctgccggatgctcattgccgcgcagcctacccggggcgttgatatcgcctcggcggattacatccaaagccgcattttgacggcggcggaacagggctgcgccgtgctgctcatttccagcgatttggacgagctgatcaaggtctcagaccggatcatggtgctgttccgtgggcagatcatgggatttgtggatgcagacaatgccacccgtgaggccttaggacgcatgatgctgggcgaagcccactgatcgatcctttattgatcctgccgccgattaaacggcagcttagaactaaccaaggaggaactaagatgaagtttacaaatgtgaaaaagtggctggccatgttgctggtggtctgctcgatgctgtccctggtggcctgcgggaagtccgacaaggatccggcaggtgacgattccgagaaaggcaccaaggtcgccgttgtgttcgcctccagcggtctgggagataagtcctttaacgatgcgctgtatgacggcatgaagaaagcggagagcaccatgggcatccagtgggtatattccgagcccaaggatgacgccgagtacgagggcctgatatccggctatgccgacaacggagactgcgacctcatcatctgcctgggcggcagccagagctccagcctggaaaatgtggcccctaactatccgcagcagaagtttgtgatcctggacgctgtggtggagggtgacaacatccgcagctacacatggcgtgatcaggagctgggctttttggccggcttcctgggtgccagcctgtccgacaccaatactctgggctttattggcgcccacgacatccccctgtgcaatctgggcgctgccggtatgatcgccggagcccactatgccaaccctgactgccaggtgctggtggactatgccaacggctgggcagaggtcaacggctgctatgagctggccacatccatgcatgagcagggcgccagcctgatataccacaccgccagcgccggcggcctgggtatcctcaatgccggcaaggagaagaacttcctgaccgtcttctttgacggcaacctgaatgcggacgccccccagaccaacattgccagcgccatccgggacttccccgcttgcgcccaggaagcgattcaggatgtcattgacggtaagttcaccgccggtgccattgaaaagggtctggcagaggacagcctgtatctggattttgacggctctgcctatcagatccccgctgatgtgatggagaagtacaatgcagcggtggctgccatcaaggacggcaccatcgtggtccccagcaccattgaagaagcaaaggtgtggaaggcggcgtaaatccaacacggggctgaaggcctatctggccttcggccccgcgagactgtcgaaaaaccctccgggtttttcgacaaaaggcttgcagtctgctgcgtgcataatttgcccgtccgtgacggacaaattccacactggcagcctgagaggtattttctctcacgcacatgtcgcgagagaaaatgattttaattttttgccgcctgcgggcggcaaactctgcgaggctttttttgacacgctgacggggctgaaggcctgcctggccttcagccccgcaccttatcggcagagacatatcatctgcgcaaggagggacactgtgaaaaaaacaaggattcgattgtcgctgttttcgttggttctggcgctggtgctgttcggtctgaccatacggcttaccggacgggatcctctggtcgtatactggaacatactgaccggctctttcggcagcaccaagagctttctgaatgtgctggcatatatgctgccgctgatcatgaccggcctcggtgcggcggtggccttccagagcggtgttttcaacatcggcggtgagggacaggtgctggtgggcggactggcctccgttattgtgggcctgacggtgccgctgccggcgccgtggggctggctgctggcgctgctggcgggctttgcggccggtgctctgtgggcactcctgcccaccctgtttgccgggcgaaacctgacctcactgtccgtggccaccattatgatgaactccatcgccgcactgctgacggagtatattgtcaagagctattttcagcgtcccggcgccagcaacacggagaccgtggttgtgaacgagggcagcattttgccgcgcattttccccagcacgcagtttaactacggcatccttgtggcgctattctgcgtagtcgttgtaacctggatgctgtataagaccccttttggcttttccctgcgggccatgggcagcaacccccgtgccatgcagcaggccggactgccgatctatggccggacgattgccgccatgtgcatcagcggcggcctgtttgctctgggcgggtccatccagtgcctggcggtatataagcgcttcgtcatgggcttctcccccgggtacggctgggacggcattaccgtggccacccttgccatgaattcgcctgtgggcgtgctgctgagcgccttcctgtttggaatgctgcgctccgcctccatcagcatgagcctgaccagccaggtgacaacggagatgatctccgtgctccagggctttatcgtcatgctggtggcctctccggatgtgtggaatgtgctgggccacctgtggcagcggctcaagggctgtgtcggccgaggccggaaacaggaaggagctgctgaataatggatttttggatctcatttgccaacttttttgcctctgccatccggctgaccgcacccattgcactgggcactctggcctgcaccatcagtgagcgggcgggtgtcatcaacatcggcattgagggttccatgctcttcagcgggtttctcgccgccgttggctcttactatacgggcagcccctgggtagggctgctgtgcggctgcgccgccggtgcatttctggcgctgatcctgggggtgctggccatttactgcaacggccagcagatcgtgatcggcatcggcctcaacctcttcggcccgggctttgcctatatgctgatgcgcgccctgtgggacaccaccggcatctccccgtgggttgagggctttcaggccgtgaatattcccctgctctcccgcatccccatagcgggcaccatgctcagcggctacccggcctgcatctatctgggtctgctggcggtggcggttatgcagtatctgctgcatcgaaccgcatggggcctgcggattcgtgccgtgggcgaaaaccccgccgccgtggccacgctgggcatcaatgtctaccgcctgcgaatgcgtgcggtgcttctgggaggcgtttttgccggcatgggaggcgctgtcatgtgcctcagctctgccaatgtgtttgtcaatgatatgtccgctgggtccggctttatggcctttgccgccaaccagttcggccagtggtctcccgtcggcggctatcttgccacgctgctgtttggcgtgatgcaggcgctgcggatgcgcctgcagagcttcggcatcgccacgcagctgacccagatgctgccctatctggccgcactgatcggcatcaagctcaccggtatgcggatgcgggcaccggcggccaatggcaccccctacccccatccgctctccgctccctgcctgcgccggaaaagcgccggggaatcacagtcgaaaggatcgaaggcatgaatattacatttcacgaatgcagatatattctgcacctgaaggattatgacagcggtgtctttttctaccgcgaggtactgggcctgcagcccaactataactggtccatcgtccccgatcagaagggctaccgcttctacatgggcagcggacggctggagatcacccagatcccctttaccccccggcagggacacagtgagtttttggcccagtgctccgatctgtctctgtgcatggagcggattttggaggaaatgccccacatcgagatcctctctcaggatgcccggcaggtaaccctccgggacaccgaaggcaatctggtgcatctgctgcaggacgacagcccctgcagcggcggcgatgtggataaaacggatatgtttaccggcacctttaccggcgtgctttatgaggatgatttggcggcggcgcagagcttctactgcgaccggctggggcttccgctgctggagcggcagacagatgcgctgctgctccgggccggcgatgcacagctgctgctgcgcaggcgtccggcaggctgcaccctgggtccgtctatgatcggtctggaggccagcagcgtcaataagctgtacgaccggttcagccaaagcccggactataaggaggccggggtgctgcgtgacacggactttgatgcacggcggctgttccaaatgtacgaccccagcggcaatgtggtggaaatctacgcctatctgcgcaatgtgcgagaggaaattttgatgcactgatgatagaaaggggaaaatatgtggcgcaaagaatacaggatcgtttattattcctgggagtttgacaccctgcagtccttttatcgggatctgctgcgtctgccccagatgtatggctggtacaccagtccggtggatcgcggctgcaagttcaagatcggagacaaccgcttggaattgatctgccgccatcccactctgccccagggtcctgcgggaatgcggttagaggcaaaggacattgagctgtgctacaccaacctgaaaaaggagcctcgggtcaccgttatccgccccctgcagtctcatccgtggggcgaatacagcttctgcatcaaggaccccgtgggcaactgggtggaggtctaccagcgctccgagcagtatcggcccatgggggccgatgacggcggctgctactttaccgatgagtataccgccattcttttcgcggaggatctggagaagatcaccgccttttaccgggattccatgcagatgcccgtggtcgcctcctgggatcggggtcccgaggatcggggctgccgcctccgctctgccggcggctttacggatattcggcaaaagacggagaacacgccccagggtcctgcgctgaccaccattgaggccgaggatgtcaacgcctgctttgcgtggctggagagccgtgacgatgtggaggtgctgctggggcttaccgacacctggtacggcgaccggattttccagatctgcgatgaggaaaagaatgtggtggaggtgctggcctatcgccgcaatatgaaaaatcgggacacgctgccgcaagaggatccgtcatgagtgagaggatactgattcgaaacgcggatgctgtggtgacctgcgatccggcggatcgggtgctctataacagcgacattctcatctgcggcaaccgcattgaagcggtggggagcaaccttgccgccggtgacgcccagatcattgacgccgcaggcaagtatgtttaccccggccttgttaatacacaccaccatttttttcaggcctttgttcgcaatttgatgacgattgaccgctcggggctgacgctgatgcagtggctggatgacatctataaggttttcgtccgtatcgacggggatgtgattttctatgccagcgccgcctgtatggcagaccttattaagcacggctgcacctgctcggtagaccaccagtactgctacacaccggccaccggcaagcagggggtggaccggcagatggaggccgcccgtctgatgggctttcgctttgtagccgcccgcggcaccaacaccctgccccgctggaagggcagcaccattcccgatgagatgtgcgagacaacagcggagtatctggacgactgccagcgtctgctggcgctctatcacgacccggagcctttctccatgcggcaaatcgtgttggccccctgccagcccatcaactgcaccgaggacaccttcctggagaccatacgcctggcccgcagcgccggtgtccatatgcacacccatttgtgcgagggggaaaacagcagcatggtgcgccgcttcggtgtccgctctctggaatggtgccgccgcatcggctttgtcggcagtgacatttggctggcccatggccgggaaacgctgccggaggaatatgctctgctggcggaaaaccacatgggcatttcccactgccccgcccccaccatgctgggcggcagcgagattttggacatccccggtatgcgcaaggccggcatacccataagcctcggcgtggatggctgcgccaccaacgacggctccaatatgctggataccctgcgcctggcatacctgatgcagacctttctcagcaaaaagcggggcggttgtccctccccctatgagatgctgaagctggccactgtggggggcgccgagatgatcggacgtccggagctggggcagcttgccgccgggaaggcggcggacctcttcatgatcgatgcccagcgtctggagtacgccggtgctctccatgaccccgcatccatgcttgccaagctgggtgtcaccggccccgtctggctgaccatgatcaatggccgtgttgtttatcgggacgatcatttgaccggcgtcgacgaggcgaagctgctgcaagagggcgagcaggtctgcacccgtgtgctgcgggatacctgcgaggcctttgcaccctatcgccgtaatccacaataggaggaaaggaacatgtcatatctggactttcagctgcttctctatgtgccgtcggagcagtatgagccttgccgtaccttttacgagcaggtatttgcgacacaaccgttctatggctgggacgaggggccggaggaccggggcgttaagtacgatctcgccggcacaaagctggtgctgctgacccaggaaaatccgttcccaacctacggcgccgtacatttccagctgcaggtgccgactctggaggatatctatccccgggcgcaggcagccggtgccgtcacccaggagcctttcttccgcccctacggctggcatatgttccgcatggcggatccggcgggaaatcacatcaatatttatacggtgccaaccaccaccgaataaagcgcaccgaaaccgtaaaaattaaaggatgctcttcacgcccggaattaaaaagggaggcagcttatgaaacaggaccgtctcgtaagccgcctcccttttttcgtttttaattgccaaggttcacggcatcacccgacgggccatgcggataaagtcctccttgccgaaagtcaccggcaccgggtatacggggtcagcctccgcccaggcggccatttgaggcaggtcctccgaccgaatacagggaaagcactccggaatgcccagcgcccggttcatgcggtaaatggcctctaccgcctgccgggcaaggcttcgggtctcccgggtgttataaaagtggccgatgtaggcctccaccgcatgggtcagggcgtctaggccggtctccgccgtaacgccgtggaagctgctccgggccgggagcctctccgccatggtaataaattccggtgcggcgcattggcggcggcttgccacgatcatgggctctttgcacctggcgtccgccagcagctccggcagcctttgcaggctcccggctgcggtgatgcattccggcctgcgtcagggaagtacccgggcctccaggccgaagcaggcctgaaacgcccgacagtatattttttaagcagcataatgcgtacatcctttccatggactattacgccgcattttaggcgggatcgcaagacggaatggggagatggatattgtaggagcggacggctctgtccgtccagtgcgataacgcaacattttgtagggcaggacccgtgtgccctgccgggagtgggggggccgggcagcggggtgagggtaccccgccctacacaccatttaccgatagaatttcacaaggggcggcggccgcccaccgtcgtgccaaccgattcccggccactgtcgtgcccgttaattggggacactttctcgaaattaccccgcttcgctgcatatcttgttatgcgttgtagggtgcgatgtgagcatcgcgccgcacgatagacgcagagggcattcctgttatgccaaggcgacacaagcgggtcgagcgctgcggtggatagaatctaagacaatgcaaaagcatggggcgtttgggctcaaatcaaaatctccggataagccggaggtttgacgcggccctataagggcctattgcggacgaagcccttaaggggttttatttatgccttgggattcttactacccgtaaacgagtctataaattcctttatgctaatctggtcagacattttgtcctccaactggttctatgtacgccttgatcgctttcttgttgcgtcctgccgtatccacaaaatgccctcttgcccaaaagtgtctattcccgtacttatacttcaggttcgcataccaatcaaatatcatcatgctgctctttcctttcaggtatcccatagtctgggatacgctgtacttctgcaggatgcttatcagcatgtggatgtggtctttctttactctaactcggagactttttgcttgtcttctttgcccctcgccataggctatttttccccccggcagagccgggggttgtctttggttgccaatacaagaagaaggccctcggcaatgccgggggccttcttcttcacagtatctgtttgcggttaaaatccgtcgcacagcttgcgccgttaaggctcgtttgtaaaaatacaccctgcttacaggtgatacgctcgctcttagaaatgggaatccacgtacttattgtacttattgagatccatttcatccttgtaggtattgcggaagcgctggacggtaaggctgttgaactggatgatattccggtacttcagcacgcccgccaccagagcgatgcagccgcagatatagcccatatccacccgtgtgcaggtccagcccagaccagccagcaccagcagggagatcaggacgccggccacctgtttcttcggatgcaggcggcgcaccgtctcctccttcaccacgccctcgtccaccatgaccttggcgaagcgcttctgcacggtgaaaaggctgatggcgttgagcagcatgggggccgccacgaagaaggcgaacagagcgatgatggcattatagacgaataccataaagttatcattgttcaaaggggagttcctccttagatgaattttatcgccagcgggcttggcccggaggtcacggacagatcaccacgggaacatcgtcccgctgggtggcatagagtacgtggctgtaacacagccggaaggacaggacatcccccacctgcaccggctggggggcgtcggtcacgtccagaatacagtgatccgaggagccgccgatgacggtgacgccgggcatggtgggccggagcgtctccatgtcgcctacgtcggcccggcccaacgccagaatggcacggagtcggaggccacgatcctcatagacaggctttcggccgaaggcgtcggcccccagctccccttggggataggtgggcttctccttcacctccaccacctctgcctccagacggaacacgtcgtcccggaggtagtctgcatcgtagatgccccaggaatcggcaatatcctgcgccgtcagaatattttctccgatccgtaggtggttgatgccggcgggcatggtgccggtatggatcatgggataggagctggtggcgccgccggagactatctccagcgggtggccgatggcgtcctccacccggcgggcgatggccagcagcatctgcatcttctccggcgtggcccgcacagagccgtagcagctgaggttcacgcctacgccggacaggtggacatggggcagtcggcgctccacatacaggcaggtctgcaccatttcctcgtggtcccagtagccctcccgcaggtcgcccagatccgccatgatgatgacggcgtgggacttctcctgccgggtacactcctgctccagcaggtccagagtcgtgcgctcgctttgcagcgacatttcacacagccgtaccagctccggcagctccgtggggccggggatacggatcagcagataggggccggggatgcccgcctggcggcagcgctccacctgctccagacgactggttcccaactgcgtgacgccgcattcccggaagcggcgggccacctccggcaggccgttgacgcccttgatgacgccgcagacctggattccgcaggcggcgcagcgggagatagtctcccgggcgttgctgcggaaggacgagtcacgcaataccagtctggggtattgacggttcatttccattcctcctcacacctgcggcccaaagccgtcaggttgacaggaatagtttaccatatccggcggcaaaatgccaccctcattttgtgcaagctataaaaattttaatagtggggcggcaccagccgggccttggtcagggccaccaccagtgtgggcagcagggccagctggatgagggtgccgggccacgagatcagaatgtgggcggaaacccacgccgccatggaccagctgccggcggggaaggtcaatgccttcaccacgcccgccacgatgcggccgcaggggatggcgcagcacagggcgatatagaggtcgccgtagagccgccccgtatgcaccagacgcatcaccagcgccgttaccagaccgtagaccgccagctccgccatcatggagggcagtatcgccgtcggaggcatactggtcagtaccgacgacagcatcgggcccagcaggccgcagaccacgccgtagggccatgtacagaccagaccacacagcagcacggggacgtgcatgggcaggaacacggtgccggagcccagcgcatgaaaggccatgggcagcaccacgcacagtgccacacagatggcgcagaataccagttttttcgttgcagagagctgcatgggaagcttcctccttggggctcggtatgatttataatatattataagtgggttttgccggatttgcaagagcgtctcttgacaaaaccggcggtggggattacaatgcagtcgttccagaggtcgcctgcgggcggcttggtttctgagatacagttagataacattaaccaaaaggagtggaatccatatgatcgagacaacggtgaaggtagacggcatgatgtgtgggatgtgcgaggcccatgtcagcgatgccatccggggcgctctgccggtgaaaaaagtcaccgcctcccacaccaaggggcaggcggtgatcctcagcgaggcgccgctggacgaggaggccctgcgggccgccatcggcaagaccggctatgaggtgcagggtgtcagcgcccggccctatgagaaaaagggattgttcggcttcctgaagaagtgagctacatccgcttgatctcctccaacagcagatcgatgtccagctcgtccggcttctcctcctgagagaccggggcggcgggggccggtgtttcccggacgggcgatgccggcttttctgctgccggaggggcgggctttttctcctccgcaggcgggggcgtgggagccttctccggctgcggagcagacttcggggcggcgggctgctgcggggccggacggtggggcatgggcggcacggcggcctcctgctcctcacgggccatctggcgcatcaccacacgctccccctcccggaagccacggcgatagccgccacggcgagccaacaggcagaagatcagcaccaccagtaccagcaccagcgcaacgggggccagcagcggcagctgccacggcagatggggcacggtgatgggggtcagcagcacccgccacagggcggcaagcggcgagcttacactggtgcttgccggggcggcggcatcgacggccagtgccgtctgcggcagcaggaacagtcccgccagaccaaggcatacttttttcatccgtgccactccctttccatacaaattctccgtacagtataccacgcacgccgcccggctgtccacgctccggcggcgattttttaaggaaatatgaaatttgtcgaaagtgagtattttccggtagctttccgccgccgcttcccgtataatggagacaatgaatccgggaggtacgtccatgcaagctaccaaggaaactgttcagaagcgtccccacaccgccctgtggatcatcctgtgcgtcgtgctgctgtgtgcggtcggggcggcgctgtatttctgccggtgggcggaaaagcccctgacgctggcggagggctatgtggccgccgaggggctgacggcggacatcaccgacggcgagggggccgtcctgtcccagccggtacgggggacgaaggtcacctatgtggtggaggacgaggacaaggatcatcccggtctggtgcggctggtgctgggggaggacagcttcggctatctggcccgtgagcagctggtaacggatcccaaggacgtggtggccacgaaaatcatctatgtccgcacggcggtgaacctgctggatgaagcgggggccgtgccggggcggctggtgcagaagggagaggccctgaccgtcaccggctggcaggatatggacgccagcggcgccgtggggcgctggcaggtggagggcggctacattcgggcggagtacgtcaccatggacgagcccagcgccaaggcgcagtacgatcaggaggtctatcagctccacgccgaacgaggggacagttggggcggcggcgacgccgcggggctggactacttcccccgtgaaaaggccgtctttcagggccatcccatgcccggcgaggtgaaggccctgtatctcaacaacgaatccatcgcccaagcggcggaatatgtggaggtggcggactcctgcggtatcaacgcctttgtggtggacatcatggacggcggagccatcgcctatccctcggaggtgatgaagcagtactccccctccgcctacgagagtgcctataacacgctggaggtatatcagacgggcatcaagaccctgaaggatgccggatattatgtcatcgggcgcatcacggccttcaatgacccccatctggcggaggatcacccggagtgcgtcatcgccgatcaggccggcgagcctttgcagatcggcgggatgtactggcccagtgtgtacagccggttcgtgtggcagtacaaggtggagctggggctggaggcggcccgactcatgggctttgacgagatccagttcgactatatgcgcttccccgacggcacatgggccttcgaggagggggccattgactaccgcaacgaaaacggcgagagcaaagcccaggcggtgcagcgattcctgatgtacgcctgcgaccgactccacgacgccggggtgtatgtctccgccgatgtgttcggggagtgcgccgaggcctacgtcaccgcctacggccagtactggcctgccatcagcaatgtggtggacgccatcagcgccatgccctatccggatcactacggggcctccggggactggttgccgtgggagcacccctacgagaccatgtatgccttcggccagaaggcggcccagcgacagctggagacggcatctccggctgcggtacgcacgtgggtgcaggcctacaacgccatccgggagccctacaacacctacggcccggaggaggtaggggcccagatcaaggctctgcgggacaccggcaacaccggtgggtatctcacatggaacggagcctctccgctggggaaatactgggcgttggctccggcatttgattgaggaagcatagaagatggagcctgcggctttgccgcaggctctctgtgtgtccaaaaaagtctttcctgcacgccggggcatttctcagaacttcaaaaagcttccaaaaaatgagcaccaaaaaagccgccctgacggcggcttctttggcggaacaaaaagaaggaaaacgtaaaggtagaaagcaaatgaaaagggggaaatgcgattacttgtgatccacggagtacatatgctcaatgaggcacaggatcttatcggaatagccgatctcgttatcataccaggagaccaccttcacaaaggtgtcggtcagggcgataccggccttggcgtcgaagatagaggtgtgggtgtcgcccagaaagtcggaggaaaccacagcctcgtcggtataatccagaatacccttcagctcaccctcggaggccttcttcatggcggcgcagatctcgtcgtaggtggcaggcttctccagattcacggtcagatccaccacggagacatccagcgtggggacacgcatggacataccggtgagcttgccgttcaggctgggaatgaccttgcccacggccttggcagcgccggtggagctgggaatgatattgccggaggcggcacggccgccacgccagtccttcacggacacgccgtccaccgttttctgggtggcggtggtggagtgaacggtggtcatcaggccgtcggcaatgccgaagttatcgtgcaggaccttggccacgggagccagacagttggtggtgcagctggcgttggagacgaaggtcatgtcggaggtgtaggtgtcctgattgacgcccatgacgaacatgggggtatcatccttggagggggcggacatcaccacgtgcttggcaccggcggcgatgtggccggcggccttctccttggtcaggaacaggcccgtggactcgatgacgtactcggcgccgatctccttccagggcaggttggcggggtcacgctcggcgtacacggggatgctgcggccattgacgataatgcccttgtcgctggaggacacgtcggcctggaaccggccgtgcatggtgtcgtacttcagcatatatgccagatagtcggcagggcaaaggtcgttgatgcccacgatctcgatctccgggtgctgcaggctgcagcgcaggaccatacggccgatccggccaaatccattgataccaactttaatgctcatcacgaaaacttcctctctgacggaatatatcaaacatatggtatgtttagtattatatgcacctgccgcaaaaaaatcaagccttttttcataaaatttttttcttttttcaaatccggggatatgccttgtttttcaacaggaaccctgctataatgtgttgaatttcaccactgccgttgtgctggagaaagttggcggggatacttccccccgtttcccggcatggtaaagaggaagggggcgatggccgtggagcatcaagaggacagccagatcctgctggagcagatcatgccgcagatcgcagcgcagctgcggggagccatgggcaacatccatacagcgctgacccggctggtgccggaggagatgccggagggcgaaggctccaccgggcagagcgccgccatcctgtgccagagctactaccggctgctgcggctggtaaacaatctctccgccgcccccctgatctctcaaacagagccgctggagacgaagaatgtggagctggtggcgtggctgacggagctgatgcactgcgcccagccgctggtggcccatgccggggtgaggctgaccctgcggtgcagcctgacggcccatgtggcggccatccaccccagctatctggagcggctgttgtggaatctgctgtccaatgcggtgaagtacacgccctccggcggcgaggtcacggtgacgctgcgggccgcagcgggacaagtgctgctgacggtggcagacagcggcgtgggcatccccccggagcagcaggcgcacctcttcgacggctatctggaaaagctgcggatgccgcctcccccacagggtctggggctgggcctgcccctgtgtcaggccattgcccgtggtcacggcgggcggctgctgttgcagtccggcccggagggtaccaccgtaacggtgtcgctgccggatcggcgctgcaccaaaacggtgttgcgggagccgcccttcgcctacggcggcggctttcatccggtgctgctggggctggcggatgcgctgccctatacggccttcacccggaaaaatctggactgacggccccacatatgatattaggatccccgctttggcgggaaaggatacacgaggaaacggtgcatggagaaaaaacgagttctggtggccatgtccggcggagtggacagctcggcggcggcgcttctattgcagcagcagggctacgcctgcgacggggccatgctgaagctgtacagcggcgaggtggagggtacctgctgctccgccgacgatgccgacgatgcccgcagcgtggcctatcggttggggatgaagttctacgtattcaatgagacggaacggtttgcacgggacgtcatggaccacttcgtggcggaatactgcgccggtcacacccccaatccctgcatcgactgcaaccggtgcctgaagttcggagcgctgctggagcgggcgctggtgctgggctacgactatctggccacgggccactatgcccgtgtgggctacgatccggagacggggctgtaccggctgctgcggggccgggaccggcggaaggatcagagctatgtgctgtatcagttgacgcagcaccagctgtcgcacctgctgctgccggtgggggagttcgacaagcccgccatccgggagagcgcccgtgaggcggggctgctgaacgccgacaaggcggacagtcaggatatctgttttgtgccggacggggactacggccgcttcctgcgggagtatggccatgtggagatgacgcccggtgactttgtggaccgggagggccgggtactgggccgccacaagggtctcccctgctacaccaccggccagcggaaggggctgggcgtcagcgctgggagacacgtctacgtggtgcggaagaacgctgccgacaacaccatcctgctgggggacaacgaggagctctatgcacgggagctgacggcctgccgggtgaactggatctccagcacggcgccgacggagcctgtcgccgtcaccgccaagacccggtacagccagacggaggcggaggcggaggtcacacccctgccggaggggcggatgcgggtggtcttccgccagccccagcgggccatcacctccggacaggccgtggtgctctacgacggggatacggtgctgggcggcggcgtcatcgaagatcggtgaagattttcccggatttccgggaaatatctgttgacaaacaccggcgcatgtgttatatttattcttgcttgtcgagcttatcgatatggcggcgtagctcagttggctagagcatgcggttcatacccgcagtgtcaccggttcaaatccagtcgccgctaccaaagcccggagagatgtaccacgtctctccggggcccctcaagggtttatccggcccgttggtcaagtggttaagacacggccctttcacggctgtaacatgggttcgagtcccgtacgggtcaccacaaggcaactcgtaagggttgccgaatagggaggcttagctcagctggttagagcgcctgcttcacacgcaggaggtcactggttcgagtccagcagtctccaccacatatgaaaaatccgaacttcttccctatcgggaatgcgttcggatttttcatttttatcaaagataattcctactgatatttacgcccggaggaattttgcatcctccggacattttttatccgcatattcgatttctgccgttaggaatgacggccatcaataaaagaacatcatctcttttgtggacggcaatggacactatcggttaaaccagccgcaggacgagcggtccgccctcacgagcgcctcttcccttcgatccccctatcccaccaacaaatcccccttcccggcacagagcaccgggaaagggggatttttgatccatccgcagaatttttcatgttcccccttgacaattcctttgtcttaatgtactattgtcatagtacaagcgaactgataggtggggcagcgagaatgtcgagatgtgactgctccgatccatcggcagcacaggcaaaggaggacgcctatggaatgggatatccgcaatgaccagcccatttacacccagctgatccaacaggtgacgctggccattctgtccggcaccttcccctgcggcggacggctgccgccggtgcgggagatggcggcggaggccggggtcaaccccaacaccatgcagcgggcgctggcggagctggagcgcacggggctggtctacacccagcgcactgccgggcgctttgttaccgaggacgctgccgtcatcgacagtgccaaacaggagctggctcatcagcaggtcggggcctttctgcgccgtatggagcgcatgggctacgaccgggagcaggccgcccagctggtgcggtcttggaaggaggaagcataagagatggctattttagaatgtaaggacctgaccaaatattacgaccggactctgggtctggaccacctgtccctccagctggagccggggcggatcgtgggtctgcttggccccaacggcagcggtaagaccacgctgctgaagatcgccaatgggcttctgaccccctcgtcggggcagctgctcatcgacggcaaggcccccggcccggacacccggaggctggtatcctatctgccggagcgcacctacctctccgactggatgacggtggtgcagctgctggactttttctgtgacttctacccggacttcgaccgggatgcggcggagcatatgctgacggctctggagatcagtcccacccagcgcatcaagcagatgtccaagggtacacgggaaaaggtgcagctgatcctggtcatgagccgccgcacacggctgtatctgctggacgagcccatcggcggcgtggaccccgccaccagagactacatcatccacaccatcctcaccaacttccacccggactccaccctgctcatctccacccacctcattgccgacgtggagcgcatcctggacgacgtggtgttcatcagccgtggccaactggtgctgcaccagtccgtggaccagatccggcaggagcgtggctgcagcgtagacgatctgtttcgggaggtgttccgttatgctgagtaaattgctgaaatatgagcttcgggcctccggccgcatcctgctgccggtttatgccctgctgctggcctccgccggctgctgcagcctgttttacaagctggcggcagaccatccttaccgtaccggcgccgcctccgtcctgatggggctgctgaatgtggcgttctggattttcgtagtggccaccggcgccatcacggcgctgctgatgatctatcggttctataagaactacatgaccgacgagggctacctgatgttcaccctgccggtaaaccggcaccagctcatctggtccaagctgctgtccgccctactctataccgccgccagtgccgtggccgtaacgctgtccattctgctggtgctgctgcccattgcagactggtccggcttctgggacaatctgggagaacttctctcctccatcacggagtcccttcatttcggcgttcccggtccgctgctgctcctgtggatcgccgtgctggccatcctgacggtgttctccggattcctcatggtctatgccgccatcgctctgggccacagcttctccaatcacaagatcctgctgtcggtggtgttcttcatcgccttctcgctggccatgcaggcggcggggttgaccttcttctcctatcagctgaccatcggcgagaccgtcatcgagagcggcggcagcgccgacctccttctggacggcactcggttcctggtcatcgattccatcgagacgctggtggcctgcggcgtgttctacacgctgacgtggtacaatctgcaaaagcgcctgaacctccagtaaggctcgtctctggacaagacgcaaaatcagcccgcacggggaagccgtgcgggccgattcgttttcactcctgcgggataccgaagaaccggatgccgttctcccacgtctggcgctccacctgctctaccggcaggcccttcagctgagcgatcttctccgccaccagatgcacatagccggagtcgttgcgctttccccggaagggaaccggcgtcaggtaaggggcgtcggtctccaccatcatccgctccagcggtacggcggcgatgacctccggtgccttccgggcgtttttgaaggtgatggccccgttgaaggacagcatccaccccagcttcaaaagttcctccgccatctccacggagccggagaagcagtggaacaccccccgcaccgccggaaactccctgacgatggcaaggctgtcgccgtgggcctcccggtcgtggaaaatgaccggcagcttcagctcctccgccagtgccagctgccgccgcagcgcctcctgctgcaaggcacggggcgggttctcctcccagtagtagtccagtccgacctccccgatggccaccaccttctcctgctgcgccagctgccgcagacgctctatctgctccggctgaaagtcgtggcagttctccgggtgcagacccacggcggcgtatacatggggaaactccgccgccaatgcgacggccttctccgaggaggtcagcgtgcagccggggtttaccaccagcccgacacccttttggggcagtcccgccagtacctccctccgatccgggtcgaaggcctcatcgtcatagtgggcatgggtatcaaacagcatgggtactctcctttcgcacaaaacagcacaggccgccgcagcctgcggcggcctgtggggtcatattacgcttcctccagcgtcacccgacccagccgggtgtccgccacatattgctccttcagctcccgcagacgggccatgtggggctgctgcaaatggatgcgctggtgggcctgcgtctgccactgctccaccagcagaattttgtcctcctgctgggcggagaaatagtagtcgtagcggatacagccctcctcccggcggatggtgtcggcaatgccctccatcacgatctgacggacgaaggcctcccggcagccaggcttggccgtatagaccacatatagggtcaggggttcgctctcacacatgaccgtttccctcctcaataccgcttgtccagctctgcgatcatggccgcaatggcgttctcccagcagttgggcagaatgtggatgcccggcacctcatgcaccggctgaatggcattggccggggcaaaggcggtgcgggcaaaggtcagcatggggatgtcgttggcgtggtcgcccacgcagtagacgttctcctgccggatctccagcatttgagccagacggcgcaccatgccgcccttgttggcccccttggccgtcagctccagcagataggggttggacggcaccacctcatactcggtgctccagctctggcgggcgatgtactcccgcagggccgtcatccggggctccgcctcctcaaacagcagcttggagatgggagacggcacctcctccatgctggccagcgccaccgtgggggagtgggtcagatgcaggtgatgataggtgatctcgttggggttgatggcgtggatggagtcatcgtcgtgatagatctccagcgccgtctccggcaggtcctccagcaggcggcagatatgcccccggacggactccggcagaaaggccgtgtacaggtagcgctgctgagcgaagtcgtagatggcagcgccgttgaagagcaccgtggggccgttcatgggaacgccctcccgaacccgtgaaaaggacggcagcgcccggcccgtggccacggagaaggtgccgccctccgccatgaagtactccaccgcctcccggttctcccgggataccgagggcagagggccgccgctcttcagcgccccctcggtatacaccatggtattgtcataatcgctggcgatcagaacgcctgaaaactttcccacggctcacgcctccgtcttgggcgtaccgccgccctgaccgcctctgcggcggcctccacggtgccgggggcgcttgttgctcggcccttcgtcctcgatgggccgctggctctcctgacgggacacgggcttggcatccggctggggggtgaagggcttgatggcgctggcgccgggcttgccgctgcgggtacggcggcggcgattgccctcccgccgcttctcctccggcttttccgccggacgctccgcaggacgctcgctgcccttgccgcctctgcggcggcggctgcggcgacggccctcctccggctcctcccggtcggcggcaaagtctgcaatgatggcggggacagggaattcctcctgccgctcctctgtgtagcgggcgggccgctccttggggatctcgatgccctcccggctgcccttgccgttgcggaggacgcacacctcgcagttgtggtagcaccggggagcctccggcttctcatccagccgcaccttcaccgtctccttcaggacgttgacgtcgctgatattaccggggccgtcgggggtctggacaaaggaatcgttcttgggcagacgcttcagtgcgtcctcataggcctcctgctcatatttcaggcagcacatgagccgcccgcaggtgccggaaattttcgtggggttcagagacaggctctgggtcttggccatcttgatggagacgggcatgaaatcgtccagaaactgggcgcagcagaagggccggccgcagatccccaggccgcccagcatctttgcctcgtcccggacgccgatctgccgcagctcgatgcgggcccggaaggcagaggccagatccttcaccagctcccggaagtccacccggccatcggcggtgaagaagaacaggatcttgttgccgtcaaaactgcactccacccgcaccagtttcatctccagcttgtgctggaggatcttcttctggcacacgtcgaaggcttccttctctctggcccggttgcgctccagcactcggcggtcatggtcggtggcaatgcggaccatggggcggaagggctccaccacctgctcgtccggcacctcgtggtttccctcggcacactgggcatactccagcccctgcgccgtctccacgatcacgtgctcccccgccgtcacctgaacgccacgagggtcaaaataataggtcttacagccgcctcgaaagcggacactgatgacttctgtcatatccttcatcctttcgtatcgggatcgtttttccatataggcgccattctgcgcccgaggtcagcgggtggcgtggagcagccgctcccactgggcgcacagcgcccccagcacatggcccgcccccacattataggcgcactcggcgctgtactgccgcaacagggccgacaggccctccagccgccgggaggagaggctccggctcaacagctccgcctcctccggcagggtgccgtcctccggcttccccgcctgaagcagcagggcctgtgccgtcaggagccacgcatcctgcaaaagctcctgcagctgctcccgcttgatgcggcggttctccagcgataccagccactgggccgccgggagggtctttccctgcgccagcacccggcacagccctctggcctgctccatctccggtgtctccggctgtccggccaccttccactccacgcagcgggagcggacggtgggcagcagagccgccgccgtctcggcgcagaacaggaaggcggcgtaggccggtccctcctccacgatcttcagcagcacgttctgatcccgctggttcagctggccgcagtcggcaaagatatacaccttccgggcgccgtcgttggggcggatatacacatcctgccgcagctggcgcaccagctccaccggcagctccttgtgtccgtcgtcccgcaccgtcaccacgtcggggtggatgtcctccagcaccttgcggcactggcggcaccgcaggcagggacgttccccctctccctcgcactccagtgcggcggcgaagtagcgggcggcggccatgcgatctccgctgccggagagaatggcggcgtggctcagcgtccccttggaggccgccgcacggatgcgccgggccagtgtgctgttttccgggatcagctcttccataccgtctctgccctcccctgccataccggatggtcctatgcacccaatataatatcttagtatagcacaaaggcggcaaatgccgcaaggtgtgagtttctgttttttacggaaatatccggcagcggagggccgcccgaagaaaaacgaaaaaaaccggaaaaattctggaatccatgcttgcttttgaagctttttttgctataataaagttgttctcaacattcggtacaactataatgatagatggaggaatctgcatgagtaagaagtattgttacctgttcacagagggcaacgcacagatgcgtgagctgctgggcggtaagggcgccaatctggcggaaatgaccaacatcggtctgcctgtgccgcagggcttcaccatcaccaccgaggcctgcacccagtactatgaggacggccgccagatcaacgacgagatcatggccgagatcatggaatatatcgagaagatggagaagatcaccggcaagaagtttggcgatcatgagaatcccctgctggtctccgtccgttccggcgcacgggcctccatgcccggcatgatggacaccatcctgaatctgggtctcaacgaggacgtggtggcggtcattgcagagaagtccaataacccccgctgggcctgggactgctatcgccgtttcatccagatgtactccgacgtggtcatggaggtgggcaagaagtatttcgagcagctcatcgacgcgatgaaggccaagaagggtgtcactcaggatgtggagctcaccgccgaggacctgaaggagctggccggccagttcaaggccgagtacaagtccaagatcggtcaggacttccccaccgatcccaaggagcagctgctgggtgccattaaggccgtgttccgcagctgggacaacccccgtgccaacgtctatcgccgtgacaatgacatcccctactcctggggtaccgccgtcaacgtccagtccatggccttcggcaacatgggcgatgactgcggcaccggcgtggcctttacccgcaaccccgccaccggcgagaagaagctcatgggcgagttcctgaccaacgcccagggcgaggacgtggtggccggtgtccgtacccccatgcccatcgaccagatggccgagaagttcccggaggcctatgcccagttcgtagaggtctgccacacgctggaggatcactaccgggatatgcaggatatggagtttaccgtggaacacggcaagctgtatatgctccagacccgtaacggcaagcgcaccgctcccgccgctctgaagatcgcctgcgatctggtggacgagggcatgatctccgagcagcaggccgtggccatgatcgatccccgcaatctggataccctgctgcatccccagttcgacgccgccgctctgaaggccgctacccccgtgggcaaggctctgcccgcctctcccggcgctgcctgcggcaagatcgtctacaccgccgaggatgccaaggagtgggccgcccgtggtgagaaggtggttctggtccgtctggagacttctcccgaggacatcgagggcatgaaggccgcacagggtatcctgacggtccgtggtggtatgaccagccacgccgccgtagtggcccgtggtatgggcaagtgctgcgtctccggctgcggcgccatcgtcatggacgaggagaacaagcagttcaccctgtccggcaagacctatcacgagggcgactggctgagcctggacggctccaccggcaacatctacgacggcgctatgcccaccgtggacgccagcgtcagcggcgacttcggccgcatcatgggctgggccgataagttccgccgcctgaaggtccgtaccaatgccgacactccccacgacgccgccaaggcccgtgagctgggtgctcagggcatcggcctgtgccgcaccgagcatatgttcttcgagggcgaccgcatcgccgccatccgtgagatgatctgctccgacaccgtggaacagcgtgagaaggctctggccaagctgctgcccatgcagcagggcgacttcgagggtatctacgaggccatggagggcaatcccgtcaccatccgtttcctggatccccctctgcacgaattcgtccccaccgaggaggccgacatcgagctgctggccaaggatatgggcaagaccgtggccgagatcaaggccatcattgcctccctgcacgagttcaaccccatgatgggtcaccgtggctgccgtctggccgtcaccttcccggagatcgccgtcatgcagacccgtgccgtcatccgtgccgccatccatgtccagaagcgtcaccccgactggaacatggtgcctgagatcatgatcccgctggtaggcgaggtgaaggagctgaagtacgtcaagagcgtggtggtcaagaccgccgacgaggaactggccgccgccggtatggagatgaagtatctggtaggtaccatgatcgagatcccccgtgccgccctcaccgccgacgatatcgccaaggaggccgagttcttctccttcggcaccaacgacctgactcagatgaccttcggcttcagccgtgatgacgccggcaagttcctgggcgcctactacgacaagaagatctacgagaacgatcccttcgccaagctggatcaggtgggcgtgggcaagctggtggaaatggccgccaagctgggccgtgccacccgccccgacctgcatctgggcatctgcggcgaacacggcggcgatcccagctctgtggagttctgccaccgtgtgggtctggactatgtgtcctgctcccccttccgtgtgcctatcgcccgtctggccgccgctcaggctgctatcaaggatggcaggaactaagccacagcttcttgcagttcgctgaatttacactgacgattgacgatgcaaaggaatatgtgtattccttgtcaaccaagcgccgtgtgtataactggaacgacattcgagtaaggctttatatctgaaacgactccccgattacagaaatgtagtcggggagttttttgctttctgcggtccgcacattcgtaaatgagattgtcctttgctacaatgtaggcataaggaggtcaagaactatggaaaagtacaaatttgatgaaaacaacggactgtggtacgagttgcagggggattattacttgccttgtctgaaactaccggagaaagaacagccacatatcgggatatggggtcaacggcatcttcggtatctcaagaaacatcatcgtgtatgctatgccaacctgctgaccagcggcaagctgaacagctatcttgcggacattgaccagcaggctgagggaatattcgaacaattggtaagtcagatggctgcggcggagggcataacggagcaactgaaagccaccgaccaaatggcttgggtcggcagaatgaacagcatacgaaatcgagctattgagatcgtaatccgtgaaattatttttata

SEQ ID NO: 12350 - DNA, 293 bp, Unknown
  gut microbiota DNA sequence
gccaagaagacctcccccgccaacatcacctacatgatctccaaccgctccaatctggagaagtgcctgcgggagtccgatgtcatcatcaacggcatcctgtgggccaaggaccgcaaggaccacatcgtctatcgtgaggacctgaagctgatgaagcccggtgccatgatcgtggacgtggcctgcgacgagaacggtgccatcgagacctgccgggataccacccatgatgatcccatctacttcgtggacggcgtgatgcactactgcgtggataacatcccctccgc

SEQ ID NO: 12351 - DNA, 37173 bp, Unknown
  gut microbiota DNA sequence
atatgagcgattgggaaatgcctccggaggaacgacagcaattagatcaggaaacgactgcactctccaaagaactgaacgaaatgcttaatgccaaaaaccgcattgcggaaatcgagcaggagttcttgcagctaaacccggagcagcattattttgaggaatattacgcaagttacagtgacgtgccaatggagagcttggacaagctgtcctcgcagaagcttcttgcgctttggatggaatttgaacagcatgcagagcgtgagactcgtttgggtcttttgcaaaaactctccatcatgtttcgcttcaatcgcaatgcactcaaactgtttctccgctctccagagctggtcattccctatttgcagcatcaattctattctgtaaaaaggggagagttggaggccgaaaagcgggaactgactcgcaagctggagcattatgcttttgatgcgaagatggacgaactcacacagaagtccctgcgactattccgcgcggaattggcagtacgctacccttggaaagggaatcgaaggcgttttgaaaaaagtgattttcgatggaattccaaggagttcacatgcgagtatccggtggtgctcagtacgacctattccatcaaaggaacactgagcatcaatcacacttatgattacttgattgtagatgaagcctcgcaggttgatttggccaccggggtgctagctttctcctgtgcgcgaaatatcgtgattgtcggagatttaaagcaactccccaatgtattgacagaggatgacatccgcaccagcgattctatttggcaaaagtactccttggatgagcggtatcgcttttctacccatagtctgctatcctccgcattggaaatatggcaggacgcacctgttacgctgctgcgggagcactaccgctgccacccgaaaatcatcaacttctgcaatcagaagttctaccacgggcagctgatcgttatgaccaaagaccatgatgagccggatgtgttgaccatgtatcgaacaaccgctggcaaccacgcccgcggacatctcaaccagcggcagatcgatgtaatccagcaagaggctctcccgcggttgcatcagcagaatttcgagagcatcggcattatcacgccatatcgggaccaggtggcagccattcgcaagcagctgggagatacttatgaggtggacaccgtccataagtttcagggacgggaacaggatgccatcattctgacctcggtcgacaatgtcatcacagatttcgtagatgatccccacatgctgaatgtggcggtttcccgcgcagttcattcgttgacggtagttacatctcaagacccgcgcaatgaccagaccaactatggcgacttgactcggtacatcgaatataacaattttgaagttatccagagtcaagtctattccgtattcgatatgctctatcaaggctatgccgagcagcgcagggcttacctgcaaaaacataagcggatatctgagtatgactctgagaatctcatgtactccgcgattcaagaagtgctggccgaggaggcattttcctccatcggctgcgcggagcatgtttcacttgcgacgctggtgaaggactatgaaccgctgacagcggaagaacgcaaatacgcccgcaatccgctgacccatgtggattttctgctgtttaatcagatggataagcgccccgtgctggccatcgaagtagacggcactgccttccataaggccgagagcaaacaggcagagcgagatatgaagaagaactccatcctggaaaagtgtgccgttccgctgctgcgcctccgtacagacggcagcggggaaaaagagaaaatcaaaaatgcgctaaagagggaatgattatgccgagaattatcaggaacgcaatcagatgtaagaaatgcggagatatcatcgaaagcaaaactgtccatgattttgagttttgcagctgcggctcctgcgccgtggatggtggtcacgattaccttcgcaggtgtggaaatcttggggattgggaagaaatgtccgaagcagaaaaggttgagggcaacacacattgacttaattttaatcatgggaagttggtgacactatgccccttatcatcgttcgcaacgacatcacgaaaatgcccgtggacgccattgtcaacgcggccaaggagtccctgctgggcgggggcggggtggatgggtgcatccatcgtgcggcagggccggagctgctggccgagtgccgacggcttggcggctgcaaaaccggcgacgccaagatcacaaaagcctacctcctcccctgccggtatgtgattcacaccgttgggcctgtgtggcgaggcggcggacatggcgagcgggagcagctggcctcctgctatcggacgagcttggcgctggcccaggcacatgagtgtgaaacagtggcgttcccgctgatctcctccggcatcttcggctaccccaaggatcaggcgctgcgggtggcggcggacaccatcggccagttcctgctgggcagcgacatgacagtctacctcgttattttcgaccgcaaggcctaccagatcagcggcaagctgttcgccgacattgccgagtacatcgacgaccactatgtggacgcccacaccgacactcgccgggagcgtctgcgcaggagctttgacctgcaaagccagccgctgagcgtttacgaagatgccgcaccgcagtatgcctccgcttccgtggcctcaggcaacctggacgacctgctggcgcatctggacgccggattctcggagaccctgctgaagctcattgaccgcagcggcaaaaaggattctgaaatctacaaaaaggccaatgtggaccgcaaactgttctccaaaatccgcaacaacccggactacaagccctccaagcccacagcggtggccttcgccatcgcactggaactgagcctgccggagacccgcgacctcatagcctgcgcgggctacgccctcagccccagcagcaagtttgatgtcatcatcgagtacttcatcatgcagcgggactatgacattttcaagatcaacgaggcgctgttcgcgttcgaccagagtttgctgggcgtataatcagtaaccttgggttgaaatttaaaaaaatactacaaccgggccaaattgctattgacaatcaaactttctgtgctattctataatgatttaacctcgatgttaaatggatggcatgggcgagaaggagagcatatatggcgtatgagtttgtttatgagtccgaggcaaaacgctatcgttcggattgttcaaggacccttaagaaaacctgtgagttgctcagggcgaggggaatttctgcacagtttacacttgtcggaagcggcgccaggaacatgattacgagaaatggagacgggccgtatgatctggactacaatctattggtcgtgaaggcagatgacgagtatcgtgacccgcgattgctgaaagatacaattagaaatgcccttaacaaggcagtgggcgggaagttcttttcggatgcacaagattcaacttcttgcttgaccgcactgctgcattttaatgatactccaaatgttgaattcagctttgatgttgcgattatcgcaaaaaatcgaaacggtaattatatgcggttaatacataataagctctggagtcaatatacatggaatgaggtgccgcactcacatcaagtgactgaccgagcgaatgaactgaaaaacgcgggcttatggaagaaagtccgggataggtatcttgataagaaaaacatgtatctgtctcgacaggatcataaccatccatcctttgtggtgtatgtggaagcggtgaatgaggtttataacagatatttcaatagaggaggcgggtacagtgtgcaatcgattccttggcggctacggtaacggcaatttttccataaacatttcggataatatggttcttaggtatacagccgttgcaacggataaaggtcatatccttacgtaattgtcttaaatgtcgccccacaggcgaccaaaccctccttcggctgtgctacaatgggagcgcaatcaaacgaaggagggttttcattatgacagaattggttttcatcctggatcgcagcggctccatggcagggctggaggcggacaccatcggcggcttcaactccatgatcgcgaggcaaaaacaggaggcaggcgaggccttggtctccaccgtgctgtttgacaatgagagcgtggtcatccacgaccgcctgccccttgccaaggtgccgctcatgacgaaaaaggagtatttcacccggggctgcacggcgctgctggacgccgtaggtggggccatccaccacattgggaacatccacaagtacgcccgccgggaggatgtgccggaaaagaccctgttcgtcatcaccactgacggctatgaaaacgccagccgccgctataattacgaggcggtgcggcgcatgattgagcgtcagaaggaaaaatacggctgggagtttctgtttctgggcgccaacatcgacgcagccaaggaggcagcccgcttcggcatcgacgccgaccgggcggtgaactacaagtgcgacgaggagggcacggcgctgaactatgaggtcatcagcgccgccgtgtgcagcgtccggtcggcccaacctctcagcgccgactggaaacgccgtattgatgaggatgtgaaaaaaaggggtagataatttcaggcaacttcaagccaccacgccgctcaatttctgccacgctataagcaaagaataggcgctgcccccggtcaaaggaatgaccggggacagcgctttattttttcttttccgcctcacagcgccttcagcttccggcaatattccgactccgccatttcccctgcctgaaacgctgcgcgcagctcctccgccacggcgacaatgcaattccattcatcagtggagatggtgccccgctgcttccggccctttaggcggttataggtgcgggcatactccttggcggcggcctcccgcagtttccgtttcgccgtctcatgggcgcccacgctgcggcaggtcttgccgtgctggccgaggatggggcggtcgcaatactgggtgttatacccgcccacggccacgaaccagtgtccgcaattcttgcacctgcggggcagattccctgcggcaatccccctcgtcaagtccaagtagaaaaaggcaatcaagtcgtcgaaagtggagcgctccgccatcttcggcttcccggttttctcgtcccggtacgggataaaggatatgtgcgccgggaaatcaaagcggaatgacgccacgggcgggtcgtagaacgggtcagattcctcgtccatatccaccagctttgccttcccgatcccatccttgaagcggccataggcgtcgatatagttctcccgcttgcaggagggcaagccctcaaaatacgccgacagcatccactgggtgttgcgccggaagtcgctcaagtcctggccgatccggctgagccgggctatccagtgcgcatagtcgtcgtgggcctgcgtcccccgggtcatcatctcgtcccacatctcccggcagtcctcgtcgctggtgaagcaggacggcgcatcctcccgccgcaaaagaagctcatacagcggcagcttccgcagcagatgccacagccgccgaaacgcttcgttggcgatcccggcgctggacgggtcccgggcggcgaaaaacatctgcgcctcggcggcaaattccttggccgcagcgcctatatccagggtgagctgccccgacacctccagcgcctccgccgcaaaatatcccagcgggtactcctcccccgccacgatcacccccgccgctgtgaagtcggcggaaaagaaatccactgcgtcatagctcatccgaaacatagtttcccctccatacccgattgattttttgcgtgcatgccgatatttctgaaacgccttgcaaatgcgtttttatctgttatactcataatacccgataatagcaatattgtcaatcgggtatattccatctatgaaaggagggcagcccatccaccattccatccaaaaagaaagccgccgaactgcggcaacagtccggcggcacgccgcgcttcggaaaacgcagacgccatctgccacaagtctaacagagaggcctccgaaacgcaagttctttttctctgaatttgaaataaggagtgttttatgaaacgatccgactacaccgactatgaccaacttccgctgttcctcaccgcagaaatgacggccaagctcctggggatctccctctccagtgcctacgagctgatgcacgaagagggcttcccggctctgcgcatcggcaatcgcatcgtcgtccccaaggaaaagttctgccgctgggtggaccggcagacgggaggtgcccgatgaagcgcaccctgccgtggcagacgcccgtccgaaactactaccccctgccgaaagtcctttgccggctgggcctgtcccccggcgaaatcgctgtgtactcctttctcatgtactgcgaaaaccgcaccacctaccagtgctaccccagctaccgcaccatcggcgaggccgtgggcatgagccgcaacaccgttgcgaaatatgtccgtcagctggaggaaaaggggctcatccgcacggagcgcaccaccgtcacgctgaaagatggccgcaagcgaaacggctctctgctctacacgatcctcccgccggagcaggccgtggagcagttcaaccggcagcagctggccaaagcggaagccgccgccgagcgccgtcgcatacaagatacgctggccaaacaggccgcagaagccccgccttcgcccctgtgagctgctgtgtgacctcaccggagcgaaagcgggtgaagatagcacccccagggcttttgagcggtttcggaccgattttcggtgcgccgaaatcggggcaggagaaaggcattggcgcttttccgcacctatgccgttcacggcagcccgcagtgcgggctgccacgggggtttgcgggattttgagattgacgctgattctcagtctcccaatatgctttggctctattctttggaaaaatgcccgtttgccccgtgttttcaagggttttgggcagcgcaggcatacgaaaaaggaggaatttttaatggacaacaacggaaaaagccgtcactccgtgtggctgtcagacgaagtgtggcaggaggtagatgcattttacaagctggataattgccccacccgcaacgagtttgtggagaaggccctgcggcaatattgtggccgtctgcacgccgaacggtcggtcgcatacctgcctcgcgcgctgcaggagatgctggagggcacactgggcgtgttcggcgacaggctgggtaagctgctgttcaagctggtggtggagcacaacatgaccaaccatctgctgggcggcgacatagatatgacccgggacgagtacaacaaaatgcgcggcagcagcgtccgggaggtggcctccacccacggcagcatctcttttcgggatgtgctgctgttccatcgggaggagtaagcggtgcaaaatctgccacgccgtaagcaaagaaaagggaaatctttcagtagctttcccccgcagcttgtggtatgttgtgttgctgcaaggaggtgaccttaatggcaaaacggagacccgccggtgacggcatggtgcgaaggcgtgacgatggccgctgggaaggtcgcatcgtcatcggccaccgggaaaacggcgagccgctgttccgccatgtgtatgccaagacgcaaaaggccctgctggacaagctgcaccagaacatcgagtgctaccgggatgtggagctgaccgaggacagccgcatgacgctgggccagtggctggaccgctggctcacggagtacaaggcgggtacggtgcgccccggtaccctcgagggctaccgccgctacatcgaatactacatcaagccgcaactgggcgacaagcagatctccctcctctcccagcaggacatccagcggatgtaccgccgcctgaaaacggaggggcgcatccacgagcatcccgagatggggcatcagctctccgactccatggtgcgccacatccattccacactccacgccgcgctgaaggacgcggtgcaggcgcatgtcattcccaggaaccccaccgaggggacaacagcgcccaagcccaactacaagcccaagcgcatcctcacccgtgcggagttggacgacttccttacagtggtggagcaggacaaggtgtggcgtgacttcttccagacggagctgatgaccggcctgcgccgcggcgagatctgcggtctgcagtggagcgacttcgataggaataccggtacgctgaaggcgtgccgaaccctccacagccagcggaagggcgaatacaccgtcggcgagacgaagaccaatcaaggtatgcgtaccatcattctgccgcacagcgtgaccgaaatcctacggcggcgcaaggcggatgccatcagccaatggatattcccggatccggtgaagccggaagaccccgtcgatcccaatgcggcgtatcgccacatgaaaacactcctccagcgggcggggctgcccagcatccgctttcatgatctgcgtcacaccttcgctacacacgccctcaccagtggtgtagacgccaaaaccctgtcggggattctggggcataccaacgcctccttcacgctggacacctacacccatgtcacatcggatatgcagaagacagcctctggcatcgtgggcggcttcatggaagatatcttcggaaaggagttgaaaccgtggcaagaaaacgaaaagccggagatggaacggtaaggcagcgcaaggacggccgttgggaggggcgagtcgtcatcggctatgatgacaacggttatcccaagacgaaaaatgtcctcgccaaaacgaagaaggagtgtgtcgagaagctccagaagctcaaggaggagtgcgggggactgaagcctgaaaaggttcgccctgagatgcccttcggggactggctgacatactggtacgagaatcactccaagcccaagatccggcccaccacacaggagacctacgagagccgcatccgcttgcacatcatcccggagattggggacatcccgctgaataagctgacacagaacgacctgcagcagttctacggtcggctcaagaaaagcggccggaagcggttcaccgacaagtacggcgaagggctgtccgaccgaatggtgcgtatgtgccacgccacctgccgctccgcattggagaaggcggtgcaggatgggctgatccgtgtgaacccagccatcggctgcaagctgccgccgaagaaggcgcgggagatgcaggtgctgacgcgggaggaacttcaaaggttcctcattcaggcgaagttcgagggctactacgaggtcttccttctggacttggcaaccggcctgcgccggggtgagctgatggcgctgcaatgggacgatctgaatttcaaaaccggtgtgctgaatgtgaacaagcaggtctacgatgtgcgcggccagcttcaaatcagcacacccaagacgaagaactccgtccgcaagatcgtcctgccgcctgcggtggtggcagtgctgcgggaatacaaaaagacggtggattcccgctggatgttcccgtcgccggtgaaggagaactgtcccattacacccggcgtggtacggcgcagattgcagctcattctggagcacgcagaatgcaagcatgtacgctttcacgacttgcgccacaccttcgcaacgctggcgctggagaacggcatggatgtgaaaacgctctccgccatgctgggtcatgtgtcggcggccaccacgctggacatctacactcacatcaccgatgatatgcagcgtacagccgccgccaacattgaccgcggcatcggcaaggcagcgccgcaggaggacgcttcagagccggggcaggaaactgccccggcccaggcggaaaagccgagtatgaccgatttcaagccctacataggccgcaagcgcagatccggcaccggctgcgtcagtgagatcaacgaccatctctttgaaggccgctactcccccaaatggcccgacggaaaaaaacacgcccgcaatgtctacgcccacacccgcgaggagtgcgaggagaagctgaaggtgctgatcgtagagatgaaggcggagattgcagaggcgcaacgactgaaggacgagggcaaaggtgatgggcaaccgctggaggagaagaagggcaagcggggaaagaagaaaaattaataaaactgtctcgggtatcgaatatctggtatccgagacagttaattattaagtatgattgcttagcttaagaatgtctgcaatttacattatatttgaaatttacgggtgcgttgactacttgaatgtcaacggttataattgacacataagaattttgaaatgcggttttggacggacgtttgatgtccacggaggaatgataaatgattcagcaagcaagggacaaggttaagaagcatattaaaactcattctgaacattctgttgaggatcgtgctgccatttcgcttttgggaacgttcttgaatcccggcggaagaatcaatacttcttttgccgcaaatgatacttggccaaatcacgatggtacatttgaattcatttcaaaccccgatgtgtccaggcgtccgaagcagaacttttttgttcagattaaaggcaccagtgtatacacagaaaaagacggaatcatcaaatattctctgaaaagcttggcttttcctgcttatatatgcgacaacgtttcgtttgatccgggaatactgttcgttgtacttgatccagatcagcgaggttctcaacgggtattctggaaatatatgtccgtagattttattaactcaatcaatttcgatcaagatagcatgactatcgcattctccgccaacgaggagattctaaatactgatgagagtgttgctgccttttgcgaaaagctggaaatgattatcgaccaacactcgtttataaatcaactggatagtcgtaattatactcgccgtgatgtcgaagggattattgcagtatgcgatacggaaattacggaaagcatagagagacttgatattttcaatgacactcgagacggtgtatcgagaagaattctcagaaggttagatgacctatgctcggcagctcttttgctcaacgccatagatgccggaatagacactccgacacttcctttagcatgggagcgttcactcttaaatattgaaaccaagtatctgggtacttttcttaaaggtctgcaatacattggaaaacgcattccagatgaaggacagtcggaacgcttaatgctgaagtattacgaatttttatggcagattcggaagtccttaaaggaaaaatatgaaattgatattttgagcaatctggaaaagtttccactccatattgaccaaattgaccggcaatattatgagttagcagcaatggcggtagaagccgtctgttccgtcaggtgtgatttgtgcgcatcaaggtactatgtacagaaaaagactccattttttattggacgagagaggtattatgaaatcacacttcagttagctggtgcatacgcttcaaagtataatcgaatcacgacatatactaaagagaatatctcaacaggttattctattcaagttggatatgtagaatctgcaatagatttatggggaattagctccagaattaaagttattactgattggcgtgtatccgtagatcctgtgtgtctgaataagttggggaaagtactgaaaatgccaactcggatatcttctcagtatggagagtacaaggagttgatgtcttttctcactcacacaggccttaacttcctggacttgattgattttcaggaagttgaattcttgaaaattattgacgctatctatcgagacatacatacaccagtatacagggatgtcctcctcactcttagagaacaatattccaaggcttcggataagtttggccgcaacgttgtaagatatttgctcttgaatcttcgagaagagactctggaaaatgtaatgccaacgcagttcacgcgatatatgctttgcgatgaactgaatctatcaagcagttgtaagccatttgagaaaaacccgtttatctccaatttggcgggaagtaaaaccagtgtaagtggtcagatcagaagcctcattagtgttgttggttctgaaaaaatcgatgtggttcgtccatatctgtcgattaaaaatgcaaccaagcaaactggtgaaatctactttgaaatcacttccgattccagtgtgacggagattcagagatacaatgatcagttagaccaatgggagcggaaacaaggttatcaaattaaactctctggtggcttttcgtgtatcgaatcttatgaacagacgacattgttcatattgagaaagttattggacttttccagcagtggaagcaagggtcaacgggaatacaaccgaaaatttctcaaagaaagctcgttggatttcgctgatgatttgaaaaagcaagcgctccgagatgtttttgtcaattcacgccttctcctgatttatggagcggcaggaacgggaaaaaccacgctaatcaattatatctccaatttgatggcaaatcagcgtaaacttttcttgaccaagactcatacagcacttcagaatctgaaaagacgcattgataacccaggaacaaattctgattttatcagcatagacagcttcactaaacaagtgaatctccccgactatgatgttatctttgtggatgagtgtagtacgattgacaatcgcacaatgggtcgatttttgagcaagatgagtcctgacacctttttagtgttggccggcgatatccatcagattgaatctattgagtttggcaactggttcttctatgcaaaggatattattaaaactccgggagctaatgttgaactgctaagcacttggagaacccaggatcaagcactcatcagtctatggaacgaggtacgaaccagagctgatatgataactgaaaagctcgttatcaacggaccatattcagaagacattggccctaatgtgtttaaaagagaatgcgaagacgaggttattctctgcctaaactatgatgggaaatttggcttaaataatatgaacaattatttccaagctgcaaataccaagggtgaggctatcccatgggctgagtggagttataaggttggcgatcccattcttttcaatgactcaaaaaggtttgatcttttgtataacaacctcaaaggtcgcattgtcgatatcgaaaagcattcaggctccatttccttcaccgttgatgttgagattccattgactgaactaatctgtaaaagagacggcattgaatttattgagtctatagaaaatggaacacggattcgttttgcagtatatgagtatgatgagagcaaaaaaggtgaggatttggacgagaatttacgactcaagtctgttgttccgtttcagcttgcatatgccgtttcaattcacaaggcgcaaggccttgagtatgactctgtcaaggtgataattccaagtaataatgctgagaaaataacccatggtatcttttatacagcaattactcgagccaaaacaaacctaaaaatttactggagttcagaatcaatgcacgatgttgtaaagggatttgcaaccgatgagtcgaaacggaagagtctcgaaatcgtgaaaactaagttggggaaaaactgatgttcgcgatttcattaccatcacgacacacctcaaattctgcgccgtaatagacaaagaataagaaaatccctctgaaatcgttgatttcagagggattttggtccgagtgaggtgacttgaacacccaacctcgacatcccaaatgtcgcgccctaccagttgagccacacccggatattcacttttctgtcattataccacggcggggaggaaaatcaaagattttctgtctgtggtcatttatgtggtcaaagccgcttttgtgccgttttcggcaaccggggaaaaaaccgctattgcccgtgtcgcaaggctttgcgggcttttgttcaagctgcgcatggatagggtctacgcactcccaaacctatgtctgaaccttcaggaagccctgttacgccctctttggtgctttccggcactcctgcggttcctctttgaaactcttttgccctgttcacttcaagagctgttttcgtcttttgggatttgtgtgggattgaattctgtatattaaaagtgcttccgaccgggtttacatccaacagcgggtgttttttgctgcagagagcagctcagaaattgcgccgcataaacaatgaaataagcgcgatgacaaaaaggcagcaggctgacttggatgatagccagcccactgagtgaagatggttattcgatgttttgcctttcggcagcaatacgtgttcttttgcctgagaatgcaatgccgatttttataattgacgtaacattcattgcctgcagatcaacgctgtacgcacggtcgttgatctgttgcaaggcaacattagcaaggtcttcaagctgtgtttcagagcggtctttcccggcctttaattcaatcaaaatgccaggcagccgcttattcaaaggaagcagctgaatatcaaaccgtccatcaccagcttcgcgattggaggtaatgcgatagctgttgtccatcacagcgcacatacccaatatcagaccatggtaaaatgtttcgtcggcagcatcgtggaaacttattgtttggagcaggaacttttccaaggctttttgcagtgattcgatatctgccttgtagatagcttcctgaatagcaatagcagcagaacgaggaataatattctcaagctgagagaggatctccttgctgtagacgaaagaaatctctttgttgggcagagctacttcacacatataatcctcgccataaggctggtcacagctcacggctttcaagtatcctgccacaagcagaaagctgtaaacagaggacggatcattctgaatctgcggataaatgacaccggtgtcaatgtgcgtaacgaaggattcgcccttcatcaacagctccagacgctccataatatccggcgttgcagaagccagcacctcgcggatgatgtcattgctcccggtagactgccagaatgctttgggacggcagttattattgaagtatccaatgacagaccagggattaaaaatctcggtattgccgaaaaggtaaccatcataccactcgcaaagctcctgatatttatcagaagcatgatagtagtccgccatctcatgtacttcgcttgaagtaaagccgaaatattcactgtagcgctcgtctaaaattgagttgatcttcaggttgttcaggccgctgaagatactttccttggcaacacgcaggatgccggtcaagaaaccatagctcagatgcggattgtctttcagaccgccggagaacaggtttcgcatgaatccgatgatcgtgtcgtagaaaccgctcacatggccctgctgaatgggagtgtcatattcgtcaatgatgacgatgggggcaacatcatggtgcttatgaagaagcagcgtcaatgttcgcagggacatttgatattccacttcgtcagcagcttctgttgcaagaagggaatattcctctttttcgtaatcactaagcgcggagctggatgccaactcgtcgtggcggcggaattcctgtgcgatcagcttttggagcgtctgataggtttcttcccaagaggtgtatttaacatccttgaaggacagaaaaatcacaggatactttctatggtgggcaagataggattctccgcaggaccagattttcttatctctgaagtaaacggaagtgtcctcggtcgtcttttcgaagaaagtgcggagcatatccatgtttagtgttttgccaaagcgtctggggcgggtaaacagagatactttggggcgctcgtccagaaactccttgatcattaaggtcttgtctacatagtagtagtttttgcaggcgtcccggtaatcagatacgccaatgggcaacggcttgcgcacagatgatactgcgggctttaccgcactccgatgaccgcgcttatccaccggcttttgcgtgctgtccgggataaaccactgcctgccctccttatacgcgccggaaatgcgtccggctttgcaaagcgcattgacccgccgttcggtgatcccccaagcggcagccgcttctttgatcgtcatcttggaacacctccattgcagttcgtcaagaatattataaccgctgctccgaataaaatcaactatattattccgaataatagaggcgttattcggaataatagttttcctgcaaatattccgttctttccggtagctatttcctgctttctgtgatattgttcgtttgccaaaaggaggcgatgatatgcaaaaagaaaataccatgacagtcgggcggtggtgcggccggtggttcatcgccaaccgccacaaatggaacgacaacaccgagggcgggtaccgcaatcttatttacagccacatcatccccagcatcggaagtgtggcgctctctgacctgacaaagcagacaatcaccgatttctacgacacgctacggagtcagggacttaacgccagaagtgtctggtgcgttcatctgcttctgcggcggtgcttggacgaagcagcgcgtgaccagctcactccctacaatccggtgcggctctgccaggagcccacggcagaggaatacaaagcagcccctctgcgcttggggcagctccagcgttacctgaacgcagcagagcagctcggcgtactccccctcatctacacaggactttcaagcggtctgcggcaatgtgaactgatcaccttgtcgtgggccgattttcatgtccgctacaggtacatcctcaaagaccagcggttgctgacgcttaacgccaaagcggcgcatctgctgaagcagataccggaaactgactcgccctatgtgttcctcaatcccaaaaccggagcaccgtataagctccacgagttctactatctgcacaagaagatcctcaagcaggccaggctcccgtgggtagcctttcgggatctgcagcggcagtgcatggaggtgggaatatgacgcttcgggaatacatcatctactggcaggaaacctacgataagtcccagagcaggccgactacctatgcggcacacaactatgtattcaagaaccatattctccccagcttgggagatataccgctctctgaattgacatcggagatagtcggagaatttctggaggaacggcggcgcttcggcaatcatcgacccggcagctctggcttgggaggagaaaccatgcggcacatccaccgcctgctccagcaatgcctggaccaagccatgcgggatggcctgattggcgataatcccgccagagcgttccactactccaagccaaagaaggtcaatgccgatgtgctgacgccgctggagatggaggattatctggatgcggcagaacggctggggcatctccccatgttcatgctggccttaacggtcggcctacggcagggtgagctcatcgccctgaaatggaatgacctcaaggtaaaggataggacgctgaccatatcggagcagcgctctgtagaacggcgggagctgatcgaatatggctcagaaacgagaacaataaccttggcatcggaggtggtcgacctcctgatcatggaacacatcaagcatccaaacagtccgctgatgttcatgcatccggctacgcaaaggccatactcgccgcagatggtgcgccggatgcataatgagatcatcaaggaagcagggcttgaccacatccgattcacagatctccggcacacctgtgccgtcctatctctgcgaaacggcatggaagccaaagaactggcacggatgctgggacattaccggccatcgataacccgacagaactatgaaccgtatctgccccacaaggcacaaaatgaggatttgccaaacgaggccactcaggacgagctgcagcaggcggcaaatattctggataatcttctgaagttctgataactgtttcgccaaaggagctaacatgaaaaagcttatcatcatcgccgcaacatttaccgcttgcctcggcctttgtgccgccgtgtggccgcagaccgaagtagtcgaggaaacactcgcaccgccccaaatacctgccgtaaccgccccagagccgattgtcgcagaggtcaaattagaaacagaacctgatttgccaacagagaaagaaaaggctgcgactccacagccggagccggtcgaggaacttggtgccgtcccagtccctgcaccggcagagccgacatctgtggccgaaataccgcagttggagactgagcttcccgcaccgcagccgaccatagaactgcagcccggcgatgagatctatattccgggctttgactgggtaccatacgaggggccgaatcaccgcgagtatgctgcggatatgtacgagaatggcaacaaaatcgggagcatgggctgaaacaggatctgctgggagcgggcatactgcttgattacgaaagctgctgtaccgaaaagtggttggtatcatattatgataccaaccactttttgccgatgtggagttgaaaaagccaatggtatctcctcgtggtctgatgacgacgaggagtagaatataggcagcggctcaacggttgagccgcataaacaatgaaatagccgcgggagcgaagcggaacatttccgtggctttttcatcgtgaccagatgattcgaaatcttctctctgaaatcgaaaacacagatctgaaaactggatttttgatagacaaaatggcgtctccatgctaaaattaatctgtatcagtgcatactctggggatgaggtgttacaatgacgatttgttataacaggctgtggaagctcctgatcgataaaaacatgaaaaagaaggatctgcgtttggctaccggcatgtctacgaccgcccttgccaagctgggcaagaaccagcatgtcagtacagagattctgacgaaaatctgtaccgtactggattgcgacttctgcgatatcatagagctcgtaaaggaggaaaaccatgattgacttttccaaaatcgagcagtaccgggagaacaaccgtattgaggctaagaaagcccttggcgggctacccaggagcatttgggaaacctattccgcctttgccaatacccacggcggtattatcctgctgggagtggaagaatgggcggataaatccctgcacacggtagatttgcccgatccggacagacttatcaaggagttctgggacatcgccaataatcccaacaaaaccagcgtgaatgtgctgtcatccaaagatgtatttgtgcaggatgtcgacggcgaccacattgtggtcatcaatgttccccgcgcggaacgctcctataaaccggtgtatgtggacggcaatccactctccacctaccgccgcaacggagagggtgactaccgctgcaccaaggaagaatatcaggccatggtgcgcgatgcatcggtaaagacgcaggatatgctggttctgaacgagatggacttgacagtgttcaatcaggagagtgtccgcagctatcgccagaggatgcgcctctcccgccccggccatgtatgggaagccttggaggatgaagatttcctcctgaagctgtgtgccgtgggcatcggctctgatgggaaaaagcatcccacttctgccggacttctcatgttcggcaacgaatacgatattgtgcgggaattcaacgcttactttctggactatcaggaacagtatgacgctgatacccgttggactgaccgtatcatttcctcctctggcgattggagcggtaatgtgtatgacttctatttccgggtctacaacaagctgattcaggacatcaaagtgcctttcaaaatggagggcggtaccagagtggatgatacagatgtgcataaagcactgcgcgaagcgctggcaaattgcctggttcatgccgattattatggcaggcagggactggtcattattaaaaagcgggacagcattaccatgtccaaccctggcagcttccgtattgaagtggacgcggcgaaaagcggcggtgtatccgacccgcggaacggcgcgatgctgaaaatgttcaacctgattgatattggcgagcgtgccggtagcggcattccgaatatcttccgcgtctggcgtgagcagaattggacaactccggagattacagagcaactcgagccggagcggacaattttatcgctcgtttttgaaaaagcaagcggtaaaaagcaagcgataaaagcaagcaatcacacaatttacagcaggcaaaaacaatccgtcatcgaatacttgacccgcgagattcaagcggattgtaaaacgattgcggatctgttggagatcagtagtcctcgtgccagagcagtgcttacaaaaatggtgaaagaagaaatcattattaccgaaggcggcaaccgcaatagaacatacaaattgaaatcctaagtgtccactataacggacaccacttatggtagacttatatagagaaaatgcagcaaccatagcgttgcttttcggaggatccagatgggaaaagaactgtttaagaatatccccagtaaagtcggggatttggtcaaagatgtacgcaatggccgcatcggtctgcctgatcttcagcgtccttttgtttggagggacaataaagttcgtgagttgtttgactctatgctcaagggctatcccattggctatatcatgctgtgggagtctccagttgattatgagagcaaaaagagcacgattggagataactcaaaaacctatgaagaacctaaggaactcgtcattgacgggcagcagcgtttgactgcccttgttgcggctatgtttgcggtcaaggtgaaggacaagaatttcgcagatcgtgaaataaaaatctcctataatccgctgactcgcgaatttgccgtgtggtcccaggcatacgaaaaagacaccgagtggatcagtcgcatcagtgatgtgttcctggcaaaagaggacaattccatcagttctctgcggcgacattttatcaaggaagccaacgaaggccgcagtaagaaagaactccccttgctgacagacgaggaagaagatagaatcgaagataacatcaatgcgcttctgaatttgtctgattattctctgcctactctggaaatcagttacacggcagacgaagaagatgtcgcagatattttcgtcagagtcaattctggcggacagagtctgacggagaacaacttcattcagactcttatctccgtttacgagaatgaaaccagcaataagatcaatgcgtttgcagcagcatccagagtaccagccgccaacacctcttacaacacacttttggcaattgaaccttctcatctgattcgcatggccgttggcgttggtttcaagcgtgcccggttgagatacgcctacatgcttttgcgaggtaaaaatcttgagactggaaagttctctgatgaagtccggtatgaaaatctccagattttcaaggacgctttggacaaggtcatgaaccttaacaactggcacagtttcattaacatcgtggcagaggccggatatatcagcgacaagctgattgcatcgtccaacgctatcgttttcagttatgtcctttacctgattgccaaatacgactacaaactggatgcggcgcagttgaagaaatgcaccagcaagtggttctttatgagcaccatcacatatttctacaccggctccacggagtccgaagtggaaaagcaatttgcagatctgcgtgatgttcatacggcggcagagttcattgcctatattgaccgtgtaatcgaaacacacttcacagacgattatttcagtttgactctacctaacgagctgaacagcgctgcggctatttctccggcgtggtatggatatgtggcagctcagatcgtgctgaatactcctatgttgttcagcaacaccccagtatccaagtatttcatcttgggttccagcggaacgaagaatgctatcgacaagcatcacattttcccgaaaaactacctgactggcattggttttaccagcgaccgtgaccggaaccagatcgcaaactttacctatctcgactacgccaccaacatcgagatttcagataaggcgccccaagattatgtctctcattaccgccaaaagctgggcgaagaaggttatcgcaaaacctgcaaggaacacgctctaccgaataattttgaaaacatggaatacatggagttcctaaatcagcgcaggattttgatggcgaagactgttcgtaaagcgtaccagaggctgtgtgagtgatatttacaaataaagcctttcggggtggttgtgttgtgtacagaaaccgcaggaattatagcgatagttggaaaaatgttcaactgattgctaatatagaccttgcaaatgactggcgcagaggagaataactgatggattataatattttgataaccttcttgcaagagaaacaatacctcaccgatttggaaaaggacattctggatacatggaatgaattgcagaagaatccgtttgaccgttctgcggcgcaaaggcaggtgctgcaaaatgatgcgaagtatcctgagattttctttgcaatcaagtcaatgccgacaacagtgtctcgtcctattgagcggatgacagaattagacattcgttataatttagagaatcaacttgcagcacttgcggcaaaggaagggtggcagaaatatggccaataaactggaactgacatggtacggcaaggacgaaccgattcgggtagaaccgcgcctgctgattgaaaacacggcactgtccaacaccgcagccgacccggatacgcagaatatgctgatccacggagataatctgctggcgctgaaggcgctggagagcaaattcgccggacaggtaaagtgcatctatattgatccgccctataataccggttctgcattcgagcattatgatgataatctggagcatagtgaatggctgaatctgatgttaccacggctgaaactccttagagaacttctttctgatgacggaagtatatggatcagtattgatgccgatgaagcagcctacctgaaagtattgtgtgatgaggtttttgggcgtaataattacagaacgacggtaacatggcaaagaaaatacagcgtgagtaataacttcagaggaatagcaacaattagtgagtatgtcttagtttactcaaaaagcgaatcatttaaatgtaatttactgccaagaacgcaggaatctattgcgcgttattcaaatcctgacaatgatccaagaggtccatggaaggcagttgattatttgaatcaagctacaacgaagcaacggcccaatttatgttatgacataatcaacccctttaccggagagattatcaagaacggagctaaggcgtggaaatatgaattgtcgacgcaccaaaaacatgtagaagaaaataggctttggtggggtatagatgggaagaatactgttccagcactcaagctgttcttgtcggaagtgcgtcaaggaatgacgccacataattggtggccttacaacgaggttgggcatacagatgaggcaaaaaaagagggcattgcattatttggtagagaatctgtctttgcaacaccaaaaccagagcgactaatcgaacgcgtgctgactttgggcagtaatcccggcgaccttgttctcgattctttccttggttccggcacgactgctgccgtggcgcagaaaatggggcggcgctggatcggcgtggaaatgggcaatcatgcctacacccactgcagggtgcgtatggacaaggtggttgcgggtcaagaccccggcggcatcacaaaagcgcagaattggcagggcggcggcgggtatcgcttctatgaggtcgcgcctaccctcatcaacaaagacgcctttgacgaatatgtcatcaacgaggactacgatgccaatatgctggcggctgccgttgccctgcacgagggctttcattatcagccggacggagaactgttctggaaacagtctgtgggcaacgaaaacagctacctatttgtgacgacccgtcacctgaacagtacctatctggactctatcaaggacaccatggaggagggcgaatatctcattattgcctgccgctcctttgacaatggactggacaaggcttacgacaacattgccgtcaagaaaattccgcaaatgctgttggaacgctgtgagtttggcaagaccgactacaatctgaacatcgtccatccgccggtgtatgatgacgaggaggaacaggatgtttaatgattttccgctttataccacggactatatcagcggtgtgatgtctctgcgcaagccgcagacaaaatctctgaaaatcctggaagaaatcacgaatgcagtgcccctgcgcaagggcatgaatctgaaagcagcactgggtgcagttcatgctatgtatccgatttgtacggatttcgagcgggatttcatgtctttgacttttgctctggccaccggtgtgggtaaaacccggctgatgggcgctttcatcgcctatctgtatacgcagcacaacatccggaactttttcgtggttgcgcccaataccacgatctatgagaagctcaagaaggatttgagtgataacggcagtccgaagtatgtgttccgggggctgggctgctttaccgtacagccgcagattatcacggatgacgattaccgggaaaagaacctctctttgtttgaatctgatgtacatatcttcgtatataacatcgataagttcaacaaagagggcgcaaacatgaaaaaggtgaacgagcttattggtgactcgttctatcaggcgctctccgacctgccggacttggtgctgattatggatgaatctcaccattaccgggcagagaggggaatgcaggcgctcaatgaactgcatccgctgctgggattggagcttactgcgactccccttgtgacgaagggtaataagcaagttcctttcaaaaatgttgtatatgagtatccgttgtccaaggccatcgaggacggctatactcgtacaccctttgctgtcacacgctccgacatcgatttttacaactttggggacgagcaactggataaaatgatgctgttggacggcatcacctgtcatgagagcaccaaacggaaactggaggtttatgctgtcaaccatggaaagccggtcgtgaagccgtttatgttggtggtctgtaaagataccgaccatgcaacatgggtggagcagtttgtaaagtcggacgagttccgtggcggcgcataccgcaacaaaaccatcgttgttcattccaagcagaaaggtgcagaaaccgaagccaacacccggctgcttctggatgtggagaatcccgaaaacccggtagaaatcgtaatccacgtcaatatgctcaaggaaggttgggatgtcaacaacctctataccattgtgccgcttcgcacggcagcatccaagattcttcgagagcagatggtcggaagaggcctgcgtttgccctatggtgagcgcaccggcgaccgggatgtggacgctgtgatgctgactgcccatgataagttcaacgatatcctggcagaagcgcagaagggcgattctatcttcaaggccggaaatgtgatcaaagttgaggaaataaagctggaagaggtcgtttatacccaactgacgattgatgccgagccggatgccgaactggaaaaggcatatgcccataccaaaattgaaaagacggatgccacggatgcactgctcaagaaagcaacggagctgattcaggcggaggtcgaggaacatattcagcataccccggctcacacggttactccgacgcaggcacagcaaatcgtagaaacggtcaagcagcaggtatccgaggacaaagaccttggtcaaacgttcaaagagaacgaaatgccgattgccgcatggatgcttcagcagaccgaggaaacgcaccgggctgctgtgaataaattcatcccgattccacgcattaaggttacggatgccggggtcgaggaatatgtgtttgtggactttgatttggatatggcggagttcacccatgtgccgattaggaatgagctgcttgtgcagaatctggaggatatgcaggacaggcagcgcatcaagggcaacgctattgattttgaaggatacaatcctaaaaaagtcattctggaacagctgcgtgcaaaaccggaaatcgattacgaaaagtgttccaaactgctgttcaagctgattactcaggtctgcgaccattacgaaacccgatatggcacaaacggaatgcaaaacatcattatgatgtacaagcgggatattggcaataaaatctacaagcagatgctccagcatttttactgtgaaaacggatttttacaggaagaagtggtcgggacaagaaagtataatctgcagcaatcctatcgttactctgaacgtgcgaaccttttctctgatgagtatacggaaaatatccagtctgtgctgtttgaggggataaaacgaggcgtgttcagcaccgctaaatttgacagccgcccggagctgttgttggcacgaatcctggaaacagaatcggctgatgtacagaattggcttcgtcctgcgccgcaggagttcaatatcacctataaccacggtcataactatgagccggactttgtggtggaaaccgaggacactatttatctcgtagaggtcaagggtgaggacaagctgaatgacccggatgtgattgctaagaaaaagcgcggtatccaatactgcgaggttgcctctcgctggggcaaggcaaacggctataagaagtggcggtatctgtttatcccgtccaagcaggtaatgccaaactcgtcgtttatgcagttggcaaaaaggtttggagaatactaaattaacaaatagtctctgcaaatacaatttagctaaatgtgtaatgtacaaaatctgttcttcatggaaacgctaagtttttcgtgaatctaatgacactcgatatagtcaatattgttgcattaaatttagcgtcaaagctttgaatactaatacggttgcgaataataatttaggtgcttgtagctttgatgtttcaacagaaatatcatcaaataaaagaattggaggaatagaaaatggcagagacctttaaacttccgtgctcatcgtatgaggagctgattaaactgttccaagcgtatgcgaatacgaaagaaggaaccgcactatcattggacgagataacccaagccactggagtacctcgtactattgtaagcaagaacaatggttttatggtacaagtgggtttgatcacggagggcaataaaaaagcagcaaccgaaacgggacgcgctttaggacgagcatatacctcaaaaattacagatgaagttgaccggatttggaaagagattattgctgaagttgattttttaaaccggatgttgtctgctgtccgaattcgtaatggcatggatcgttcgagtttcattaatcacattatttattcttcaggactcaaagatgctaaggaatctcgcgcaggagctggagcactgattgaaatttttaagagtgttggggtattgtcagaggttgacggcaagctatctgtcctggatgaaccaagctctgcccgagtatctgttgcatcaaataccatatctgctgagcaaacgcattcagaaccagttgcccaacaagcgcttcccgttgcaacaatttcggcaaagaactctattgtcatcaacatcaatatcaactgtacaccagcagatattgatggactcggcgaaaaaattagtcaactgctttacgagttgtctgaatgattaagctattcataacagagaaagtaggtgcagtatgagttataacatagtgcttactactgctgaggatattgttgcagttgttgatgctgtcatcgcaaaaggctctgaagcggcaaaggatttcatcgcagagttcacgggaatagcaactgacgatcaggttcttaaagcacttcagatggcatgtgaacttcagttaattgtgtttgatagttcacgaggctgttatgggtctccatcatttttggcccggaagcttgtatctgcatcatcagacgagcagaaggctgtgtttatgcgcttgattttggagcaatatgctccatataatacattcaagacacgatacggttttacaaaatccattgagcttgcttgtcgccaaacgaaaaccctacatatgatgacctccaacgagagagacgtgaaaaatacgcttataagcattgctacatacgcaaaggcgcttaaaagcgaaggcgcaaacttatatagctttgttgaggatgtggatgctgtaggtattattgaagctgcgcttcgctcggcaaacattaccgaaaactcgttgcgtacgtattggggggaaaatctgtatacttttgttaatacatccaatgtgtttgcccctttggttgaggcattgcagaaaactcattctgggacagtggatgttcgttctatcgttgtttgtgcagcaaatgcatttgaatcttttttagctgattttgcagtaagaaaaggagtctctttaagcggtagaaatgggatactgcaaaagagagatgcattatctgcacacatttcgaaaaaacatcgagggatgattgaattcgttggacaagtccgcaatgcggcagaccacggtgcagatcccgacgaaaacaaccaagtttggacaatctctaatgaaactgcaagaatatatccctgcattatagcagcgctaattaaagcgattttttcacgagatgctacagggagcattgaagtataaataggattttctcatatgctgtgtggggggagaacctttttatcagactgacccttatgaccataatgcaaattgtcaccacatactaagagggagtgaaacaccgaaaatgttttactccctcttttgtaattattcttttttctgcgccccattcaggctggcccagtgctggcgcagcaggctttctgcttctctgcgaaaggaatcttggaacatgacagccacaaccaatgcgctaagcactgcagccacaggctccagccagggatatgcggtccaaagctgttctccccagcaaacaagcggaacaccaacaagcagcataaacagcaaaataatgatggcaacgtcgggcctgccgtagccttcatgtcttttgattttggcccgtatctgtcgaagcgcacgggcgcggatatctcggatatttctggacgagcactgtttgtcctgtgcgacggattcggtggactctccgttgatgacggtgcgaaacaggatctcccgctgcaactcggtcagctcatgtagtccctcgtcaatttctttgcgcacatacatgagcgggtcttcatcagatccctctggcagatacttcgctcggtcaaaccagcgcatatcatcgtagatcgcgttgcgcacttcctccggcaggaacgcttctggattgtaagataggggctgtttgatatccacatcttccagagtatccggcgcaactcgcttgtgaaagttggcttcgctgtagtagagcatgtgctccagttccttccactcctctgggtgctccttcacccactggtctgcgatggcggcagcttccgggtccatggagtgtatccagcgccaatccgcctgaagctctttataagactgggtatccttgaaggacatgagctcaccgccctttctgcgttcacaaaaagtttataattggggaccttccgattttgcgatttttctctaagtaatagtagaaggacaatttcacccgggtgaggttgccttcggttcggtacggcacggtctccgcgctgacgaacccacacagcctttgacagagcaccccgtgagagcatgtgcgctctctgccattcggcaactcgctcggaaggtcattccatctctgaccgtgctcccgggagcacggtcttttgctatgtgccgtttccaacggcacggctatataaatcattctaacacggaggaggtaaaaaagatagctcacagatgaaagtaaaagactcagctgcaaagcggcggagggatgcacaccagtatgaccgcaaaacaaaaaccgccgcgactgcggcaacagtccggcggctcggcgcacacacaggcacgcacaaatcaactaatcaaagtatagcaaacgggcagcggaaaagcaatgaaaattttccgcacgctccctgtgtgagtgccacagaagtctacaacaacacaggaggtatgaattgagttacaagaaatggcccaagcgcagcgcagagaaaaactattttatggtgcccaacgagatattcagcatcggtctggattaccgggagatctccctctacacctatctgctccggtgtgagaaccgcgaaacctaccaatgctaccccagttacaaaaccatcggcaaggcgatcggcatgagtgaaaatacggtggctaagtacgtgcggcagctggaggagaaaggtctcatcttcacgaagccgaccatcatgcagagcaaagacggaaaaccgctgaatgggaatctgctctacaccatccttcctatcccaggtgtactcgaagcgttctatgagcggcagttccggcaggcagaggaggctgccgcccgctatcgtgcggcagaactcctcaaaaagtccaatgcacagggccgccagaacgccctgtgtgcgcctttccgggaggaagcgagtcccagtcccagccatgggattgaagccggatgtgagccattttcggcagacttttgcgggacgaaagaaaaagcaggataaaggcatggcgtcgcaagcgccgccgcaaccgtcacttctgcccgcagtgcgggcagtttcgggagtttgaagctggcgtctttgagaggcgaaaaaagcaccgatggcgtcagcttccccgaaaagccctgtgttgcagggcttttcaaggatgtcttacagcaaaaaggaggaattgaatgagtaaagaaaccagagatcgtattgcattccggatgcagccggaaaccagaagaaggatcgagcagtggtacgctgccgacaactgccagagcaaaaatgagttcatcgagaaagccgtgaacttctatgtggactatctgggaatacaggacaacacatcgctgctgcccatggcaatcacgtctgccatcgacggcaggctgagcagattggaggactatattgcccgcagagattttaccagatgcgtggagcaggacatgaccaacggcatcatcgcggaagcgttcgagatggaccgggatgacttgaagcgcaggcgcgcgcagagcgtccggaatgtgaaagccacaaacggtatcatctctctggagaagtatgcgcgctcccgccaggagccggactgggatgatgacgaatggcaagactgatcctcaagagtccctatatcaaaagcaccggcggggcctccggatacctgcgctacatcgcgacccgggagcgggtggagctcatcccggatgaccgtccgcccacccgaaagcaggagcagctcatcgtaaagctggtgaaagacttcccggacagcaagacgctctatgagtacgaggactacctgacgaagcccacgaaagtcaacgcctctgcgttcatcacactggctctcgagtccaactgggatgccatccatgagtcagaccagtatatgaagtacattgccacccggcctcgtgctgagcgcattggtacccacggcctgttcggagatgacgacgctgtttcgctggagaaagccatggcggaggtggagcgctacaccggaaacgtgtggacgcacatcatctccctcaagcgtgaggatgctgcccggctcggcttcgacaacgccgcggcgtggcgaaatctcattcgagcccaccgcaacgacatcgcggcggcaatgaagatcccgcccggtgacttccgttggtacgcggccttccacgacgagggcgagcacccgcacatccacatgatggcctggtccgcaaagccgggacaggcctacctctccaaggaaggtatccgtcagatcaagtccaagctgaccaatgatatcttccgcaacgaaatgctacacctctacgaacagaagtctgagtccagagacgagctggtacgggaagcgcggcgggcattgctggagctggtgcagaccatgcgggatagtatgtgcgaccacccggatgccgagcggctcgtgctggagctggcggcgcagcttgaaacggtcaagggcaagaagtcctacggctacctcccaaagcggctgaagaaattggtggatgaaattgttgatgagatggagcggctccccggcgtgagcaagtgctatgaccagtggctgatgctccagggcaaggtggacagctactatcacgacaagccccaagaacgcatcccgctctcacagcaaaaagagttccggcagatcaagaacgcggtcattcaggaagcggagcgcctgcggttgggtgagattactttcgaggagaagggcctcaatcagcaggacgaaccggaggaataccgaaacgcctcctacgcctactggacgctgcgggatatcatccgggacgagagcctgaccatggaggaacggagcgacgctgtctctgaaatggacaaactggcagagaacggcgatatgtatgcccagtacttgatgggaaagctctggcgggacggaccgttgctgatcccggactcggtggaagcacggtactggttcgagcaggcggcggatcagggacatctggtggcgcagtactctctggccaagctgtacctctccgatgatgtggaggtacgggatatacgtctgggaatgaattggctgtacaccgccgcagtcaacggcagcagctacgccatgtatcggctggccaaagagtgtctcaagggcgaagttatcgaaaaggatactgagcacgccatagagtggttcgccgagtcggcagaacggggaaaccagtacgcccagtacatgctgggcaagctgtacctcaccgtaaaggaagttccctacgatgaggagcaggccgtctactggctgacccggtccgccgaacaggacaaccagtatgcccagtacctcttggatcatctggaggaaaaccgtccgccctccgcgatgctggcggtgacccggctgctccaccacatgagccgggtgttccgggacaactccgtacccaagtcccgacccggcggtatccagatcgaccggaagcggctgaagaagcttcaagaaaagcgcatggccttgggtcataaaccggacgaccatgaggagcagtggcccaatctgaccatgtaagtagctcagaaactgcgccgcaaaacaaagaaaaaacccttccgcccggaaggtagaaaggaactgaatgagaaaatccaaatacaattcttttgacgaactcccgctgatgctgaccgtggaggatgtgtcccatgtgctgggcatcggtctggcccacgcttacgaggtggcccaccgcagggatttccccaccatcaccctgggcagccgcatcatcgttccccgtgacaaattcatggaatggatcgacgaacaggccgcgaaaaaatctgaaatattgtgatagctatttcggaaattctgtggtatgtgtttgtgttaaaaaggagggatcataaatgaccaagaaacgagccaacggcgagggcagtatccgcaaaaagcccagcggccgttgggagggcagatatacccagggcatcgacccggtcaccggccgagccatccagaaaagcgtgtccgccaagactcaggcggagtgcaaagaaaagctggagaaagccattcgggagaatcgcggcgtgccactcaatcacacgggcgactacaccgcagcggagtggtgcagactgtggtttgagacttacagcaagccaaacatccgctacaacaccgccaagggctatgaggggatcattgaacaccacatcattccggccatcggcgcgatcaagctcaagcagctctcgtccatccacatccaaagaatgtataacgacctgaaagaaaacggcaggatgcagcgtgggtcgaagcagaacgacaaagccttgtccaacaccttcgtgcggcgtgtccatgcggtactgcaggcggcgctgaagcaggcggtgaaagagcggctcatcccgtacaatccctgcgagaactgccgcatcccgcccaaggacaagaaagagatgaccatcctcccgccggagaaaatcggcagatatcttcaggaagcggagaagtacggtgtcctgcccatgttctatctggagttgtccagcggcctgcgccgaggagaactgctggcgctccagtgggaggacttgaatgtaaaagagcgcatcctgacagtgaacaagcaggtcacccgcatggagggcgagctggatgtaacagagccgaaaacgaaaaactctgtccgcaaggtggcgctgtcgcagcaggcggtggacctgctggtgcaggagcatgaacagcaccctgacaaccctatcctgttcccgtcgccccggacaggcggctactggagtccggacgccgtgtcgaggatcaaccggaagctgctgaaaaacgcaggcatcgaggagcatgtacgtttccacgacctcagacacacattcgcgaccatggcgatctccagcggcgtggatgtaaagaccctgtccagtatgctgggccactacagcgccgggttcacgctggacacctacacgcatatcaccaacgatatgcagagaggtgcggctgagaagatcggcggcttcatggaatcggcaacggcaacgaccacgccggaacctcccgacccgccggaggagagccggtgcaaggtgattccgttcgaaaaagtggggtaagaacgaaagttgcccaagggacaaatgcgtcccttgggcgtccattttctgttgtaaggaaaactccctcattttttgtgcgaaggcaaatagtatactttcccatccttcgaaatcaactgcacatcttcaacatagaggtctgagctatcatggtgcagttcattgtgtccgccaacctgcgaatcgatcataccagcagttcgttcagatatggagcagaaattccacgcatcatttatcagtccggggatgaaatgaatagctttatcccaaccacccctcttccggcgtatttctgcagtatcgacactaagacgtttcgtggttccttgatgccaatgcgttaggcgagtttgtgtttcctcgacttgctgagtataggtcggtagcaatgcggtacactgctctctggacactgcaccgagatgcagggtgaatctcaggtcagaaatcttatagagcattttcagtaaggtgttctgataaatgtaccagttctgagcttcttgcaattccttttcataggcttcaaaatcgaggtcagttttctttgcgaagcctgccaaggtgagattggcttgccctaaaagcttagtgcattcttcttccagactatccaactgtgcgattttagaaagcctcaattcatcgttttcaagaatctccccctgaaactcagcgattgtcttaacatggttgaccagagagaaaacccggctccgatactcattgtcttggaaatccgaaatttttgagatgccgtcactgatctgtcctaactctgcgttgatttgtgtcatgtaatattgaccaacaaccattgatgcgacacccattgcggctgcagctgtgttggcaacaacagcgctacctttctgcgcttcaactgcaactaaatttgcgtgcccttggataccatctgcaccacgatagaaacctcgaacagcaccttccattcctctggaattcgttagttttgctccggcaggaataatagcacgatacaaaacctctccttgggcttctacagcttggccagcgttattcacggcgttgccggcttgtgccaaattgggaataaggttgttgactcgagccaaaaccttgctgtctgtgatctcaaccaaactgccttcttcgctgatagcttcggcaggtagcatttctacttgaatgaccaaatcatgtgcagactcaccttgcggcgcggacagggatagttcttcgtcttctttgggtgacacagagactgttggtgtcactgtggctttcgacttgggtttgaaaaatatacgcgcaccaatagcaacgattgctatgaggcaaatgccaattactatgtactccatatatggttgtacctccttttctactctataaaagaggttgtaaatttcgcgagattacatcggcaaggattatgcctacgcatgaaattcctatcataatttattatagtgaagattacgctcaatttcaatcgccgtatcgtctgatatgcgaattcttgggggttcgtttgctgttagggattggttagggatttagcggccttcggcattcctccataccaagggtgcaacggccattttacctctctgaccacagttgaaatgtggccaaatgcagtctgaaagtcgaacttttaacgcagaaaaaccgcctaaaaaggcggtttttcaaagaaaggtggtcggagtgcagggactcgaaccctgggcctcctgctcccaaacttatcgggaatactttttc

SEQ ID NO: 12352 - DNA, 118281 bp, Unknown
  gut microbiota DNA sequence
aatggctccgctttttctttgggacaacctacggaccagaaggccgggggttcgaatccctcacggcgtgccaaaaagacccgaaaccgtaaggcttcgggcctttttgtttgcataagttgttgttttctcccgctgcttttttctgacccaaacgctgaccccaacgggagcggatagcggaaaggtctataccgcacgggataggatattgcccattgtttgcgccgctttgagttgggcgtcggtggtgacgtgggcgtaggtgtccagcgtgaaacccgccgagtagtggccgagcattgatgacacggtttttacatccacgccgttttgcagcgccatcgttgcgaaggtgtggcgcaggtcatgaaagcgtatccgtggcagtcctgctcgctttagaacgcggtgcagcatatgcaacacgctgtccggggatatagggcctccggtgggcgatggaaatacccactcgctgcttcccaccttgtttttctgtgcctttagaacgtctatcgcgtctgccgacaacggcagtgtgcggtaggcgtttttcgttttcagcggggcttccactaccttgccgttctgccgtgaaattgcccgttggattttcagcacaccacggtcgaggtcgacgtctgcccatttcagccccagtagttcgccccgccgcaatcccgtggcgaggtcgaggtagtagagctcgtacacgccgctgtccctggcctcttggaagaaggtgctgagttggtcggcggtcaacgttttcatctccttgtgctccaccttcggcaaggcgcagccttgcgtcggattgcgggttaccaatttctgctccatggcgaggttgtatgccgacccgatcatctggtggatgttgcgcacggttttcggtgctaacccttccggtttctttttcgcctcgatgcggtctactcgcccgccgtccagcaggtgcttgtagaaccgctgcaagtccagagaggtcagatctgccaacgggatgccgccgatctgcggcttgatgtggttcttcaaaaagccttgcgaggtcttgaacgtggacgggcgcagcttgatttttgcgtagttttccatccacacttccagccaactccccacggtgtagttcttggcccgtccgtagtcgatgccgatgttttcctcgatggcttttttcagcttttccttgacttccgcctgcgttttgccgaggacattcttgatgatggccttgcctgtctctggatcgtggccgacagtgtaccgtccctcccagcgaccgtcctttcgttttctgatgttgccttccccgtttgctcgtcgctttggcataaaatcagcctcctttgtaacggcacacaataccgtaaacagcagagaaaagctatggggaagccacactattatcagaaagttatcaattctcaaccgccgcttatctttgtttatggcgtagcaagatttgagctgctacggagacttccgccgactacaacggtataaagcgtaccgattttctatcaaagcgccgccgcaaaccgttgtgacacggggctttgcggcgacttttctcaaatttagcgtcaaaccgttccggtaccctcgaaaaaagcgtcaatttccaaaacccgcaaacccttgcggcagctcgcactgcgggctgctgtgaataggcattggcgcgaaaagcgccaatgcctttctcctgctttctcgccgcagcgtccaaaatccccctattttgcccgtctcggtgttttccacggttgccgcatttcctctttcgaccgaacccgatgcgctgggctttggtcgaattttctgttctcccgcacggtggcgcaacgtccggtcttgggtttccggtgggtacgcgcccggctgtgtccggaaaaccggacacagccgccacacgcggctcacgcgggtggacaggtggttttctgccgtgcctgttggagcgcttccaagcgttttcggatgcgttcctgctcacattccgtgtccagctttgcaagcttttgctcataaaactgctggatagagaactgaatgggcaggagcgtgtacagaaggcttccgttctgcttgcgtccatcctgcgtgatgatcgtagtgcgttccgtcttgatgagtcctcgctctaccagttctgtcacatattttcgcacggtgttcggactcatattgacggctttaccaatcgttttgtagcttgcatggcactgatatgtcgtccgatcctcagtgtacatcagatagctgtagacagccaacgcgcccggtgaaagaccgagggcgaaaacttcattcggcagaggaaagtagtttttaatcggatcgcgcgacgtgtaatacttattcctcatgcgtgcctcccgtctgccgttctacccatagacggaactgctccttcggtacgacaagccggctgccgatccgcagcgacggaaagccgtcctcatgcagaagttcataggcgctcgacggcgaaacgcccagcgtgcgggagacaagctgcgcgtttagaaacagcggcagctcgtcaaaatttttgatgcttgatgtgttcaaagtcttttttacctccatataattttagaattttcggagaaaaaacttgcgtttcggaggtccctctgttagattgaacacagttgcagtccgtgttttccgaaacgcggcgcgccgtccgactgttgcagcagccggacggcttttttcttttccggttaccatcctccatacccgttcctgccctgcggccttttgttgacgcacacggcgttggcttcgcctcggtacgctggctgcttttgcagcgtcgcggcatacttctccggcgagtatcgtctttggagatgggtgtgaaattttcaaggtacagagcaacttttcgttgacaagctgtctatgtgatgctagactatgataaaataatttagacagctttctgattttaaggtaacatagagctatatttttgtcaaggctattacatttataatttacaattagtccatatttgaggtgacgactatgtggtatgcaaagatgtatttctccggtgagaaggagttctttgaaaatgatgcgttcggaatgcaggggctgccgtccaagcggctggaacttccgtttttggaaagtctgctgacgtttctggaactggacgaaaaagaaatcacgccgatgctggaacgcatcagcgtgaattgggaacgcttcgttgagagccgcgcccgcgaagcgtatacagccgcgatggtggagctcggtgtgctggccgagaagcacatttatcttcgccttctatatacgcgcagcttcggctgtttttccgtaaatggctacgatcaagcggaaattcaggcgattgctttggacttaaaggagtttgcaaagcagttttcagagacaaggaagcaggtcgagaagtttttgaaatgtgtgctggacgtggattccgccgggcgtgaaccgcagaaacaggcggcgaaaaactatcatcacgaccagccgagagatccggagctgttccgatttgagccaatcccgctgagctttgaaccggtcgagccgggccggtgcgcgcctgttttatactcgtccgtcgtgcgcgacatgatcgactattcgctgcgaagctgcgtcgagcgcggcgtgaccgtgcgccgctgcaagaattgcggccgctggtttccgcagaccggccgcgtgagcgcggagtactgcgagcgcccggtaaagtacggtgagcagcgctgccgcgagatcggtgcgttccggcagtggacgaaaagacagaccgatgacccgattttcaaagcataccgcaaggagtacaaaaagcgcttcgcgtggatcaaggccgggcgcatcaccgacgagcagttctatgcctggagtgaaaaagccagagaagaaaagaagaagtgcgaccgggagatcatctcgctggaggatttccagcagtggctccgcgactccaaaatatgaaaatacgctgccggtaagctgtcggcagcgtattctttgtctatagcggagcaaaatacagtccttttacgcaaacgttttcaccaggtcggaaagcttttgcaaacggaaatccgcaagcaaggaatttgccgcggagccgatggccgcagcgtagaaaccgccggcctttgcagccttgtatgcgagataacccatgtcatcttgttttcaaaactcatgcctatataatgcgcagcgctgccatcggcagaggcggaaagggaaagaggcttacagagatttgcagaaggtgtcgatgcggcggagcgcctcacggagattgtcatccgagcaggtgtatgcgatacggatgaagccttcgccgcattcgccaaaggcgctgcccggaatgcagacgaccttctgctcgtcgagcaggcggttgcagaactcgacgctgctcaggccgaagctgctgatgtcggcaaagacatagaacgcgccgttcgggcggttgcagcggatgccgtcgatcttggcgaggccgtcgagcaggatgctgcggcggcgctcaaagacctgacgcagctcttcgcagagctccggatggtcgagcgcaacggtcgccgcgtactggccgggggcgttggcgcaggcgttgaagttttcctgacacttggtcatgcggtcaacgatctccgccggggctgcgacaaagccgatgcgccagccggtcatcgcataggactttgaaaagctgttgacgatgacggtgcgctctctcatgcccgggaaagacgcgatgcagtgcgcttcctctccggcgtagagcagggtgttgtagacatcgtcagagatcaccagcagatcgtgcttcacggccagctcggcgatctttgccatcgtttcgcgcgtcataacggagccggtggggttgttcggggtgttgatcatcagcgccttggtgtgcggtgtgatgagcttttcgatggtttccggctgcatttcaaagttatgcttcagatccgtggggacgcggaccgccgtgccgtcacagtatgcgacctgcgccacatagttcagccactgcggatcctgaatgaggatttcatcacccttgttcagcaggatgaggaacaggagactcagcgcgcccatgccaccgttggtgatgatgatctccgtgttcgggtcgtagtgcagatccttcaggtaggatttttccgcgatggcctgacggaacgagagcgtaccggcgttcggcgtataatgcgtgatgcccttgtcgagcgcttccttgcaggcctcacagaccagcttcggcgtaggcatatcgggttcgccgatgccgaggctgatgacgccggtcatggtgtttgcgcggtcaaacatggcgcggattgcgccctgcttcagtgtttttgctttttcattgatccattccatgatattctcctgttatctctgcacccgccccgtgccgtcgccgcccatgagcttttccacatcggaaacgctgacacggttaaagtcgccgatgacgctgtgcttcagacaggaagctgcaactgcaaattcgagcgcggactgcttgtcctcatactggttcaggccgtagatcagaccgcccgcaaagctgtcgccgccgcccacgcggtcaataatgtcgcggatttcatatttctttgaaacatagaaatccttgccgtcattcaggcacgccgcccagccgttccagtcggcactgtggctctcacggagcgtgatggcgatgcacttcatgttcggatagctttccagcaccttgttgccgagcgctttatacttcttacgatcgagttcaccggactcgacgttcacatcgacggtaatttcgagcgatttctgcacgtcttcttcgttggcaatcgccacatcgacatactttgcaagctctcgcatgacctcgctggccttcttgccatacttccagaggttcttgcggtagttgaggtcacaggagacggtgatgttccgcttctttgcttccttgacggcttcgagcgacagctccattgcggattcggaaattgcaggcgtaatgcccgtgatgtggaaccaatccacaccctcgaaggctttgtcccagtcgatatcgcccggctttgcaagtgcgattgaggaatacgcacggtcatagacgaccttgctcggcagctgatttgcgccgccctctaagtaataaatgcccatgcgaccctcgctgcggacgatcttctttgtgtccacgccaaaatagcgcagttcgcggatacagcactctgcaatatcgttcttcggcaagacggtcaaaaattctgcgtccatgccgtaatttgcaagggagattgccacgttggcttcgccgccgccgaaggtcgcctcaagcatcgggctctggaagaagcgctcgtgtcccggcgctttcaggcggagcataatttcaccaaatgtcagaactttcatcttcgtccctccttacttctgcagcagatgcacggcgaaaccgccgaactcgtctttgaggtatgcagctgtcatacgtccgtttttgtactttgccgagctttcgtcatacgcaaagcccttctttgcaagccctgccaccgccagctccacagagttggtgcggatcgcaatatgaccgtttttgcccttgaacatggacttcatgacctcgataccgctggatgcaaacatcgaagagttgccgtctttgaccggcagaacaaacgctttgttcagcttctcgcagaccgcggatgccgcatcggcatcttcgcagttgacgccgacgtgcgctacctcgaaccccagcgcagcggctcttgcttccttgcagagctttgtgatcttctcaaaattaccggctgcaatgtccgccttcgggcagacccagctgccgccgactgcgtggatgaacggcgcggcgatgaactcgccgatgttctgaccattcacgccgccggtcgggatgaatttgatcccgccgaacgggcccgagagcgccttcatggcagaaagtccgccataaacgccagccgggaagaacttcacaacgtttaaacccagcttcattgccgccataatttccgtcggcgtcacgcagccgggcgtcacggcaacgccgttttccacgcaccagcggacgacttcttcgtcaaagccgggggatacgataaattttgcgccgcactcggtggcttttttacactgttcaagcgtaatgaccgttcctgcgccaactaacatgtcggggcagctttccgcgactgccttgatcgagtccgccgcagcagccgtgcggaacgtgatttccatcacgtccacgccgccggcaagcaaagcctttgccgtcgcgaccgcgtccttcgcgtcatccaataccacaaccggcacaacagccgatgcagccagtctttcagaaacattcattttgtcgactccctactttcatttgcgatgattccaataaacatcccatgcgtttcctgcaaacatcatctctcgctctttctccgtacagtcggacaaaaggaattttccgtgtgccaccaactgctgatagtttgccgtccccagcagccatggaatatctgtcccccataacaatttctttgctcccacgatcccgcgtgccaagtcaaaatagcgtttcgtactgggaaatggatattcttcttccttctgcacatgatacgggagcgcggaaagatcaaaccaaacatttggcaacgtacccaaacgaatctgctccaaccacgcagaccaaagctccgggttgcgctctgcagctcgcgagggctgccccatgtggcaaagcacgattttcaatcccggatgacgctttgcgatggacgcgatctgatctgtctgataagaaccatcgcctggccgaccgaggtcaaacgaaaccgtttttccacctgcttccatggcctcccaaagccatcttagctctggtgcatccagctgtacgccgggatagacaccgtacaggccgcccgcctcagaaaactcaattttaatgtttttccaaagcgatccttccagcttttcggcataatactggcgcgccgcgggactccaagggtcaaaaaaagcggaggcagtaaactgctccggatagtcccggcatgcttgcagtacatactcgctccagtctccatagcatgggcaaagaatcaggacagctttatccacctgtgcctgccgcatctcatgcagcagcatctgcaatgtatggctggtgttttcgttgatcgccggcagcacatcctgtgcaatgccgtctcctgcatcgatccggccatatcccgcgccatgggtatggccttttgggccatacccatcaacgtttgggaaaatatgaacatgcgcgtcaatcagcatagcttttcccgctcagttcatgctgccctttacgccctgaaccagttgatcgatcacgttgatttcttcgatcgtcggtctgtatccgtcctcaaacatgaccgaaccgtcctgcgcatagatcgggccctcaaacacggcaatctccttgttaatcaactgctcgcgcacttcaccaagcttcgccacgatctcatcagagactgtgtcgccaaatgttgcctgcttgatcaggttcagttccatgccgccgctgatgttcaccggttcatattctccgtcaatcgcctgcttcagatacggaatatagccgctccaatccgtaatgcacgcagacagccacgtctggggatccagctcatacgcatcagagttgcagccgaagcagtgcacgccacggctgcggcagatttccatcatcgtcttgatggaatcctggaacggcgcaatgacatcacaaccgctgtcgatcaactggttcacagatgtggtctgcaggccagtatccgcccacgacccggtaaagaccgcggtaatatcaatctcaggcttgatcgactgcgcgccaagtgcaaacgcgtcgatggcaacaatgacatccgggatcggcagagagccaatgaagccgatcttgtccgttgtcgaatacatggcggccaggacaccattcagataccagacatcctgcacttctccatggatgatggaaaagtttccgccggcgtaatccgtgatcgggagcgaatagaacgctacctcaggatgacgcagcgcgacattgtgcgagtattcgaggaatccaaactgcgaggggaacagaatggtgcacccctgtgcaatcagctcctccatgacaccttcgctgtcagaggttgtagggacgttttccttaatcacgacttcaatgccaagctctttctcaacaagttcaccaagctgcacgaaattcaggttgaagccatagtcgtcttttgttccgctcaggataatgccaagcttctttgcccccgcaccgggcttgacgtcgcccgtctgttccgtctgcgtctgggtggggtcagccggctttgcgcatgccaccagcgttgccgcgagcagaaccagcaccaacatcattgcaactacttttttcattgtttttcctccgtcctttttctttaagtaataattttcagttgttccggcatcgacggctttttggacgtcgaaataattgccagagcaaccaatgtaaacaggtagggcatcatcaatgtcacatacatggaaatgggcacttcgtggatctggaagaatatctgcagcgcctgtgccaggccgaacagatacgccgcaaggtatgctcgctgcggcttccacgagcagaggatcaccagagaggaggcaataattccccgtccgttgatcatgttgtttgcccaactcatcgcatagatcacgctcatatgtgccccgccgattccagccagaacacctgcaaaaataaccgctccgtattgcagaaccaccgggttatacccgtacgctcttgtgacatcaggccgttcccccacagaacagagcaccagccccgttcttgtttttgtcaggaaccaccaagctaacaccggaagtacataagcgatatacgtcagaatatcctgctgaaaaaaggccggcccaatcaccggaatcttgctcagaaccggaatggcgagggaaaacgactttccaaggctgacgccgagctgcgatcttccaaaaaaggtggtcaggccctgcgcaaagaaaatcaggataaacccggtcgccatcatgttgctttttctggagatggaaaggaacgcctggatcagcccaatcaagccgcctgcaatcgctgcgcacaaaacagccaaaaacaggcttccgctcccggctgctacggcaaagcctacacatgcgccacaaagcatgcttccttctacgctcaggctggtgatgccggttcgttggccaaccaaatccccaagcagcgcgtaaatgatgggagttcctgcgctgaccatgcaaatgagaatcgttgttagttcattcatgcctttctctttcctcccaccgtcataattgtcagcaaaacgagcatgatcaaaatctgcattgtcgccgccggaagcccggtgttgatctccatgccgttaccggcgacggtcaaaccgccgatcagtaaggcggacaggatcagcaaaagcgggttgtttccagccattcctgcagcaaggaagcccataaagcccatggtctcgcccgcactgatccgcatacggccctcgacgccgacgaccatgaccgcgccggcaaggccggcaagtgcacccgcgaacaagaacacccaggtctgtatttttctcacttgtatgcctgcgtaacgtgcagccatctggtttccgccgatcgtacgcaccgcaaaccccactcttgtatgatagatgatataccaggtcaagcctgccatggcaatcgcgacaaagataccggcgttcattcttgttccaaaaaaggtgtgaaaacgcagctggggcgcaatttctaccgtctgcgggtaattccatccatttggatcgcgaaggctgccaaacagcatggcagagatcaggtaggtcgcaacatagttcataaggattgtcgtcaggatctcgttcattgcaagcttctgcttcagaaaaacaccgacgcctgcatacaaagccccgcagatcataccaaccagcagcatcagcgggattccgataacaccgggcagatttgccagcactgtgcttccggcaacagcggttccgagagcggcaatcgccatctggccttctccgcctgcgttggccaggccaacacgggccggaatgcttgccgcaagacccgtcaggatcagatacgacgcacggacaattacttcgccaaagccgtaagccgaaccaaaaatagatgtaatgatggtctgatacgccacaagcggcgatttgccctgcgacaggagcagcccggcaaacgcgatcagaggaaacaggacgcagatcaggatcctaactgccaagctgtcttgaagttgcagcggcttcttttgtgccttattcatgtgcgttctctccttgaagcataatttttccgatctcattcggcgtacacgcgtctacacagtacggtccaaacgcagtgtgagaagacaggaccaggatccggtcgcacatcgtgaacagctccgagatatcttcggaaatcaggatcgtacccacgccctgttttttcagccggaacagtgtcttgtggactgcgtgtactgtggcgatgtccagtccccggcttggataactggcaattaacaggcgcggtctagagataacggcacgggcaaacgtcattcgctgcagattgccgccagaaagtgtcccggcaattctttctgcctgtgggacccggagggtcttgacctcagaatgtgtctgcagctgactgcgcattgcctgccagtccatatcaccatggcggtaaatcggatccaggccgaccagcgccatgttttccagaatcgaaaacgtcggaacaacgttgtcgcgaatgggatcctcagtcaccattcgcatccccaaccggattctatgcgcaatatctgttgaggagatatcctcttcatttgcgctcaggataccgctctgcagcttccgcgctccgtatatggcctccgccagttctctctgcccatttccggatatgccggcaatgcccaggatctctgctttgtgcatttcaaagctgacatcatgcagaatcaactgatcgtggtcatcctttatgctgactccggaaagcgacagctgcagtgccgctgcttcgttttcctcactgcattccgggcgttccagctcaaagttgaccggaacattccccatcattgccgagatgatctgctgctggctgaagccatctctgcgttcaaaggtacagacatgttcgccctgacgcagaattgtgattcggtcagccacagcaaggatctcgtcaattttgtgcgtgatcaggaagatcccataccccttattgcggaatccgctcagcatctgcagaaaagcctgcacttcgtgcggtgccagcacgcttgtgggctcatcgaaaatcatcacacgggtctgcggatccagcagaatcttcaggatctccacatgctgccgctgtccgaggtcaagcttccaaacctccgtgtcaggatccacggaaaggcgatactccgcagagattcgattaatttcatcgcgaagcttctttttattgatcttccacccggcagaatggagggaaaggaatacattttccagaactgtgaaagcaggaacgagccggaaatcctgaaataccattccgatacccttttcgcgggcaatcgtcggattccagcgctccattttttctccgtcaatatacagatttccggcagtcggctgatagacaccatagagcatcttcatcagcgtactttttcccgcaccgttctcgcctgctatcgcatggatttcaccggcgtggatttcgatgtcaatctcccggtttgccgtcaattctccgaatcgtttcgtgagtttttccgcccgtaaaatcggttccactcgccgttcctcctgttttatcatctctgctcactatagatcacaacatgatttccatgcggatcaagcagggtaaacgcccgcgttccgtccttgcagccacagggttcctgcaaaacctgaaccagcggcgcttcctttttcatgattgcctcaaagcaactgtctgcatcctgtgcttcaaacatcagcgtctcgttcccctgcggcatcggatcctttctgcaaagtacctccagcgttccgtccccggatccgattacaaatttatgcccccggtcctttgttccgtagtcccaggtatagcatgcacggagcctgagaatatctcggtagaatgccaggctctgttcatagtccgccacatctacatacgccactgcgcggtattcaccacggaacatccccggaactgtcggctgccaaccatgctggtactccatcacatcacgactccaggagaagatcacaatcacgttttcatctggatcgagcagctggaacagccggattccatacgggcggtccgcgatatgttcataaacatgcagccccggttttcttgccaaccgcgaatagcagtcatcaacattgtccgcctccagcataatcgtcgtcggcccctgcggaagatcggcgccggccggacgcagctctactgcaccgcctgctgcagcaaagcggcagccctccattccgccgtcccagaccggaaccagttccaatgtctgctgatagaagttccggctccgctccaagtctctgacgcagaggaccgtccgtacctctttttcaaaataatccctgtgctgcatacttctcttcctttcttccgtttcggatatcgacccaaaatacatatatttatgcttgcaaacttcttaataaatgactataatcagtaaaaaagctggaggtgcttcttctatgctccgtctatcctcacaaacacaacaatccagggtgcgcgcacagcttgaactcctgctgcgcaatgcggaacccggcgaacggctgccctcagagcctgcgcttgcaaagcgtttcgatgtcagccgaaccacgatccgggaagtcatgagccagttggaaacagaaggcttcgtccagcgcaggcaaggaagcggcacctatgtgcgtcgtcagccgctgctggaggatgaaagcctgctccactttgtcgattttccgaggctgatctccaagcagggacacacgcccgccatgcggcagctcggatttgtgcagcagcgcgcaggagctttcttttccacccgttttcacatcggtgaagaagatcggatcctcacccggcgctgcctgtacacggcagatgaacatttttgtgtactggctgaagacagtttcccgctggccttcctctcgaaaggtcagcgtgtacagctgcttgggtcaaacaataccgatctgcggcttttcctttttctcgcaaccggccgcgccgcctgtcaggacgaaaccacaatctccgttgcccaaccggaagactacccgttccttgaatccctgctcgaggacaagcagcatccgctgctctttctgagcagcatgtgtcttgataatcacaatgaaccgtttatcagttcgcagatttactcggacacagactatatcaagtatcagctgaaccgcaggatcgtctgaactcagtgattgctgtgatacaggttgatccggtttccacaggggtcttcaacggcaaagtaccttgtaccgtagctctgtgttacaggcttgctcacaatccggatgccttctgcagccgtaagctcctgataggtctgatcgacatcttcggtttccagattgacgatcacagggccggtctttctgtcatgtgcctgacagagtacgctgattgtaccgcgaccagcccggaactttgcgccgcaatcctgcgcgctttcgttccaactgtaatatggcttctgtccgagcagcgtttgatagaagtctcggcagacagaaaagttttcctcttcggtgtatagaaggatttgaatgtctcctgtaaatgctgtcatgttcttattctccttttttgtagacacagacgccgtcaatatattttgcacagatgtctcgatcatccgacctggtaattaaccgttctatccgctcatacggtgtccgctgcacgccgtcgcagaagcggctgtcatccaaaatcaccgcatcaaagcaatatcccggttcaaagctcccgcttttccaaagtacgccgccgccttttgttgcaaggtaaaacgcattgggcagagacaaaactttccgctgatccatattgcgcgcgctgtttttggaagcccaaaagactttagacgccaaaatcgcttcaaagatcgttcggaacatattcagggtattgccgccgccgacatccgtgcccagtccgactgcaattccagcatcgagatattccatgattggtgctgcgcaaccgcaactgttcatattcgactgtggacaatgtgctaccagcacattgcgtcttttcagcgttttcacctcttcgggggaggaaaaaacgcagtgcgccatcacagcccgtgtatgcggtccaagcaaaccagcacggtcataggcctgcgcataataatcaagatccggtgcaagctcgtgcacccagtcaatttcatccagcccctccgaaagatgtgactgcactgggacgtggtattcctcggcaagctctcccagttgctctaaacagctttccgtacaactcgggaaataacgcggtgtgaggatcgggtagattgcaccaataccatctttcgtttcctctagccaaaggcgggtctgcgcaattgtttcctctgttgtttccaacagtccagctgcacagtttcgatccatattgactttcccaacgtaacctgcaaagccgaactttgccagagctttcatgagagtctctgtcgccgtgcggctggtcgtggcataggcacacaggcgcgtcgtcggtgtagcaagaagtgacttcgcaaagcgagtgtaggtcagttccgcatacgctggatcgttaaatctagactcgtctgggaacgcataacgctcgaaccatgtgttccactgtccgttttcaatattttgcccaataccttgaaagggtgcttgtgaggcgtgaacgtggatgtcgcatgttccgggaatcacaaatttcccgcttgcatccagaaccttaatttgacgatattgctccggtaacgctgaataagtccctgcaactttttttccatcgcagaccagatatgcgtcttccatgatggtaaattgatcccgctgtgcggtaaaaaccagcgtccctttgattgcaaagctccgctccgcaaaatattcaacttggctcatagcatcccctactcggcaattcatataattcttagctacataatatcaacatttttggtcaccgtcaacacaaacaagtgcttcaataacatctttggatacatgcaaaaaaacactctgtttacctccctttcttttctgttaaaagtgcaatttgtacgacaaattacccaaaactgctctgcgactgcccatgggcatcctgcttatgtcctatcgccacccgcttctgcatgagatttttacggcgtttggagtccacgcagatgcccatcgggttgctgggtggcgcggcggtgtcgtggaaaacttgcctcatctggtgaaacaatttgacgcttgaactcaaaagatattcggatggaagacgcacttggtgagaagctgcggatagagtattttcacctgcaagtgtcggatttgtagaagtctgtgcaaaagaatcttcgagctgaaagcgcaaatgcgccgcttcttgaataatgacgttcttgattgcgcgaaattctttctgctgcgaaagcggattgtgcttgtccggacctgcttttgtagtaactttctagcgtatcacgcaggtcattccagatggaataatacgttgctacctccggcatcttttcaagttcatccacgatgaaatccagcatatctttcagcggctttttgaggtacccatattgctttttgccattgaccgtacgcagttccatcgcaaactccaacagtttctgatgaacaactccgatggattttcaatactctagctggccaatgattctgcgcatggcctcccatgccgctttgttcacgtctttgtcggcaacatctttccgaacgactatcagttcgtctgtatacacacaaagcttttgcagaccgtcatttaccacgctaccatagattcagcacggagcatacgcgatcgctgggtccacagaccgggcgcgtgagcgcggagtactgtgagcgtcccgtgaagtacggcgaacaacactgccgcgagatcggttcccacaaacggtacgacgacaaatgcaaaaatgaatccatctggctcgcgtataatcgcgcggacaaaacgcatttcgcccgctacctgaagcggaaaatgaccaccgctcaatttgagcagtggtctcggtatactgtagaattacggcagaaggcagagaacagtgaaatggaactggcggactatcagaaggaactgcgaatttgacgatttactgcttaatctttgattactgcggcgcagtttctgcgccgctagttttctgctctgacccaaaccgtgacccaaacgcggaaaaatccggcggatttatccgtaccggaaaggataccgctgtgaaatttcccgagcggaaaggtgtggaaatgccctgaaatgtccgcgaaaaatatccgaccaaccttcaggatgtagaaaccaaaaatattatgacaaaatccaccctgccggtgggcggctattccgtcaattcttatgtaggctgtacccatggctgcaaatactgctacgcttcgttcatgaagcggttcaccggccatactgagccttggggtacttttctggatgtgaagcattggcctgccatcaaaaatccccggaagtacgccggacagcgcgtagtcatcggctcggtgaccgatggctatctgccccaggaggaacagttcgaaaatacccgcaagctgctggagcaactgaaagacagcggcgcggagattttgatctgcactaagtctgacctggtagtacgggatatcgaccttctgaaagagatgggaaaggtcacggtttcatggtcgatcaatacgctggacgaggatttcaaaaacgatatggacaatgccgtcagcatcaagcggcggctggatgccatgaaacaggtttatgacgcaggtatccgcaccgtgtgctttatcgctccggtttttcccggtatcacggattttgaggctatcttccatcaggtcagaaatcaatgcgacctgatatggttagaaaatctaaacctgcgaggcggattcaaaaaagacatcatgaactatatttgtaaaaaatatcctgacttggttccgctgtacgacgctatctacaacaagagagacagaagctacttccgtggtctggaagaacaggcggagcaccttgcaagagaatgcggttgtccctttgtggacaacgaactcccctacggacgagcagagccggggcatccggtcattgtgaattatttttaccacgaggaagtacgcggctcggaaaacagcgggaagcgaactcaaaaagtatgatcttagggtgctctgaaacatagtatggacaatcgacacccacactctaagtcacgtgtgtcaacgtgataaaaattatattggacaaacgcttgacaacttttgttttgtaatttcaaaattttctgacccacttttgacccagaacggaaccggagcaggtaggtctggacggaaacaacggaaaatccgccgagcgaatggcggtaaaaagcacaaatcggagccgaaacggctccgatttacccttgagacaacctacggaccagaaggccgggggttcgaatccctcacggcgtgccaaaaagcctcgtaccgctcggtacggggctttttgttatccacagaagtcaacaggaggtctgttatgcgaatcatccgagaaaaaaccgccgccgtctgcgtggactatcaggagcgtatcctgcccgccatgaccgatcccgaaacgttgctccaaaacaccgtaaagctgctgaaggggctgcgggtgctgggcgtccccgtatacctgacgcagcagtacaccaagggtctgggcgataccgtggcccccatccgggaggccgccggcacatcggagcatctggaaaagctcaccttcagcgcttatccccagctgcgggagaagctgctgcccccggagcagcagccctatgtgctgctctgcggcatcgagagccacatctgtgtgctccagaccgccatggacctgaaggcccacggctaccagccgtatctggttaccgactgcctctccagccgcaagcccgccgaccaccggatggcgctggagcgggccaaacaggagggtatcctcctcaccacctgcgaggccaccctcttcgagctgctggccgccgccggcacccccgacagcaaggccatccagaagatcatcaagtaaaaagcgtgggacgccctccggcgtcccacgcttttgcctatcccaccgggatatccacaatgccgatgccccgtcgcagggcgtattcgatggtgcgccgggttccgccgggaagcccgtcgtgtacggcgatcagcagcgaggcgtgatccaccatgtaccggttgcgccgctgcatacagccggggctgtactgctgctgcaccatcgtctcatagtcgcaggccgccaccagccgctgccaccgcagccgctgctccgccggccacccctccgcctgcgagggacacgggatggccgcctccaccgtcacgtcgccgtgcagctgccgcagcgccagcgccagctcgcagaaatacaggtcgcacccttgggccatgccgcagatgaagtggcgatagccccgctcataggccgcctccatcgcgttccacagccgctccttcagcgcaagacaccggcgatctccctcatcgtcgccccacggcagcttaccgggccgatggccggaaaaacagcagctgatcggtctggctcgcatagcgctccctccttccccctttggtttccatttcattatagaacatattttctattttgtaaagcccaaaaaatcggaggacggctcccgccgccctccgtcatttcacttctgctcctcgtacagggcctccagcacacgggcatagagatgctccgggtccttgcgaaaccgctccgccagatccttggccatctcctccgtggccaccatcagctccagctgcatcaggctgtccacatcgtcgctgagctttaattccacggtgtaggtgccgttttcccgtgggatggccttcccctgcacctgcgcctgccgcagcagctccttgttgtattcctcgatgttcctgtccgtccgcagccgcacggaatagggcaggctggactcgcagatggcgctgtttttcagccccttgggggtgatggcgtaccgcccctcctccgtcaggcgcagatgctccgtctgcaccagatcgttcagacactccgaaaaatcgaaatagtcaatgccgtcgtcgcacatggtcagctcctgcatcccctccagcggcagcggctccgacacacgggcggcaatgtacaaaatgagaaacttgatctccagcttgtcacggataaatccgactcccattggatcacgtcctttcggcttttctatacacccctattataatgaaaaatttccggtttgtacagaggtttttcccctcctcgcctgcatttcccgcaccccgccgggccggacgcatagactggattgaaagggcgatgcccttgagtacttaaataggaggtttttctatgcctgaaaacggtatgcccggcccggtctgcgatctgagcagcgtgcgtgaggccgtctgcatccatacccataagatcttcgactcctgccgtgacaaggactgcgtggaggatctgcgcttttaccccacggcatcggctcaggaggtgctgtcggcctgccagatggtgcggggcggcacggcggagctgctctacgtctataccgacgtggagcccgtcaccttcaaccgggggttctactccatcgatatgcggtttttctaccgggtcactctccaggtcggcaccggcactccccgctgtaccgaggcggagggcctgtgcgtctttgacaagcgggtcatcctcttcggcagcgagggcagcgccaaaattttctcctccgacacggtgctggacgatctggatatccccggctgccgccgcagcaacctgcccacggcggtggtggaggcggtggaccccatcgtactggacgcccgtgccgaggaccgctgcaagccctgccgctgcgactgcggcctgacggagatccccgccttcatcgcccagagcttcgaccagcccctgctctttgatgacaacggcggccgtcggtattatgtcaccttaggacagttctctctggtgcggctggagcgggacacccagctgctgatcccggtgtatgactactgcatcccccagacggagtgcagcggcggcgatcaggaggacccctgcggcctgttccgcagcgtggccttcccggtcaacgagttcttcccgcccaacaccgtggagatgcccaaggactacgccagcacccgcagctactgcgcctgccactgatccttccctctttccgttgccccattttccgtaagcgcactgctccatcccaacgacaagacccatccggcataaaaggccccggacacccatgggtgtccggggccttatctcacgctttgcggcatctgctgcccgcaggcggcaagagtctcattttccggtgaaggcggttttcaccaccacgttctccggacccagccactcccggcactcctgcacgaaggccgggtggttcaggcacttggcccccaacagcttgccgctgtccgccagccggatcttcagtggcgtgttcccctcaaacatggtcatcaccagcttgatatgctggaacgccgggctgtccatgccggggacccgcagataaatggtggcgttctcctgtgccggacggcggttctcccgccggggcggcagcccctccttcaggggataaacgctgtcgcacatgatctgcggcggcttctcgtcccggacggagagcttcccctgcaccagcaccgggctgttcacctgcatatagctgccgcagcgctcaatggtgcggctgaagcacagcagctcgatggatgccgcctcatcctccaccgtcacgtaggccatgagggcgttgttgcgggtggtgcgggtgcggctggcagtgacgatgcccgcaatggtgatgctctgaccgtcggcgaaccggacaggcccgtcctcggcggaaaagtcctccagaatggtgtggataggcaccgctcccgcctgccgggccagcgcccggtaatccgccatggggtggccgctgagataaaggcccgtagtctccttctccatgaacatccgctcggcggcggtgaactccggaatgtccggcaggggcgtctccgccggcggggcgtcctcccccgccgccataccgaacagatccagctggccctccacgttcttgcgccgggactctgcaatgctgtccagcaccttttcaaagacctggatcagctgggagcgccgcaccttcatggagtcgaaggcaccgctgcggatcaggttctccactgcccgcttgttcatgtccgtgcagtcgaacatccgctggcagaagtcctgaaacgaccggaaggggccgtcctgctcccgccgccgcatcatggtctggatgaagccccggccgatgttcttgatggccaccagcccgaagcggatgcctccatcctccacggtgaagccgtcgctggagcggttcacgtccgggggcagcagctcaatgccgcagtcccggcactcagcgatgtactcagccaccttgtcggagttatccagcaccgacgtcagcagcgccgccatgtactcccgtgtgaagtagtgcttgaaatacgccgtctgataggctaccaccgcatagctgacggcgtgggccttgttgaaggcgtagttggcgaagtcgtagatctcgtcgtagatggcctgagccgttgcctccgggatgccgttggccacacagccccggatgttccgggtggggtcgccgtggaggaatgcctcccgctcccgctccacatccttggccttcttcttggacatggcccggcgcaccatgtccgcctgccccagcgaatagcccgctagctgctggaagatctgaatgacctgctcctgatagacgatgcacccataggtgccggagaggatgggctggagggagggatgcttgtacaccaccagcttggggtcgtgcttgcaggcgatgaaccgggggatggactccatggggccggggcggtacagggcgatgatggcggtgatgtcctcgatgctctggggcttcagccccacgcacaccccggtcatgccggcggactccatctgaaatacgccgccggtcttgccctgcgacagcatttcgaacaccgccgcatcgtccatggggatatccgccagccggaagtccggtcggtacttctgcaccatcttcacggcgtcgtccaaaaccgtcaggttccgcaggcccagaaaatccattttcagcagccccagctcctccagcgtcaccatggtgtactggcagacgatggactcgtcgttccgggccagcggtacatattcatataccggccgcttagtgatgaccacaccggctgcgtgggtggaggcgtggcggggcatcccctccagcgcctgcgccatgtcgataagccgatgaacccgttcatccgtctcatagaggtcggagagctgcttggacagcttcagcgcatccttgatcgtgatgtgcagggccgttggcaccagcttagccaccacatccacctcagcataggtcatgttcagcgcccggcccacatcccgaatggcggcccgggccgccatggtgccgaaggtgacgatctgggccacatggtcgtcgccgtacttgcggcgaacgtagtccaccacctcgccccggcgggtgtctccgaagtccatatcgatatccggcatggatacccgctccggattcaggaagcgctcaaaatacaaatggtactgcatggggtcgatgtccgtgatgtacagacagtaggagaccatgctccccgccgccgagcctcggcccggtcccacagggataccggaatccttggcgtaccggacaaaatccgacacgatgaggaaataatccgtaaagcccatgcgtccgatcatgtccagctcgtagtccagctggcggcggtattcctcgtgctccgtgccgtagcgctcggtgaaccccttttcgcacagctgccgcagataggtgggagaatctacccccggcggcagctggaactccggcaggtgatacttgccgaaggtaaactccatccggcagcggtcagcgatgcgctgagtgttggccacagcgtcgggataggcgccgaacagttcctccatctcctccgtggagcggaggtagaagtttctcggctcatagcgcatccggttctcgtcgtccacggtcttgcccgtctggatgcacagcagcacatcgtggctctcggcatcctccggccgcaggtagtgggcgtcgttggtgcagaccagcgggatgcccgtctcctgatggatgcggagcagatcccggttcaccagcgtctgctgggggatgccgtggtcctgcagctccagatagaagtcatcctccccgaagatctcctgcatggtcagggcgtactccttggccccgtcgtagtcgccgtttaccagccgcttggggatctccccggccagacaggccgacagggcgatgaggccctcgctgtgctggcgcagcaggtccagatcgatgcggggcttgatgtaaaagccctccacaaatgcctgactcaccatgtacgacaggttccggtagcccgtctcgtttttgcacagcaacaccagatgccgggactcggcgtcatattcatgaactttgtcaaaccgggtgcggcgggccacatacacctcgcacccgatgatcggatggatgccctctgctttgcaggcccggtagaagtcgatggcaccatacatgaccccgtggtcggtgatggccaccgccgtctggcccatttcccggatgcgggccggaaggtcccggatgcggcaggcaccgtccagcaggctgtattccgtatgcacatgaagatgcacaaatcccatagctactctttcctccgtcgcaggttcatccctgaccgcttgctcttggctgcttattttcggctgcttatttttggccgtccagctccgccagatagtcacacagcagctccaccgccgagacgatgagtgttccgcagtggtcgtcggcccctaccgcctgcgccgtaggcgtagcctgcaggccacgctccgccagcagttcccggcagttcagcaggtgaaactgctgggtaaaacggcgctggaactccttcacctgttccacagagcgccgccggccctccggcccctcctgtgccgtgtagggatgcagcagacccagcaccagcacgccgccggacacggcgccgcagatgccgccgcagcgcatcccgctgccgaggccgctgccaaggccccagcactgctcctccgtcagacccgtcaggtcccggaaggcccccagcatgctctggccgcagttatagtgctgccggtgatagccaagggccagacggcaccgctcttccttcgtcatcacagcttcttcgcctcctccaatagcttccgcatccgatggttcatgcaggatttcgtcaccggcgggtcgcatttctccgccagctgggacagggacatctccgggtattgcaggcgcagcagagctgtctgccgcagcttttccggcaggcgctccagccgtccgttctcctgtagacgctggatggcatttttctgctccagcgcagcgtcaatggtcttatttacattggccatgtcgcagttcatggctcggttggccccgttgcggatctccttatccaccttggcggtcatgatatccatagccgccgccggggccccaatggtggtcagcagatcctcaatatgctcagactgcttgaagtaaataacagagctgccgccccggcggacgctgtggggcagaaagcccatctccgtcagcagcgtcgctacctcccggctggcctgtgcatggccggtatccagctccagatgatagcgcttttccgggtcggtgacgctgccccctgccagaaaggccccccgcaggaaggccgtccggcagcactcgtcctccagcaggccgaagttcacatggagcaccagattctgccggggatcgtagcccagctgattgatgatgcggtccagcttgctccggtcggtgatgccgaagatcagcttcccccgctcctcctccggcagacggtcgaatttcagaccgaaggcccgctggaacagccggggcagccgggcggcaaagtcagcgctctcggtaatgagccgcacctccgtggggctgaaggtattgccgtagagcagcacaccgtaggcctcggcccgtgcgcagcacaggcgctgcaccggcacccggcacagctcgtttttcacctttcccgcaaatgactgcataccttcctcatttctccactcggtttctcggcgtccggcggagggaatcctccaccagacggatatttctctgggcatggagccgcaccagttcccacgccaaatggcccggattatggcgcaccagcccgttttccaccgtggacacggggcgagtgatgacctccacccccagcgcctcgcaggcatcccggtcgcacaggatgggctccgccccctcacgggtatagccccgcatcaccgaaggtgggatgggggcgtcgttgaccaggcataagtcaaagaggccggggcagctgtggttaaacagcgcacggatatggtccgaggcagtatacccctctgtctccccctcctgcgtcatgacattacagacgtaaattttcagggcacgggactcccggatggcctccacgatgccatccaccagcaggttggggatgatgctggtatacaggctccccggcgccagcaccaccatctccgcctcccggatggcctccaccgcctccggcagggccttgggacggctgggcagcagattcacccggcggatgcggcagtcctgctcctgcttgcactgaaagatgcgggactcccccaccacccgtgcgccgttttcaaactccgcctccagctggatattctcattggtcaccggcagcaccctaccggtgatggccagcacctgactcagactctctaccgcccggtcaaagctgggcatgatgccgttgagggccgccagaaagagattgccgaagctctggcctgccagctctccctccgggaaccggtagtgcatcagctgggccatcaggggctcggcattggccagcgcctccagacagttgcggatatctcccggcggaagcatccccaggtcctgccgcagccgcccggagccgccgccgtcatcggccaccgtgacgatggccgtgatattcttcgtataacgcttcaggccacgcagcagggtggacaggcccgtgccgccgccgatggcggcgatgcgggggccgtgctccggtgctaccgactgtcggtatggctccatacagcgtccctcctgttatcgggagatgtcccgatggttttccgtgacctgatagccttcctccgtgatgtactccgccagctcatgggccaccgccacggagcgatggtggccgccggtacagccgatggcgatgaccagtgcggacttgccctcctcggcgtacaggggcagcaggaaggtcagcatcttctccagctgctccatgaaatcattggtctggcggaaggagaacacaaagtcccgcaccgcctgatccagtcccgtcttgttcttcagctccggcacatagtaggggttgggcatgaagcgcacgtcgaacaccagatccgcctcgatggggatgccgtgcttgaagccgaaggataggacgttgacggccaatcctccccgatccccctgctggccgaacaggtccagcagctcgctgcggagcttggcgatggagagggcggaggtgtccagcacgaaatccgcatgatcccgcaccggctgcatccactcccgctcccggcggatggcctgctccacactctcccccttcttttgcagggggtgcatccggcgagtctccttatagcggttgacgatggtctggttatctgcctccagaaacagcatccggcagttgacgccgctggccttcaggcgctccagcgtctcgataaggatgtccgtgggttccccggagcggacgtcgtacaccagcgccacccggtcgtaccgtccgctggacccggcgcagaagtcggcaaacttcaccatcatctccgccggcagattatctaccgtgtagtagccgatatcctccagataggaggccgcccggctcttgccgccgccggacagccctgtgatgatcaaaatttccatgctcgttcctttctcagcggacgatccgcacctccggctccaaatgcacgccgtgggcggcgtacaccgcctgctgcacctgccggatcagttcctccacgtcggcgctggtagcgccgcccacgttgatgacaaagcctgcgtgcttggtggaaacctgcgctccgcctaccgtcaggcccttcagacccgtctgttcgatgagtgtcccggcgaagtagccctccggccgcttgaaggtgctgccggcgctgggatactccagcggctgagactggcggcggcgggccatgagatcgtccatccgccgccggatggcagcggggtcatcgggggtcaggcgcagtctggcgcccagcaccaccgcctccgtatccagaaaggcgctgcgtcgatagccgaaggccgcctccgccgccgtgaagcgccgcacgccctccggcagcagcgccgtcacctccgtcaccacctgacgcatctcgccgccgtaagcgccggcgttcatgcatatggcgccgcccagcgttccggggatgccgtgggcgaactccagccccgacaggccgtgctgctgggcatacaccgccagatggttcagcaggatgccggcgtccgcctccagcgtcgcctcgtccagctgccgcaccgccgtcatatgctccgccgtcttgatgaccagcgtgtccagcccccggtcgtccaccagcagattagtgccacggcccagcaggaacggcttcacgccgcacgactccgccagtcccatgaggatcaccagctgctcccggttggcgggaaaggccagccgccgggcggggccgccgatgcggaaggaggtgtgcttgctgagggggacctcccgctccatggtcatatccggcaggtactcccgcactttttcgtccagctgctcataccagcacataggccagcctcctatttccgtaattttcgttttcccagcagggcggcgccgatgatcccggcgttgttgcccagctgggccttgacgatccgggtgcgtttgtcccggttgcaggggatgctctcctgctccaccagccgccgcaggggcagcagcagctgctcgtcgctctcgttgctgacgccgccgccgatggccagcgtatccggctggaagatgttcaccacgttggtgactcccgccgccagatagccgatgtactcgtcgcagacgctctggcccacggggtcgccctcccgtgcggcgataaaggccgactggcccgataccttgccgttgttctcagctaccacccggcacaggatgctgccggggtgctcctccatggcccgtgccgtcaggcgcttcagggcgctggcggaggcgtagcgctcccagcagcctctgcgtccgcagggacagggctccccgtggtagacgatgctcatgtggcccacctcgccggccatgccgttggcaccgtgatagatctgtccgttgtgaaggatgcccgctcccacgccggtccccagcgtgatggtgacaaagcgcttgctgcccttgccggctccggcgtagtattccgccagcgccgcacagttggcgtcgttctccacatacagggggtagggcagataccggtggaagagcttgcggagggggacgttccgcaggggcagattgcaggtgtacagcactgcaccggagtggatctccaccgctcccggcacacccacgcccacggagcgtatctgctccggcgtcaggccgccccgctccgtcaggctctgagtcagcgccaccagtgcctccaccagtgctttctggtcggagacctcggcaattttgcgcttttccatagcgaggatgctgccctcgtcgttcaccagccccgccttcaggttggtgccgccgatgtcaatgccgatgtagttcatttctgctcctcactctgccgggtcagggcatcgatctggcggtctacccgatccacgaaatcccgggccgggttatagccgaatttcatctgccggttcttcatggtggcgatctccacgatgccggccagatttcggcccggccggacggggatgatcatatacggcaacttgacgcccagaatggaatacatctcctcccccagacccagacggtcatagaacttgccgtccacccacttctccagctgcaccacaaggtccagctccgtatcaaactgcacggagcccatgccgaacagctgctgcacgtcgatgacaccgatgcctcggatctcgatgtagtggcggatcagctccggggccgtgccgtagagggagtcggacacccgccggatctccacggcgtcgtccgccaccagacggtggcctcgcttcagcagctcgatggccgtttcgctcttgccgatgccggactcgcccaacagcagcacgccctgcccgttgatgttcatcaacacgccgtggcgggtgatctgaggggccaacgcccggttcaggtagtcgatgatctggctggtcagctctacggtgttcagctcggaacgcagcagcgtgcggccgtgcttccgggcaatctccagcagctcggggaatatctccatgttccgggcgatgatgagggccggtatctcgcagcgcagcaggttgtcgaatacccggcggcggtcctccagcttcatggccttgaggaaggtcatctcggacttgccgaacacctgcaggcgcttgggctcgaagtagtcgtaaaagcccaccagctgcagggccgggcgattcatatcggaaatgctcaccgtgcgctggtcatagtcgctgccccggcacacgatctccatgtcaaaatcctccaccagcttgctgagcttggcgggggtgcgcttcaccttatctgccatatggaagccccctgttcctcggtttatatttatagtattatatcgtacaggggccgtttttacaataccaaaaacgcatcccacctccccttacgtctcctctgcggtacccgccttcccgctccctgagcggtttcctgcggtggaggagctgccgcttccgtcctcggccgaatttttttgtttttttgtcaaatagtgcttgcattttccggttttatctgctactatattaaatgcttgtgaatcaagcggaagttagtcacagcaaggaggtgcaacggatggctaagtgcgaattttgcgacaagggcgtgaccttcggcatcaaggtctctcactcccaccggcgttccaatcgtccctggaagcccaatgtcaagcgtgttaaggcggttatcaatggcacgcctcgccatgtgtatgtttgtacccggtgcctgcgttccggcaaggttacccgtgcgatctgatgattaaaagctctgtgaagcctcacagagcttttttcattttgttttttcggctgtggagcggttccacagctttttcttttgcctccggcggcccatcatcctttttgtctccgacggcatactttttgccaacagctggaaaagtggaccgccgggggcaaataatattctatgaaaaggtcgtttgcgtttctttcgttttcccttatcggctcttcatcgacttcggaaacggttcgttctatgattcaggcataatcattgcagcaacatccgcagtcgcagagggagcgtgcttcatcataccgttgtgtctgctcggtatcgacagaaaaaacatcgtccgccctttggatcgttatcatagccagcatctcctgatatccgtatgatactttaccatggtctgaaagcaaataggaaagcacagggcgctcccttacggaaagcgccctgtgcttttatcttacggtgtatgatctcttttgctataaggagacttacttgccctgattcatctgggcagccacctcggcggcgaagttctcttccttcttctcgatgccctcgccggtctgatagcggacggcagtcaggaacttcacgctgccgcccagcttcttgccggcgtcggcgatatactgctccacggtgccggagaacaggtcgccacggacgaactccatctgcagcaggcagttctcctcgtagaacttgttcatcttgcccatgacgatcttctccttcacctgagcgggcttagaggccatcttggggtcggaatccatcagggccagagccaccttcttctcctcggccagcacgtcctcggtgacctgagacttgtcccagaagcggggattcagagcggcgatctgcatggcaacgttcttgccgatctcggtggcatccacgccgccctccacggccagattcaccagcacgccgatcttgccgccggcatggacatagcccacactggtgttctcggcaaagcggacaaagcggcggatctgcaggttctcaccgatggacatgaccttttcgggcatggtctcggacacggtcagctcagtgccgggatacttgcagttcatcagggtatccacgtcggcgggatcgttgtcggccaccaccttggcgatgtccttgacgaaggccacgaagggagcgctcttggcgcagaagtcggtctcgcagttgacctccaccagagcgcccacgccgttctccaccagagcgtaggacacgccctcggcagcgatgcggccggccttcttggcggccttggccagacccttctcacgcagatactccacggccttgtccatatcgccgtcggtctcggtcagtgccttcttgcagtccatcatacccacgccggtcatctcacgcaggttcttaacatcagcagcagtaaaagccattttcttttcctccagttcgtattttcaaaggtaaacggggcagggcaacgaccctgccccgttggttaagcggtgatcctcggattattcagcggtctcggcggcggcttcctcatcctgctcgccctgacggccctcgatcatggcgttggccataatggaggagatcagcttgatggcacggatggcgtcgtcgttgccggggatgggataatcgatctcgtcgggatcgcagttggtatcagcgatggccacaacagggatgcccagacgatgggcctcagcgatggcgttgcgctccttacgggtgtccacgatgaacagagcgccgggcagcttcttcatttccttcacgccgcccagatacttctccagcttctcgatctcgcccaggtgcttgatgacttccttcttgggcagcatatcgaaggtgccgtcggcctgcatggccttgagctggttcagacggtcgatacgggtgcgcatggtcttgaagttggtcatcatgccgcccagccagcgggcgttgacatagtacatattgcagcgcagggcctcgtccttgatggcctcctgcgcctgcttcttggtacccacgaacagcagggactggccattctcggacagctggcgcacgaagttataggcctcctccagcttcttcacggtcttctgcaggtcgatgatatagatgccgttgcgctccgtgtaaatgtagggagccatcttggggttccagcggcgggtctggtgaccgaagtggacaccggcctccagcagggccttcatggatacgatgttctggtttgccatgtttgttcatttctcctttgaatttagtttcttacctccagaggcttcctccccccggccaaccttgcggcaccgaccgggagtccgcccctgtgcggaatgctgaaatatcataccacagtctatggctgtttgcaagggattttttgcggctttcccggaaaatcagcggttttttcgccgtattgccccggctcagccccagcggcggcgctttttatcctcctcccgccgctggaagggcttgtcgatgaggatgatatcgtccccgaaccgctgcacgcagtcccacgggacgcagaaatcctccccccggccgaacaggccgaaaaagcggcaagggccgaacacaatgagggccttgacctccccctccgggaccttcagctccagatcccccacgaagcccagccgccgcccgtcgcagatattgatgacctccttgcgccgcaggtgcgaaaatcgttccatcatgctgttccacctcggaaccagcctatgctgcaccgggccggtcctatgcccgcctttctgccagacacagggttcctgtccagccctccggcagctgcaccggggaaaagacgaagcccgccatagcaaagccctcctccgtcagaaactccgccggctcccgcagctgcccgaattggccgccacggcatttcagcagcgcctccttggcggtccacaggcggaagaacgccgcatcatcggcggcatagacccgctcctccggggacaggtgctcccatacacgccggggcgcaggccgcaccagctccacatccaaccccaccgggcggtccgccacggcgcaggccgccagcccacggctgtggctgatgctgagatacaggccgtccgtcaggggctttccctgtgcgtcgtatcgtagggccacctcctccggcgggcagtgcagcgccgccgccagcagctcacgggccaatccctcgccgcagaccgtctcccggtcgtccggcatcctcccggctcgcttccgccgctgaggggacagccagctgcgccacagggccagacgctccggcggcacctgcgtgatctgaatataccgcaccatatcagaacagggtgatctggctggtatccgccatgcctgcgaaggagcccagcgccttcagctgctcgatatgggtcttggagagcttgttgcagcaggtggagaactcctccaccgagatgaagcgctttcccttgcgcttttccacggtgtccagcgccgccgactcgcccagtccccgaacggagatgaagggcggcagcaggccgttctccgtgattttgaaggcggtggcgtcggagtcgtagatgctgatggtatcaaagtggaagccacggagatagaactcatagcacacctccagcgtcaccatcaggttcttctccacagcggtggcatccttgttgttctcgatctcccggatcttctgtttcacggcgtcgataccggcgcagcagtactcggcgtcgaaggccttggcccggacggtgaagaaggtggcgtagaaggccagcggccggtggaccttgaaccatgcgatgcggaaggccatcatgacgtaggccacggcgtgggccttggggaacagatatccgatcttggccagcgagtcgatataccactgggggacgttatgctcctgcatggcctccacccagccctcctgaaagccgccctttttcacctttcccttacggacggcctccatgatcttgaagctcattttggggtccagccccatggaaatcagatacagcatgatatcgtcacggcaacccaccgtctccagaacggaggcggtaccgctgacgatcagctcccgtgcgttgcccagccacacatccgtaccgtgggagaagccggacagacgcaccaacgtgttgaagtccttaggcagggtgtccatcagcatcccacgggtgaagcgggtgttgaactccgggatagccacggcaccggtggggcccagcaactcgtcgttttcaaagcccagcaccttggaggagacgaaaatgctcatggtgtccggatcgtccagcgggatctggcgggcgttgacgccggtaagatcctccagcatccggatcatggtggggtcatcgtgacccagcatatccagcttcaggaggttatcctccatgcagtggtattcaaaatgggtggtaatggtatcggcgtcctcggcatccgccgggtgctgcacggcggtgaaatcctccacatccatgtcatccggcaccaccaccagaccgccggggtgctggcccgtggtgcgccgcacgcctacgcagccctgaatgagccgattctcctcggcacgggacacctcccggccgttctcctccagatagtgcttgacaaaggggtacaccgtcttgtccttcagggtgccgatggtaccggcccggaacacctgcgtctcaccgaacatctccacggcgtggcggtgggctctggcctgatattccccggaaaagttcaggtcgatatccggcaccttgccgccgccgtagccaaggaacgtctcaaaggggatgtcgaagccgtccttgacgtactgctccccgcagacggggcagaccttatccggcatatcggcgccgcagccgaagctgccgtcggtgatgaactccgaatggcggcacttggggcagcggtagtggggcggcagggaattgacctcggtgatgcccgacatataggccaccagcgacgagcccacagagcctcgtgagccaaccagatagccgttttccaggctccgctgcaccagcttctgggccgacatatacaccacgtcgtacttgcccagaatactgcccagctccacattcaggcggtccacgatcagctggggcggctggtcgccgtacagttcgtggcacttgtcccacaccagacggttcagatcctcctcggagttttccagcctcggcgggaacagctggcccggcggcagcagctcgatctcctccaccagatccgcaatatggcggggattggtcaccaccacctcataggccttgtcctcccccagataggagaactcctccagcatctcgtcggtggtcttgaagtagatgggcagcggcgcatcggcatcagggaacttcttgctggccagcagcacatggcgatagatctcgtcctccggctcctgaaaatgcacgtcgccggtggcgcagacgggcttccccagctcctcccccagccggacgatggtgcggttatactcccgcagttcctcctccgactgcacgtcgccgtttcgcagcatgaagagattgttgcagatgggctgtatctccagatagtcgtagaaggaggcaatgcgcttgagctccgcccaatccttgtgatccgtcaccgcccggaacagctcgcccgcctcgcaggctgagccgatgatcagcccctcccggtgggtaatgagctccgtcttggggatgatgggcacccgcttgaagtatttcaggttggaagcggagatcagctgatacaggtgcttgaggcccagcttgttcttggccagaataatgatgtgcttggggaagcggctggtcttgctgccctgaggccgcagcttcagcatctccccgttgatctcctgcaggcggtggatgcccaattcccgttccattttctcaaagaagggaatcagcatataggccaccatggcagcatcgtccgaggcccggtggtggttgaaggcgggcagatccagatgctccgccacaatatccagcttatacttgtgcagctccggcaacaggttctgggccaaaatcagggagtccacataggtgggatcgaagggaaggcccaccttccggcacccggcccggatgaagctgatgtcaaattcggcgttgtgggccgccagcgggcgatcccccacaaactccagaaaactcgtcagggcctccttcagctggggagcgtcggccagcatggcatccgtgatgcccgtcaggcccacgatctccggcgtcaggcggcggttggggttgacgaaggtctgaaaccgctccgccacctcgccgttgcgcagcaccacggcgccgatctccgtgatggcctcccgctccaccttcagtcccgtggtctcgatgtcgaagcacacgatctcgtcggcaaaattctgatcctgcggaccatggacggcgatgcggtcgtcgaggttgttgacataatatccctccacgccgtagaggatcttgatctttcccttggcggtgtgccatgcatccgggaaggactgggctacgccgtggtcggtgatggcgatggcgggatgcccccaggagatggcctgcttgatgacggcggccgtgtccgtcagggcgtccatgttggacatcttcgtatgcaggtgcagctccacccgcttctccggggccgtgtccttgcggccctcatggggaaccttcatgatgtggtagggcttgagctgaatgtccttgccgtcacgggtcagctccggctgcccctgcacccgcagccacataccgggggcgatggcgctctgcagggccagcgcctcttgcccctcggtatatttgcgcacggtgacggagctctgatagtccgtcatgtcaaagctcagcatccacataccggggcgcttggtctcccggcactcggcggcaaagaccttgccctccacgatggccgtacccattttcacgttcagctccgtcatggagacgggcttgcccttgatctccttgcccagcagcacctcggtgccgccgcttttcttctccgccttccggtcatgaatggtgagatgcagccggtgcaggccgtactgccgggtcagcagctgctccagcgccgtctgggccgcctccgggatgcgctccccggtggccacgtccagctccagcgcccgctgcttcacgtccagcgctccgccggtgacgacggcgtcgtgaagcaacagtcgcagttctctaggcggcacgaagttttcaaaaaaatcaaaaaatgtgatctgttccctcatagtgcgctcctgctgtcatagtcggtcgatttcgtccatcaaggcgtccaccagcttgtcctgcggcaccttgtaaaggatctcccccttacggaacaccagaccctcgccgtcgccgccggcgatgcccacgtccgccgcacgggcctcccccggtccgttgaccacgcaacccatcaccgccacggtgatgggcttggtgcagcccgccaaccggcgctctacctcccgtgcaatggggatcatgtcatattttgtgcggccgcaggtggggcaggagatgagattcggccccgtctgccgcagtccggcggcagagaggatatccttggccgcacacacctcctccaccgggtcggcggtgaggctcacccgaatggtgtcaccaatgccctgacacagcaggccgccgatgccgatggcggatttcagcactcccatccggggcgtgcccgcctccgtgacccctaaatgcagggggtagtccgtctgccggtgcagcagctgataggccgccatgttcaccggcacacgggagcacttcacggagatgcagatgtcgtcgaaattgcagtcgttcagcaggcggacatggcccatggcactctccaccagcgcctccggagtgacgccgccgtatttttgcagcagttcccgctccagtgagccaccgttgacaccgatgcggatggggataccctcactgcggcaggcgtctgccacggcccgcaccttctcctgtgagccgatgttgccggggttgatgcggatcttatcgatgccctgccgcacgcactccagcgccagccggtaatcgaagtggatatccgccaccagcgggatgtggatggcccggcggatacgacccacggcctgcgccgccgccatatccggcaccgccacccggatgatatcgcaccccgccgcctccagccggaggatctgggctacggtggcggccacatcctccgtccgggtgttgcacatggactggatagcgatgtccgctccgccgcccaccgggacgctgcccacatgaatttgcttgctcatggctgattcctcctcagtttatccccttctgtggggcaaaaacgcaccacagggacgggaagccgctccccgtcccgtgtgctctttctctcttactgaaacagcttccacacgtcctgaaaggtgatgaccagcatcagcagcatcagcagcgcaaagccggccagatggacgtagctctcgaattttgccggaattttcttgcggatggtcagcatacacagggcgttgaccaccagaaagaagatctttccgccgtccagcgccggcaggggcagcaggttcatcaccgccagattcaccgccaccagcgccgccagataggcgatgttctccaccgccgccgaggcgctctccgcctgttcgcccacgtccgtgatggtggagacgatgcccaccgggccgctgacgtccttgaggcccgcctcaccggtcaccagcatctgcagggacaggcgcacgatccgcacgaagtccacggcgttgttccagctgtaccggaggcggctgcctacggtggcctcctccgccccgaacatcaggccgaagcccgtgtaggtctggccctgctggtcggtgtactccgcccgctccatggggaagtccttcagggtcacggtctgaccgtcacgcttgaccttcaggtcgaatacaccggtcttgttgcggcccagcagcaggctcacgtcactgtaaacatacacccgctcaccgtcgatgctcaccagacggtcccccacctgcaggccgctctcgctctggagggggcagccgtcggcaaagtccgtgatgaccgggacgtaaaatgccttggccccggcgtacaggacgacgatgatgatcaggcccgtcagaaagttcataaaggccccggcggcaaaaatgatgagttttttccagaagctctggttattcaaggccgtggggtcgttggagtcctcctcctcgccctccatggcacagaagccgccgatgggcagcagccgcagagagtaggtggtatcccccttggtcttgtgcaggatggtggggcccataccgatggaaaattcgttgacccgcactccgcaggccttggccgccagaaaatggcccagctcgtgtacggcgatgagtacgccgaaaatcaggatcgcagcaataatatagatcatggttcctcctaccggttcagtacagcggcacgggccaatctgtctgcctccagtatatcctccagagagggcgtatatttcacctccacccggcacagggcatcctccacccgccgggcgatatcgttaaagccgatctcctgccgcaggaacaggcctacggcctcctcgttggcaccgttcatgatggcgcaggcggtgccgccggttcgggcgcactgacgggcaagggcaaggcatggaaacgcttccgtatccggtgcctgaaaggtcagcggcccgcaggacagcagatccagcgtccgatccggtgtctcggcccggtagggccatgtgaaggcgtaacggataggcagcttcatatccgccgtccccagctgggcgatcacggccccgtcccggtactccaccagcgaatggacgatgctctggcggtggatcaccgcctccacctgctccaccggcagccggtacagccgcatggcctcgatgatctccagtcccttgttcatgagggtggccgagtcgatggtgatcttggcccccatgctccagttagggtgcttcaaagcgtccgccggagtcttatgctccagttcctcatggctcagaccgaaaaacggcccgccggagcaggtcagcagcagacgctttacctcccggcgatcccggcagccctgcaggctctggaaaatggccgagtgctccgaatccaccggcacgatctcggcgccgcagcgctccgcctccgccatcaccagctcgccggcgcacaccagcgtctccttattggccagagcgatgcgctttttctcccggatagccgccagcgtgggttccagtccaacgctgcccatgacggcggtgaccaccgtgtccgcctccggcagcgtcgccgcctccagaagcccctccggccccgccgccacccggatatccgtgtcggacagccgcagccgcaactcccctgccgccgcccggtcatacagcaccgccagtttcggatggaactggcgggcctgctgctccagcagatccacctggcggttggccgtcagcgccgccaccgtcagtcccagctcctgcaccacctgcagcgtctgccgcccgatggagccggtggaacccaagaccgcaacagtctttgtcatagtcatatctcctttacaggccaatgacccagcaggtcatgagccacagcaccggtgcagcgaacagcacgctgtcgaaccggtccagcacaccgccgtgacccggcagcagccgcccatagtccttgatgccgtactgccgcttgatgaccgagaagctcaggtcccccagctgacccatgagagcgcccaccagacccatgaggatgcagcctccgatgtgcaggggctgcagggtacacaggtagaagatgatccggaagatcaccatgcccagcataccgccgacaaggccgcccacggcgccctccacagtcttgtgggggcttaccagcggcgacagcttgtgcttgccgcaggccatgccggtgaacagggccgccgagtcgctgcaaaaggccgccaccagcggcaccagcaccagtccgccaccgtggggcagcatccgcagcagcagcaggcagctgaaggaagccgggatggccagccccgccagcgccatgacgcacacatccaacagggtcagggcgtggggcttgccgtaggtcagcacgcccgccgccggcagcgctatcacgcccaccaacagcagcccgtccacgatgcccagcggcagctgccacaaatggcccgcaccgtaaaaatgcagcaccactaatatgcccatcaccgccggcagcgccgtccagcgccgggtcttttccggcccgcacacagccgccagcagctcatgggtacccaccacgctcagcgctgccaacagcgccgtcgtggcccagtccggcgccacgcacaggatggccagcagcagcgggatgccgatcaccgccacgataattctctgtttcatatgctttcctctttattttaccccgccgaaccggcggtcacgctgctgatacgccacaatagcccggtccatatcctccggcccgaagtccggccacagggtatcgcagaaatacagctccgaataggcgcactgccacagcagaaagcccgacagccgctcctctccgctggtgcggatgatgagctccgggtccgggagaccgtccgtaaacaggtagccggagaatcgctcctcatccagctcctccgggcggcagcagccctccacacagtcggcggcaaagtgccgggccgcccgcagcagctcatcccggccgccgtagttcaggcagacgttggcctgaaagccctgaatgtgggaggatatctcgttggtgcgccgggccagctcctgcagctccggcgaaagggcgctcatgtcccccagaaaccgcagccggatctgatcccgctccatggagtcgatggcctccagcatatactgcttcagaaggcccatgatggtgttgacctcgtccgccgggcgcttccagttctccgtggagaaggcgtataccgtcaggtactccactcccagctccttgcagtaggtagcgattttgcggaacacctccgcccccaccttatgtccggcggtgcggggcaggccccgacgcttggcccatctcccgttgccgtccatgataacagcgatatggcggggaaggcggttttcatccacctgccccgccgtatgatgcttctttttggaaaacaggcccatcagacggacatgagttccttttctttggtatccagcagcttatccagctccttgcagtggtcgtcggtcatcttctgcaggtccttctcagccagcttcagctcgtcctcggtgatctcggaggccttctgcatcttcttgaacgcctccagcgcatcccggcggatgttgcggatggccaccttgccgccctcgttgtacttgcggatctgcttgaccagctccttgcggcgctcctccgtcagctgggggaaggccagccggatggacttgccgtcattctggggattgatgcccagatcggactcctgaatggccttctcaatgcccttcagggccgaggcgtcccaaggggtgatgagcagcgtccggggatcgggggacgccaccgcagcgatctgctggatgggggtgggggtgccgtagtagtccacctgaatgcggttgaggacggatgcgttggcccgtccggcccgcacggcgccgaagtcacgctccaccgcctccacgctcttcttcatcttttcctcgtataccttgtagtgttccttcagcatggttatgcctccttcacgatcgttccgattttttcgccccgcagcacacgcacgatattatacgggtctttcagtgcaaacaccagcaccgggatgtggttgtccatggacaggctggtggcggtggaatccatcaccgccagatgacgcttgagcacctcgtcataggtgatggcgtcgaatttcacggcgtcggcgttcttggccgggtcgcagtcgtacacgccgtcgatgttcttggccagcaggatcacgtcggcgttgatctccgccgcccgcagcaccgccgccgtatcggtggagaagaaggggcatcccacaccgcagccaaacagcaccacccggcccttttccagatgccggacggctctggcccggatgtatggctccgccacctcacggatctccagtgccgtctggagccggacgtccacgcccttctgctccagcacgtccgccagtgccatgcagttcatggccgtggccagcatccccatgtggtcggcacgggtacgctcgatgtgaccctcgccgttcttcacgccccgccagaagttgccgccgccgatgacaacgccgatctgcacgcccatgttcacgcactccttgatgacgtccgccacctgacccagcacctgaaagtccaggccgaagtgcttctcgcccgccagtgcctcgccgctgatcttcagcagcacccgtttatacttcggttcgtccattgctcttcctccgtatgtgatacttgggagtattttaccttattttttcccgtttgcatagagggaaaagcaaaattttttccgtcctctctccccgccttgcattttccggcggaagatggtaccatctcaacgaaaagaaactgataggagacgccttatggagctgctgcacatacataaagatacatgggccgccgtgggagccacggccctgatccccttttaccgcctgacggatacggacattgtcctgctggacaccggcatcgccgcctctgaccgggagggccttaccgccctgctggaggagcacggtctgcgccccaaggggatcctctgctcccacgctcactacgaccatgtaggcaacgccgcctatctccgctgccgttacggctgccccatcgccatgcccatgatcgaggccgccatctgcgccgatgccaccgccttccgggccaactacgagaccctcacctacggcaccatccagtccatgtttccggaggagtgcttcctgtcggacgttctcatctcccctgacgcagaacatctggacttttgcggcgtccgcttcggtctgctgcccctgccgggccactctgccgggcagatgggctttaccacccccgacggcactgcctatctggcagactgcctgttagggccggagcagctgcagcgcttcaagctgcccaccatcatgcacattgcccgtgatctgacggtgatggagtctctccgcagtctccgctgcccggcctatgtgctggcccataagaccagcgtcacagagcttggtcccgtcatcgatgccaacatcgccgccatccacgataaggggcggcggctgctgagctgtctcgccgacggcatgaccgccgaccagtggctctatgcctactgccgtcaggagggcatccacactcatgatcccttccgcatcagcgtcacccagcgcaatttcctgcatctgtccaactggctggtggacgagggccgggtggctctgcaccatgacctctgcgtgagccgttacagtaaggtgtgaagtaaggtgtgagccggtctgcggtgggtaagttttcgttttttatcgtccgtaatggccacaggggagggggcagcatccactgtcccctcccctgtttcttctttcggcaattccgttttttcaatcctccagcagctccgtgaagctccggatggtccgatcgcacacccgtgtcatctcctcccacgagacgtgaaagaactgatcgtagacccccaccgtgtgcatcccggccgccttggccccacggcacgcctccacagagtcgtcatacaccacgcactccaccggctccactcccatgcgttgggccgctacccggaagatctccgggtccttcttctcgatcttcagatcgtgggcaaacaggatctcctcaaaatatggcatcagtcccagatgccccagtgccgcccggcagtgggccggaacactggaggtcagcaccatcatccgctgcccccggcggcggcactgatccagatactcccgcacgccgggcttcacctgtacccgtgtggcgtaggcatccccggccatctccatccactctgccatgatatcctccacagactcctccagatggcagtagcgcttggtgaactccgccgccagcgggaaaatggtgtgcgccaccccctgatagtactccttggtgtagggaaagccacgcttggccagaaatgcctcatccacctcccgccagatgccgttggaatcgatcagggtcccgtccatgtcaaaaatatgcatccattcgtcctccactcggatcgtttctgtgattatatcaagtttttgccattctgtaaacgccagtttcccatgtggacaaatggggaaagctgtggtagaatagtgtgataaaattttccgagccaacgggagggaccatgccatgcagggaaagctcatcgtatttgaggggaccgacggttccggcaaggctacgcagtcggagctgctgtgccaggagctgacccgacggggcatcccctaccgcaagctgacctttccccggtatcaggaggaatcctcggcactggtacggctgtatctgggcggggccttcggccagaagcccggcgatgtcaatgcctatgccgctgcgtccttctactccgtggaccgctacgcctcctataagcaggactggggcagctactatgagcagggcggtctgctcatcgccgaccgctataccacctccaacgccgttcaccagacctccaagcttccgccggagcagcagcggccctttgtggactggctctttgacttcgagtatcagaagctgggtctgccggctccggatcgagtgctgtatctggacctccccacggagctatccgagcagatgatgcgccgccgggaggaggccacccatacccacgccgacatccatgagcaggacgaggcttatctccgctcctgccgggagagcgccgcccgtgtggtggactggtgcggctggcagcgcatccgctgcgaccgggacggccggatccgcagtattcaggacatccatcaggaggttctggagcgtgtggcggatctgctgccgtaaaaaaggacggaacgccgcagcgtcccgtcccggttcggccgaaccctatggcacgtgtctgttcccgtgtccctcagcaggagcagcgggagtcgccgccgcagcagcgctcgttctgtccgccgccgcagcagcagagcaccagtaaaacgatgacgatcagccagatgcaggagcagttgttgttgtcaaagcacacttgaacctcacctcacttgttcttcactggcttattctatgccccaccgccccggaaggtatcttgtccggtctgatttgcgctggggaaaatgcgataaagaaaggaacaacgatctatggcagaccgcaaaaacaacgagaccaccagctggaacgccgacgaggtacgccgccagcagactcagcgcaagcagcgcaagaaaatgcgccgggcccgtttctgggccatctactgcgccggtgtggtgctgggctcctgcctgctggcgggactgggctggctcatggtcaatgacgtgtgcgccctgaacaaggcacctctcaccgccacggtggagatcgaaaagggcgactccgtggggcagatcgcctccaaactgaagaaggcgggcatcatcaaatataagctgctgttcgtcatcaccagtcccctcttccacgccaaggacaccatccagcccggcagctacgagcttaataccgacatggactacaactgcatcatcgactccatgcagcagggctcctctgtggccgggacggtgaaggtcaccatcccggagggctactccgtgcaggagaccatccaactgctggccgacagcgacgtgtccaatgtggaggacctgacggaggccgccaagaaccatgtgttcgactacacctttgtagataacgagaacctgggcagcatcacccggctggagggcttcctcttcccggatacctacgagttcttccacaaggaggacgccgtctctgcgctggatcgcctgctctccaacttccagacccgtgtcagcggcgatctgctgacggatatcgagaactcccagtacagcctccgtgagatcgtcacactggcctccatcattgaaaaggaggccatcggggacgacgaggagcgggccaacatctcctccgtgttctataaccgcctcagcggcgacaactccgaaatcggtaccgccctccagtccgacgccactatctactatgccctgcacatcgccggcatggacgatacccagttctccacggatctggacagcccctacaacacctacaaatacggcggcctccccgccggccccatctgcaaccccagtctgtcctccatcaaggcggcggtgcatcccaacgacaccggctactactactttgcctacggcaaggatggagtcagccacttcttccgcacctatgacgagcatctggccttcgtcaacagcgatatgtacgccccggattgatggatatgatgagaaaaaagcctgagctgctgtccccggccggggacatggaaaagctgaaaatggccgtggcctatggtgccgacgccgtgtatctggcaggcacctccttcgggatgcgctccttcgccgggaatttctccccggaggagctgccccttgcggtggcctatgcccatgaccacggcgtccgggtccacgtcaccgtcaataccatgccccgcagcggcgaggtggatgccctccccgcccatctggagcgcctgaatgacgccggggtggatgctctcattctggcggatctgggggccttcacgctggcgggaaaatacgctccccgctgtgaacgccacatcagcacccagcagtccatcgccaactacgcctgcgctcaggcatggtatgatctgggcgccaagcgagtggtgctggcccgtgagctgagcatggacgagatccgtgagatccgccgccgcacctccccggagctggagctggagaccttctgccacggggccatgtgcgtgtcctattccggccgctgcctgctctccaactacatgaccggccgggattccaaccggggcgcctgcgcccagccctgccgctaccagtacgccctgatggaggagaagcgccccggcgagtactttccggtgttcgaggacgagaagggtacctacatcatgaactcccgtgatatgtgcatgatcgaccatctggacgacctcatggacgccggagtggactgcctgaagatcgaggggcgggccaaatctgcctactatgctgccatcgtcaccggggcttaccgccatgccatcgacgacgtggcgcagggccgccccgtcgatcccgtctggcgggatgaggtggagcacgtcagccaccgccactattccaccggctttttctacggccctcccggccagtattacgagagttcccgctatatccgggactggcagatctgcgctgtggtaacggactgcaccccggagggactggccaccctgagcctccgcaacaagttccgcaccggcgataccgtggaggtggtggggccggatacccgtcccttctcccttaccgtgccggagatggcggatgccgatgggctgcccctctttgagccgaaaacgcctcagatgacctttaccatgcccctgccccggccggtaccgcctatgagtttcatccgccatgccgtggaactgtcgggaaagtaatgcccccatgaccgacgcccccttccgaaccccggaagggggcgttgtttcgacacaggcatgacaggttcaagttgaaatcgtttttccccctcctaaagctatatcccctgcggggcggactctctgtccgccccgcttccttttgcccataaaaattccccgctccggcaactggctcttttcaatcgatgcagattgcggtataataagccctgattacgacccgatggaggtgcctatctcatggaagtgaagcgctgggagctcatgccccatgtgtatctgacctatttgccggcccggaaattcaaaaccggggtgctgtcggcccaattcatcacgccgctggccaaggaaacggcgtcctacaacgccctgctgccggcggtgctgcaccgcggcaccatgcgctgcccggacatggagcagctctctgcggccatggatcggctctacggcgcacagatcagccccaccatccgcaagcggggggagacgcagtgccttggcttcgtggccagctttatcgacgaccggttcgtctcccggaatgaaccgctgctggagcctgcggcggagctgctgggggagctgctgctggaccctgtgacccgtggcggccggtttctgcaggaatatgtggagggcgagaaggccaatctggccgacgccatccgctccatccgcaacgacaagcgggactgggccgatctgcggcttttgcaggagatgtgcgccggggagccctatggcatcagccgcttcggtgacgaggcggggctggccaagatcaacaaccagaagctctacgctcacagccagcggatgatgtcctcctcccggctggagctgttctactgcggcagcgccgagtgccatcgggtggaggaggccctgctgacggccttctcctccctgacccgtggcccccaaacggagccggagccgccccgacggttcgccgctccctcccagccccgactggtgacggaggagatggacgtgacgcagggcaagctctccatgggcttccgctgcgataccgatgacgagcccgccatgatcctgacaaacctcatgttcggcggctccagcaactccaagctgtttctgaacgtccgggagaagctctccctctgctactatgcctccagcacctacgtccgttccaagggcatcctgacggtgtcctccggcatcgagacggcggactatgaccgggccgaggcggagatcctccgccagctggacgagatccggcagggcctctgggaggactgggagctgacggcggcacgggagagcctgctcagcgccctgcaggcactgggagattctcagggtgcgctggagaactactatctgggtcagtcggccaccggccgccgggagaccccggaggagatggcggcgctgctgcggcaggtgaccccggagcgcatccgggcggcagcccagagtgtgcagctggataccatttacttcctgaagggaaaggaggcgtgaggatgtattatccccgcattgacgagacggtgaccttccgccgcctgaaaaacggcctgccggcctatgtggtccacaagcccggctacacccggaaatacgccatgttcgccacccgctacggcggcatggacctgcgctttcagcaggacggcgcatggcaggataccccggcgggcatcgcccactatctggagcacaagatgttcgacaccgccgacggaaacgccatgcaggagatggccaaaaacggcgccgagcccaatgcctttaccagcaatgccatgacggcctactacttcgactgcacggagcattttgacgaaaatctgcggcagctgctgtcctttgtgtcggtgccgtacttcaccgacgagagcgtggccaaggagcagggcattattgctcaggagatcggcatgatcgaggacgacccggagtggcaggtctataagcggatgctgcaggccctgtaccgggagagccccgcccgtatccccgtggccggctccgtggagagcatctcccacatcactgccgagaccctgtaccgttgccacaaggccttttatacccctgccaatatgtgtctggtggcggtgggcgatctggacgccgaggcggtgttccgggcagcggaggatatcctgcccccggaaagcggcccggatatcccccgtgactacggtggcagcgagggagagacccccgctcagtcggagacctcctgccggatggaggtatccatgccgtcgtttctggtgggcttcaaatgccccgctcccccggagggagagcagcggctgcgctgggacatcctgggggatctggcctgcgatatcctcatgggggactccagtcccctgttctcccggctgtacagtcagggcctcatcaacggctccttcggcagctccttcgacctgctgcccggagcggcctacgcctacgccggcggcgacagcaacgatcccgccgccgtgatggaggccattttggaggaagcacagcgcctgacccgtgagggtctggatccggactactggcagcggatgaagcgggggaacttcggggcctccctgaagggtctcaactccttcgattccatcgccatttcgctggtggagggctgcttccagcactttgatcccctgcgcttcccggaaatttacgacagcatcaccccgcaggatgtgctggatttcatccgggagcatatctgccgcagccgtgcggccctgtccgttatctatcccaaggaggactgatcatgaatgacaactggaaattttccgatcttccctataccagccccgatgtagaggcccttcaggcccggtatgacgccctgacccagcgggccaaggacgcccaaggtccggaggagctgctggaggtggtgcggcagcgggatgccctccagcaggaggtagctctctgccagagcatcgccttcatccgggccttccacgatgtcactgacgagttttatcagcgggagctgcaggagaccatgccccgactggagacgctggatacgcagtctctgtccatggccatagcagagagtccctacgctgcggcggtggatgaggccttcggcccccagctgcgccgcctgctgacgctggaccagcggctccacaccggcggcaaggaactgcaggcccgcatctcccagctcaccgctcaataccagcagctggtggcctccaccaagtatcaggtgcagggcgagactctcagcggcggtcagctgcgctttgcactgaccagcaccgaccgggagcgccgcaaggccgcctatgacgcccagcagaagaccgccgtggaaaacggccccgtaatggaaaagctcctgcgggagctggtccatgcccggaaccagctggcccgtgaaaacggcttcgacagctttgccgactacggcgatctcagtatgcagcgtctgggctatggccgggcggaattggacgagttctgccgtcaggtgcaaaagtacatcacccccctgtacctgcaaatgcaggagcagcagcgccagcggctgggggtggaaacgctgctgccctatgaccgggcgctggtgttcccagagggcaacgccgtccccgtggcaacggaggagcttcctaaggctgcacgccggatgtaccacgccctgagtccggaggcgggacatttcttcgacgagatggtccgccacgacctgttggacgtggcaggctctcccaataaaatctccggcatgggcttctgcgatatgctgggtgccccctgcgggatgcccttcatcttcgccaactgcgacggcaccggctccgacgtcaccgtctatacccatgagctgggccacggccttcagggctacctctcctaccgcagccagccgctggcggactatgtggggctgagtcccgatctggcggaggtccactccaagaccatggagctgctgaccctcccctacgcacgggacttcttcggccctcacgccccccagttcctgacggagcaccgctacgacttcatcaaggagctgtgcgccttctgctccatccacaccttcgagacgtggctctatgagcacccggacgcttctctttctcagtgggcagaggagttcgaccgcacggagaaagtcttcggccgggcccagaacaacgagccgtggcaacagcaggtgctggccggctgtgacctgttcaccaacacggccatctatatgttcccccgctatgtggtgagctacgccctctccatcgtctgcgcccagcagctgaaggccgcctatgacgccgaccccgtggacggctgggccagataccacgccctttgcgcctccggcggcagcaagctctacgccgaaacgctggcagctgccgggctggagctgccctacgcccccggcgtggtggagcggctggcccgtgagctggcggcgcaggcctgaagccaccccatcccttcgagcgcacggcgctctgcactttatcccaaggaggaatcatcatgcaaattatgactgacagccccatccggttccctggtctgttcggggactgggcctttaccgccagctccaaggcgctggacatcggcaacggcatttactggtacggtatcctcatcgcccttggtctggtcatcgccatctggtggtgcatgaaccagaagtccaagtacggcatcaccgaggacgacctgctggacagcgttctgtggggcatcccctgcgccattgtgggggcaagaatttactatgtgctgttctatctggatcagttcaaaaacagcgacggcagcttcagcttccgcaaggccatcgccatctgggacggcggccttgccatctacggtgccgtcatcgccgtggtcatcgtgggcatctgcatcagccgccacaagggctataagctgggagccatgcttgaccttgcggtgatgggcctgctcatcggccagtgcatcggccggtggggcaacttcatgaaccgggaggccttcggtgccgagaccaccctgccctggcggatgcagctgaccaccgtcaccggccagttggtggaggtccatcccacgttcctgtatgagagcctgtggaatctggtgggcctgctgctcattatcttcgtggtatccaaggcccgccgcttcgacggtgagaacacctggttctacttcctgtggtacggcatcggccgcttctggatcgagggcctgcggaccgacagcctgtacctcttcaactggaccatcggcggccagcccatccgggtgtctcaggccctgagccttgtgatggtattcgtgtccctcttcatgctgtactaccacatcaagctccacccccacaagccggaggagctgtatgtcaacatcgtggcggcccgcaatgccgccgcagccgaagcggctgccgccccggcagctgagtctcccgctcaggcgactcccactgaggatgctcccgccgaagccgtctcttccgagacggagtctccctcccagaaggatacctccggtgaaaccccgacggaggatccgtcatgagtgctgtgctgttagacggcaaggccctgtccgcccggatgcgggagcggctggggcaggaggccgccgccctgccccgccagccgggtctggcggtgattctggtgggggacaatcccgccagcgccgtatacgtccgcaacaaggagaaagactgcgcccagtgcggggtgcggtgcctgaaccatcacctgcccgctgaaaccacccagcaggagctgctggcactggtggaggccatgaaccgccgggaggacgtggacggaattctggtgcagcttccccttccggaggggctggacagccgggccgtgctggaggccatccgcccggagaaggatgtggacgccttccatccggaaaatgtgggccgtctgatgctggggctgccccgcttcctgccctgcacccccgccggggtcatggccctgttgcgggcgtatggtatctcccccgccgggaaacactgtgtggtgataggccgcagcaacatcgtgggaaagcccatggccctgctgcttctggcggaggacgccaccgtcaccgtctgccacagccgcacgccggatctggcggagcagtgccgtcgggcggacatcctcatctccgccgtgggccgccgtggcctcatcaccgccgacatggtcaagcccggcgccgtggtcgtggatgtggccatgaaccgcaatgaggagggcaaactctgcggcgacgtggacttcgccgccgtagcggaaaaggcggcctatatcacccccgtgccggggggcgtaggccccatgacacgggccatgctcatggaaaataccatctctgcatcccgcagacggcagcataaggaggactgactcatgaaaactgatatcgagatcgcacagagctgccccctcctccctatcaccgccatcggcgcaaagctgggcctgacggaggagcagctggagtgctacggccgctataaggccaagctgctgccctccgccacagtgggcaagccccagaccgggaagctgatcctggtcacagccatcaaccccaccgccgccggggaggggaagaccaccaccagcatcggactggcggacagcctgtcggcgctggggaaaaagacggtgctggccctgcgggagccgtctctggggccggtgttcggcctcaagggcggagccaccggcggcggctgggcgcaggtggcccccatggaggacatcaacctccactttaccggcgacttccacgccatcggcgccgccaacaacctgctggcggccatggtggataaccacatctatcagggcaacgctctggacatccaacaggtgacgtggcggcgctgcgtggacatgaacgaccgccagctgcggtacatcctctgcggtctgggtggcaagggaaacggcgtcccccgtgaggagggctttgacattaccgtggccacggaggtcatggcggtgctgtgtctggcggaggatctgacggacttgaaggcccgtctggctcggatgatcgtgggctacaacggccacggccagccggtgactgccggggatttgaaggctgcgggggccatggccgccctattgaaggacgccatccgccccaatctggcccagtcgctggaggggactcccgccatcatccacggcggccccttcgccaacatcgcccacggctgcaacagcgtagccgccaccaaggccgccctgcggctgggggactatgtggtaacggaggcgggcttcggcgctgatctgggggccgaaaagtttctggatatcaagtgccgtagggcgggactgcgtccggatgcggtggtcatcgtggccacggtccgggccctgaaactccacgggggcgctgataagacccagctggccacggaggacacggcagccctgcgccggggccttcccaatctgctgcgacacatcgagaacatcacgcaggtctatggcctgccggcggtggtggccctgaaccgcttcaccagcgacacggcggcagagctggcactggtacaggaggcctgcgccgtctatggggcggaggtggccctatcggaggtgtgggagaagggcagccggggcggcatggagctggcccacggcgtcctgcgggcgctggagcgggagaaccacttccgcttcgcctacgatgccgcccttcccatccgggacaagctgctggccctgacccaaagaatctacggcggccacaatgtggcctataccgaggaggccgaccgggagatcaaccgcctgacggagctgggcttcggcggcctgccggtgtgcgtggccaagacccagtacagtctttccgatgaccccacgaagctgggggcccctcaggacttcatcctgacggtgcggaaggtgaaggtctccgccggagccgggttcatcgtggccctgacgggggacatcctcaccatgccgggtctgcccaagaccccggcggcagaggccatcgacgtggacgaaaacggcgtcatctccggcctgttctgataggtaacataacacgatagaaatagaaaaaaagcatcgcatctgctatgcagatgcgatgctttttgttctcttatcccctcagaacaaccgccggcccgtcaggaagtgactggcatagtagctctcgctgaaggatgtgatcttcacacagttgaagcgggaatcggaggtggcgtggatgaactgcccgtctccgatgtagatgccgcagtgggaagcggcactggaggagaaatctgcatcctgaaagaacaccagatcccccggctgcagttccccgaagcccaccgccatgccgtagctcagctgatctgtggccccgtggggcagatacaccccgaactgctgatagatgtacatggtatagccggagcagtcaaagccgctgggagacgccccgccataggcgtaaggcaccccctgataggacagggccagcgccaccagctccgacgcagagccggaagccgttccggcgtcgccgccgctgggtaggtcgtcggagccgccggaggaaccagtatcggaggacgtatttcccccggcttggggccgtgaggcagacagctccagataatccccggagacgtagccgctcaccccgtcgtagtctacataaaaccagccgttttcaaaccgggacaccgacacccacgccccattggggagggatgtcaccgtttcatagccggtaccggccccggagcgcagattcagtgcatccgccgtcacctgtccgtagccggtcaggccggaggtccgcaggtccagatactccccggagagatagccctcgatgccgtcgtagcgcacctgataccagccgccactctttcccgtgacggccaccgtggtgccatcgtccaccagcgccagcgcctcggcgtcccaatcgccgctgcggcggatgtagagggcgtcagtggtgacagccgccgccaacacagaggtatccgtcgccggaaggctctcctcctccgcaggctccgctgtcacgtctgccgtcggctccgccgtctggggggccgccagagccgcagtctccgccgccttcagcttctccagcgcctctcttggcaccaccatgcccaagtggacggcgggggaaaccacattctccggcggcgtgcgctccgtggtgagatgtaccgtacacaaagccgccaacaggatcaccagcgccgccagcagaaattttcgtgtcatgccggacaccctttctctcgcttatttcccggccagagcccgctccagccagatggagcccacgtccatggctgcgtacaggctgtccttctcggacttcttcaccacccggtcacgggacttcaggtcgggatccgtcagctgcagctgcacggacacacgggtggccacgtccatgtcctgctccttcttggtgtccaggatctgcagcataataatgtacttgtccgccatgctgccgtagtaaatgatgttgtcgatacggcgcagagggtggtttttatagatgagaccctcggtctttttgttttcagccatttgaataactcccttctttaatagaaccatacacttgtaaccaaattgtaacacacaccgctccccttgtcaattcgcccgccgggaaaaagcctgccgctttctgtcgtcggtatcattccacgccctcccgccgctaaatttttagcatccccattaattttatctcatattagtaaggtttcatgatcccattttacagcgattttcgcatacacagcgcagatagtgaaatcctttccgccaaatcccccatagtttcgtcacgttttcgtcacataacagaaaacagcctctctatacgctaaaaagtgcttgccaaaaaatggcagttggtgtataatgaccagagattttcaaaagaggagaccttgccatgtctgctatgactgcttcggagcgccgccagcaaatcgcccggctgctttccgcatcccaagcgcctatcagcgccacgaccctttctcaggagctgggcgtcagccgtcagatcatcgtgggggatatcgccctgctgcgtgccgccggtcaggagatcaccgccaccgcacggggctatgtgatccccgcacaaaatggcctgctgcgccgcatcgcctgtatacactctgccgaggagacacgggacgagctcgacgccatggtggactgcggctgtaccgtggtggacgtcatcgtggagcacccggtctacgggcagcttaccgctcccctgcacctgtccagccgtctggacgtggatcagttcatgaagcgcatggacggggccgcccccctgtcccagctcaccggcggcgtgcatctgcacaccctctcctgcccggacgagaccgcctatgagcatctgctgcagcttctgcgccagcggggctttctggtggagtgaccaccgaccctaaaagaacgaccatttccccttttcccggcggaggccctccctccgccgggaatttttctgttgacaaatggaaaagagccgctataatattggaaagtggtcatgtgtcaagacaccaaagtttaccaataagagagggacactcatgaacaaattcaaagcatttctggcccggaagaacatcgcattctccgccaagcgctacttcatcgacgccatgggagctatggcgcagggtctcttctgcaccctgctggtggggaccatcctcaacactctggggacgcagctgcacatcggcttcctgacggagagcatcgtcaccatcggcaagggcgagggggccgtggcctacaccatcggcagcctgtgctccgccatggtgggccccggcatggcggtagccatcggccgggcgctggaggccccgccgctggtgctgttctccctgatccccgtgggcttcgccaccaactccatgggcggagccggcggcccgctggcggtgctgttcgtcaccattctggccgccgagctgggtaaggccgtcagtaaggagactaagatcgatattctggtgacgcccatcgtcacggtgctggcgggtatcggcttcgccgccctcattgccgccccggtgggcaaggccgcctccgccgtggggcaggccatcatgtgggccacggagctccagcccttcttcatgggcatcatcgtctccgtggtcatcggcgtggccctgacccttcccatctcctccgccgccatctgtctggcgctgggcctgacgggtctggccggcggcgccgccgtggcaggctgctgcgcccagatgatcggcttcgccgtcatgagcttcccggagaaccgctggggcggtctggcggcgcagggacttggcaccagtatgctgcaaatgggcaacatcgtccgcaatccccgtgtctggatcccccccacgctggccgccgccgtcaccggccccatcgctacctgcgtctttgagctgcaaatgaacggccccgccgtgtccagcggcatgggcacctgcgggctggtggggcagatcggcgtatataccggctgggtcagcgacgtggccgccggactgaagcccggcatcggcgccatggactggctggggctggcgctgatctccttcgtgttgccggcggtgctgacgtggctgttcgccatgcctctgcggaagtggggctggatcaagcccggcgacctgaagctggatctgtaatcgttttctccgaaaaagagggctgtggcatttgccacagcccctcttttactatttcgtcaaaaccgcagcagcagctcccgtgcgatctcctgtccctgccgcagatagatgcggggtacccgcttgctgacggcgcaggtcagctcataggggatggtccccgcctgctccgccatatcgttgacggagttgtccggcccgaagatctccacctcgtcccccacgtccacgctgggccgatccgtcaggtcgatcatgcacatatccatgcagatgcgtccccgctgaggggcaggcccctccgccgtcatcatctgccaccggtcggacaggcaccggaaaaatccgtcggcgtagccgtaaggcaccacgcccatgcgggtggtgcggtccgtgacgaactgccgcccatagctgacggaggtccccggctcatagaccttgatggtgctgacggtggttttcagggtcatcaccggccgcaggccaagctgcccggcaaattcaccgcagccatacagcagcagccccggccgcaccatatccagatacgtctccggccaccgggccaccgccccggtgttggcgcagtgccgcagggggaacctccgtcccagccgctgctccaccgccccgatgacccggcagaacaggtcgaactgcccccgtgtataggcgtcgctctctgtatccgcctcatcggacacagcgaaatgggtgaagataccctccgcctccagtcccggcagggtgcaggcagcacagatgcccgccacccccgtcttgaagtggtcacctccgcacaggaagcccagccgggacatcccggtctccaccttgatgtggaccttcagcgtgccgccgcagcgcaccgcctcggcgctgtactccagtgccttggcttcgcaggtcaccgtctgcgtgatgtggtagcgcagcagctcctccacccgctccggcggcgtatggcccagaatcagaatgggcatatggatacccccggcccgcagctccatggcctcgtccagactggacaccgccagatagtccgcccccagctcctccagcactcgggacacctgcaccgacccgtggccataggcgtccgccttcaccacgcccacgaaccttgtccccgtccgccgccgcagtgtttgataattatgcgccagcgcatccagatcgatctccgcccaggtgcgcctcagtgtggattccatgtccgttcctcctctgccccgcagggccagatatcttgcctctcatgatactacatcccgccggaaaagtctatgggcggaacaccgaaaaagcagggacggtctcccatccccgccgccgttacttcctccggcaggccgctgccaccagtccgcccagcgtcaccagcgccagtacgttgggcagcaccatcagctggttgaatagatccgccagctcccataccaagtcgttggacaggcacgagcccagaaagatgaacccgatggccagcaccgaatacacccccacggccttctcccccagcagccacgatacgttgagccgcccgaagaagttccagctgaggatggtggaaaaggcgaagaacagcaggcacaccgccacgaacatactgcctgcccggctgcccagcaccgtgccgaaggccagctgcgccatgttggccttgctgacgccctccgccgccccggcggagaggatgccgtttcctgcatacagggtggagatcaccaccagcgccgtcatggtcagcaccacgaaggtatcgatgaacacacccgtcatggccaccacgccctgctcgtggggatgcttcaccttggccatggcgtgggcgtgaggtgtggagcccatgcccgcctcattggagaacagcccccgcttgaccccctgactgacggccattttcagggcatagcccaagctgccgccgatgatggcgttggggacgaaggcgtagcggaagatcatccccaccgcctccggcaggtaccggacccggcacaccagcaccacaagtccccccagcaggtacagcgccgccatgatcggcaccagcttctccgtgactccggcgatgcgctggatacctcccagaaacaccaccgccgccagcaccgccaccacgatgcccaccgcccacgacggcacaccgaaggcagcggcgcaggtctccccgatggagttggactgcaccatgcaccccatgaagcccagcgccaagatcagtgccacggcgaaaaagcccgctaaaaacgtgccgaacctccccggaaaggcccgcttgatatagtacaccggcccgccgctgacgctgccgccctcggccacccggcgggtctcctgcgccagcaccgcctcggcgtagatggtggccatgccgaaaaaggcgatgatccacatccagaagatggcccccggcccgcccagcaggatggcaccgcaggcgccaatgatgttgccggtacccacctgagcggcgatggcggtggtcagggcctgaaaggaggacaggccccccttctgcctgccgccctgcatattgaactccccgaacaccgcccgcatcccctcaccgaagcaccgcacctgcacaaatcgggtgcggacggagaaatacagacccgtaccgatgagcaggaacaccagaatataatccgatagataaaagttgatgcgctgtaccacctgcaataccgcttccatagtgtgtctcctccctgcccctctgcgaaaaaaggagccgccggcctgtgccagcgactccggagaaaccaccaatccgccgcccataaggcggcccggtcgctctgtccttttgcctgagagattcggcccgtgggccttgcaccttcggcactcactgtcgtgagtttctccagagtcccctccccggccagtctccttggattctgtccgtttcttgggggcatatgtttttgttggaggtactataccacagatggccggcggatacaagccctatctgcaaaaatttttcccgtcatcacttcagccgctgccaccggccctcccgtagggtccctgccgttacgggacagtccagcgccgccgccagccgccgggccagcggccactcctccgcccggtccacctgattcagaaacacccggtcgtggaggccctccaggcgcaccacacgagccgccagctccggcgttacctcctgatcctccgtggcgcccgccagccgggcatacagctccggccgatgggccatgcggctgatgggcttgccgaagccgtcggcccccatcaccagcaccgtagcctgccgctcctccggcagcaccggctcccagtcggcatgggccttgaagggccgccccgccgagccgtcggcctccaccagcacgaaatccgccatggtctcccagccatctatggccggggccgtcagcttcccctgttccgtaggcgtcccggtacaagcgatgccccggcggcgcagctcctcccgcagcgtcccctcctccgtgcagaccctcagatgcgccgggggccatatcttggtggtggtacacaccagcaccgtcccctgctgccgcagctccgacgccagatgatacatcagcgtggtcttgccgccgccgccgataagcgccgtcagtcccggcccgatctccagcagttcccgcagttccatcccgtgatccgcccctttcgtatccgtttttcccaatataccacactttcccgaaaaaaacgaggccccttctgtgaaaatcctcccgcttccccggcgtttttccgcaggatcactatattttgtgctttcttttctcctcaataccccttatcttgtgtcgattgtgaagtattgccaaaatttcctccggatttttggtgccggttttcgtctatattttggctctcccccttgcatcaccaccatatatagtgtatgatatcagtgttcgcattcatagccgccctgtggcgacttttcatacggcaaggaggagaaagagaatgaagatcatcaagcgcaacggctccgaggtggcctttgacatcaccaagatcattgtggccatcaccaaggccaacgaggacgtggacgaggccgaccgcatgaccccggtgcagatccgccgcatcgctgagtccgtggagctgcaatgtcagaaaatgaaccgtgccgccaccgtggaggagatccaggacatggtggagcaccacatcatggcccacggggccttcgaggtggccaagcactacatcacctaccgctacacccgctctctggtgcgccgctccaacaccaccgacgacaagatcctctccctcatcgagtgcaacaacgaggaggccaagcaggagaactccaataagaacccggtggtgaactccacccagcgggactacatggccggcgaggtgagccgtgacatcaccaaccgcctgctgctgccccgtgagatcgtggaggctcacgaggagggcatcatccacttccacgacacggattattatgcccagcatatgcacaactgcgatctggtgaatctggaggatatgctgcaaaacggcaccgtcatcaccggtaccctcatcgagcgaccccacagctttgccaccgcctgcaacatcgccacccagatcgtggcccaggtggccagcaaccagtatggcggccagtccatcagcctgacccatctggcccccttcgtggaggtcagccgccagaagatccgcaggatcgttcaggcggagatggactccattggcttcgaccccggcgaggagaagatccacgagttggtggagacccgcctgcgggaggagatccgccgcggcgtacagaccatccagtatcaggtggtgacgctgctgaccactaacggacaggctcccttcatcaccgtgttcatgtacctcaacgaggcccacgacgagcgggagaagaaggatcttgccatgatcgtggaggagatgctcctccagcggtatcagggcgtcaagaatgagcagggcgtgtgggtcacccccgccttccccaagctgatctatgtgctggaggaggacaatatccacgaggacgccccctattggtatctgacggagctggcggccaaatgtaccgcccggcgcatggtgccggactacatctccgagaagaagatgaaggagctcaagggcgacgtgtatacctgcatgggctgccgttccttcctgacccccgaccgcttcaccgacgccggggtgggcaacatcgccaacgccgggaattacgagcccggcaagcacaaatactacggtcggttcaatcagggtgtggtgaccatcaatcttccggacgtggccctgtcctccggcggcaatattgagaaattctggaagatcttcgacgagcggctggagctgtgccaccgtgcgctgcgctgccgccacgagcgcctgaagggtaccacctccgatgccgcccccatcctgtggcagtacggcgctctggcccgcctgaaaaagggtgaggtcatcgacaagctgctctacggcggctactccaccatctctctgggctacgccggtctctacgagtgcgtcaagttcatgaccggcaagagccacaccgacccctccgccaccccctttgccctgtccatcatgcagcggatgaacgacaagtgcaaggagtggaagaacgccgaggatattgactactccctctacggcacgccgctggagtccaccacctacaagttcgccaagtgtctgcaaaagcgcttcggcgtcatcgagggcatcaccgacaagggctacatcaccaacagctaccacgtccacgtcaccgaacccattgacgccttcaccaagctggagttcgaggcccagttccagcacctgtcccccggcggcgccatcagctatgtggaggtgccggatatgcagaacaacatccccgccgtgctggaggtcatgaagttcatctatgaccacatcatctacgccgagctgaacaccaagagcgactattgtcaggtctgcggctgggacggcgagatcagcgtggtggaggaggacggcaagctcatctggaaatgcccccagtgcggcaacaccgatcaggataagatgaacgtggcccgccgcacctgtggctacatcggcacccagttctggaatcagggccgcacgcaggagatcaaggatcgggtcctgcacctgtaagcccccatttccccgcaatatcttaccgaaaagagaccatgtcatgtactacggagccctgaaaaaatgtgatatcgccaacggagccggggtgcgggtgacgctgttcgtctccggctgcaccaaccactgccccgactgcttccagccccagacctgggacttccgctacggccggcccttcacccacgagacggagacggagatcttccgtgagctggacaagcccttcatcagcggactgacggtgctgggcggtgagcccttcgagccccggaaccagcgtgacctgctgcccttcctgcgggagatccgccgccgctatccccggaagaatatctggtgcttcaccggcttccggctggaggacgagctgctgcaggatggctcctacccccgctgcgaggtgacagacgacctcctgcactgcattgatattctggtagacggccgcttcctccgggaggaaaaggacatctccctccagttccgtggcagccgcaaccagcgcatcatcgatctgccccggaccctctcctccgaccgcattgtcctctgggaccagctgcgccgatagcccctccccacagcttccccatatcttctcctaaaaggggcgaccttctaccagaggccgcccctttattttatactctgtatataattttctatattttccacaaagtttttaatatatttcgttttttatgttgcgcattgtctattcctatgctatgatggcaccatcaactaaagaaaggacaatggctatgaaaaagtgcatcaacatattgctgtatgccgccttcttcggcatcttagcagcgcagagacccatacaggaatactccacgatacacttcaacatataccctattgcgacttactacatattgtccgtgattttgggcacactgatccttctgatccgtcccagtttggtgccggtccatccctcctgttgggatctgttgctacaaggcctattgattgcggtgtgcctcgctttgttcatctggcagtataatcgaatcacttatctcgtgctggccctcctgacggaggatgtctacctccttatcgtcctgctgcggcggaggcaccgggacaaggtctcccaagcggcttgaaccccttggtgccgccggtcacgaaaccccggttgacttttccggcgccatcctgtacaatagaccctgcgagtaggccagacagttgcggggacaaggtgaaagcctgttcatgaggaaagtccgggctccacagggcaaggataacgggtaacgcccgccgaaggcgacttcaggaaaagtgcaacagagatataccgcctcttcggaggtaagggtggaaaggcgaggtaagagctcacccatcggctcgagagtgtccgatgctgtaaactctatccggagcaacaccgttatgggagcaatagggcggcccgtccgctcccgaggtggctgaagcgcaccggcaacgatgcgcttagatagatgactgtcaaatacagaacccggcttacagacctgctcgcatagatatggaaccccacagcgtaatacgccgtggggttcctttttcttattctgtcagtacagcgcaccggcgaaagccgtaataacgcagcacctccaccgccgccgcatctatccgctggccgcacagcaccaccggcaccgccgggggacagcccaaggcgcctgcggcggagatacggccgcagcacgccgccagcggcacctcctcccatggggagagcatggcctcatggggcgtcaccgcctgttccagccggggcatggggggcggcccctgccggatggcctgccgccggggcagcgccgccagcacctcctccagccgccgcagctccgccgggtcgttctgaggcgataccatcagcaccacatgatccgtgtcgtaaaactccgggtagatgccgccgctctccagcgccgccgccacctccgagccggtgtagccgtaccctttgggacacagcgtcaccttcagcggctcgccggggcggacctcccatccccgtgccgccagccgacgacgcagactctccagctgcggcagcagcgcttgcagcttctccggatagtccgccaacagctcgttggcagcgtccagcgactgcaagatcagatacgacgggctgctggagccccacagccccatggacgccttggcctgccggtgcagcagctccggggcctgatgggcgatgtgcaggtacgctccgcccgtgaccaccggcagcgtcttatgggcggagtcgcagcacaggtctgctcccagatccatgggatgccgggagggggacaggaatttcagatacgccccgtgggcattgtccaccgccagcagcaccccagcccggcggcacaccgtcgccaacgccgccacatccggcagctcccccagatagtccgggcaggtgagatacaccgccgtcaccggctcccggctgcgagccagctcccactccagctgctctggggtcacggccccgctgtaataggcttctcccgccgccggacagagccagcgcaccggcacgtccagcagagcggcggcattgacgaatgccttgtgggcattgcgtcccgccagcagcaagggcctctgcccccgactgcgtgcatataccgccagcagatgtaccatggtctggatgcacagggtggagcctccggtggcgtacagggtgtgtgctccaaagatggctccggcattttcctcgctttgggcaataatgccctccggatgaaacagatcgtcagcgccgtctatctccgtgatgtccagtgcctcgaagcccagcgggccgcagcccttgtggccgggcatatgcatccgcacggccccgccgccgacgtagcgccggacgaaatcgcagataggggtactcattccgtccccagctcacgggccaccgccacggcgatggcacactccatgcgcttgcggaacagatcgcagccgtcggcgtatacgccccggacggagccggtggcatgataggcgttggcagcacagcctccggagcagtagagccttgcccagcagtcccggcactcctcccgtgcatacacgttgcacccggcaaactccgcctgcacggcatggttctccaccccgtcccagatattgcccagcttgaacttctcgtcgcccacgaactggtgacaggggtacaggtcgccccaaggggtcacggccatgtactccgtaccggagccgcagccggagatgcgcttataaatacaggggccgcccttgaggtcgatcatatagtggtagaaggtgaagggccgtccctccttgtcccgctgcagcatcagtcgggccagctcctcatactgctgcatgacgatttccttgtccgcctccgtcagggccgccggatcaccggaagctgccaccaccggctccatgctcagctccgtgaagcccagatccagcatagtctggatgtccttcaaaaagtcggggttggcgtgggtgaaggtcccccgcatatagtagttcttcccctgccgggcctgcaccagcttctggaacttgggaacgatcttctcccagctgccatttccggcatagtccacccggtagcggtcatggacctccttgcggccgtccagactcagcaccacattgctcatctcccggttggcaaagtcgatgacgtcgtcgtcgatgagcaccccattggtggtcagggtaaagcggaagtgcttgccccgctccttctccacgctgcgtgcataggccaccagccgcttcaccacgtcgaaattcatcagcggctcaccgccgaagaagtctacctccagattgtgccgggtaccggagtgatccatgaggaaatccagcgcctgcttacccacctcatagctcatcagcgcccggtcgccgtggtacttgccctgactggcgaagcagtaggagcagttgaggttgcaggtgtgggccacatggaggcacaatgccttgatgactccggaggtgcgggccttcagctccccggccatgggggcaaaggtatcctcggtgaagagcttcccggcgtccttcagcgccagcagctgatcgtagcactcctccagctccggccgggtcacgtcctcccgatcccggtacttctccgccagcgcatccaccagcgtctcccgctcctgcgtctcgaacccggcgatcatgtcataggccacctcgtccacggcgtggacggagccggaacacacatccagcaccacgcacaggtcgcccagcttatattgatgtatcatcctgtttcctacctttatatttgatctctacgccaaaaatgccgcccggcaagggcggcaccatggttttcacaactcagtcgttgttcttcttctcgcaagcctgattggcaataccgcagctggtcttgcaggcagactggcaggaggtctggcactcgccgcagccgccgttcttggcgctctggcagaggtcacgggtctcgatggtctgaatgtgcttcatagctgtaccctccgtacattacaaaatttatcacagtttaccatacctgacgccgcttgtcaagccgtcagcccccgccggtcaggacgcatccgtcccgtccttcttcgggtcatccttgggctgctccagccgccggaacaccggccgcagcagaagcgccgtcacatagctgagactgctgtacccgatcagcagccacacaaggctcagatacagccgcagccacgggaacaccagacacgcccccaccggcaccgcccagatcagccagatcagcagcatccgtggcaggttccccacccccaccagcatggcgtttttcatgtggctgcgccatgtgttctgataccgggccatcaggggaaacacaaacgtcagctccactgccgccagctgcaaggcgaataccgccagcagcttccacaaaaaccggtcgttcagaacggcgaagtacagatcaaagccgcacagaaccagcaccgccagcatgggcagccataccagcagggcacacttgaagttctcccgccatgcggcgaaaaattttctcgccgtgtggctgtcctccccctgtatcactttccccagcacctgatacagcgccgctgtggaggggcctatggtcaccaccggcagagagcacaacacccacagcacattcagcaccaccagcgtccacacccgctccatgccacgggagaaggcgctgttgggatcaaacaacgagcgaaacatctcacccctccttttccgccgccagcgcatccgccagccgggcatattccgccagccccagccgctctccccgcacagagggatccagcccgcaggcagcgacgatctccgtcagccgctccttgggcagggggaaggccgtctgcaaggagttcaccagtgtcttgcgccgcagggcaaagcccgcccggacggtgcggaacagcatctctctggagcacacctccaccggcggagccttgcggctgcggcagtggatcaccgccgaggtgaccttgggggccggcaggaagcaggtgttggaaacggtgaacagcagctccggctgggtatagtactgcatcagcagggtaaaggccccgtagtccgccgtaccgggggcagcgcagatgcgctgggccacctccttctggatcagcaccgtcagactgtcgaagcactgggcctccacgcaggcggtaaggaaaggcgtggtgatgtgatagggcagattggcacacagaatgggccgtaggccggaaaactgctcctccaccgtctgccacaggggcagcttcatggcgtccccctccagcagggtgaagttgtcaaagtccgccatagtctcccgcagcacgggatagagccgacgatccagctccacggagactaccttccccgcccgccgggccagctgctgggtcagggggccgatgccgggaccgatctccagcacgccggtctgtcggtcggcgccgctggcggcggcgatatcctccggcacccagctttcaatgaggaagttctgccccatggatttggaaaaacggaagccgtgacgccgcagcagctcctgtatctcattgcggtcacacaggttcatgggccgccctcccttcgtatggttgcacataatatgttagtatagcacaggagcgtaaaaaggtaaagcctacattcccccacccttgggcaagtttgcccttttcatccggagggatgtgtgctataataagtcgatttcaggataggaggcgatggacatggagcatctcacccacagcgccgccgagacggaggcgctgggctgtcggctgggctgcgccctggcccccggcacggtcgtcgcctaccgtggcggactgggcatgggcaagaccgccttcacccgtggtctggcccgtgggctggattgccgggaccgtgtcaccagccccaccttcaccatcgtcaacgagtatcaggggcgcatccccctgttccacttcgatatgtaccgcctgccggatgccgacgccctgtttgacatcgggtgggaggactatctggaccggggcggcgtgtgcgccgtggagtggagcgagaacgtggccgaggccctgccggaggacaccgtgtgggtggacctccgccgactggagggtgaggacaacggacggcgcatcaccataacgggggtgacgggattttgaaaatactggctctggaaacctctgccaaaagcgtatccgctgccgtgaccgacggcggcgtggtgcgggcctatacttatcagaacaccggcctcacccacagccgtaccctgatgccgctggtggatgccatgctgcgggagagcgaacagtcgctgtcggacatggatctgctggcagtggcggcggggccgggaagcttcaccggcctgcggatcggggtatcggccctgaaggggctggcctgggcggcggacaagccctgctgcggtgtgtccacgctggaggccatggcccagaacctgcggcacatggacgggctcatcgtctgttccatggacgcccggcgcaatcaggtctataacgccgtattcgccgccgaaggcgggcagctcacccggctgacccccgaccgggccatcgccctgtcccagctggcggaggagctgcaaggcgacccccggcccaagctggtggtgggggacggcgccgctctgtgcagcggctttctctccgaggcgggcatcccctgccgcatggccccggcccagctggtgatgcagaacgccgtgggcgtggcgttggcggcggaggagatggccgcccgtggcgaaacggtatccgcccgtgatctggttccggtctacctgcggctgagtcaggcggagcgggagcggctggccaagggcctgaagatcactttggactgattcaaaaatttttatatgcggaggacaagactatgagcaatcagtttcccaccctgcacattgtggaccatcccctggtgcagcacaagctgtcggtgatgcgtgacaagaacaccagcgtgaaggacttccgggcactggtgggcgagatcgccatgctgctgacctacgaggccacccgtgacctgcccatgaccacccggaccatcgagacccccatctgctcctacgaggcgcctgtgctggcaggcaagaagctggccatcgtccccatcctgcgggccggactgggctttgaggacggcatcctgacgctggtcccctccgcccgtgtggcccacatcggtatgtaccgggatgaggagacgctggagccccacttctacttcctgaagtaccccaaggacatcgccggccgtgacgtgctgatcgtggatcccatgctggccactggcggcagcgctgatatggccatcaccaagatgaaggagctgggctgcaagaacatcaagctgatgatcctggtggcggccccggagggcgtgaaattcatctatgagcgccatcccgacgtggacatctactgcgctgcgctggacgaccacctgaacgagaacggctacatcgtccccggtctgggcgacgccggcgaccgcatcttcggcaccaagtaaaccccgcagcaaaactgaaagctttttcagcaattccctcttttctatccgaaatatccgcagacattccatgcctgcggatatttttcggcatttccgtggaatttcctgttgcattttgcgccgttttcgggtagaatgagtgtgacaattcagattggtagctgtaaggaagtgtctcgcacacgggctgcaactatcactcggcggttgcttgagtgtttcagatctctccggggatttggagcattttttgttacccggaaacattataaaaggaggaaacatcatgaatctggtcatcaacggcagactcatcacccgtgacacggagggcaagggctattacgagcatggtgccgtggcctacgagggcagcaagatcgtggaggtaggtgaggagagcgccctacgtcagaagtaccccgacgcccactgcatcgatgccaagggtggcgtcatcatgcccgcccttatcaacgcccacacccacatctattccgctctggcgagaggtctgtccatcgtgggcaacaaccccaccaacttctatgaggtgctggacggcacgtggtgggccatcgaccgcaagctgatgatggacggcacacgggccagcgccacggccctgtacatggactccatcaagcagggtgtcaccaccatcttcgaccaccacgcctcctacggcgagatccccggcaccctccacaccattgccgaggagtccaagcgattgggcctgcgctcctgtctgtgctatgaggtctccgaccgggacggcgaggagaagtgcctgcaggccattcaggagaacgccgacttcatcaccgagtgtgagaagaacaaggaccccatgctggcggccatgttcggcggccacgccctgttcaccatcagcgacaagaccttcgaccggatggtggccgccaacaacggccgcaccggctaccacatccatgtgtccgagggcatgaacgatgtgtacgactccctccagaactatggccgccgccccatccagcggctgcaggaccacggtattctgggggacaagaccattctgggccattgcatccacgtcaacaccgccgagatggagatcatccagcacaccaacaccatggtggtgaataacccggagagcaacatgggcaacgccatcggcatctgcccggtgatccagctgcacaagcggggcatcctgctgggcatgggtaccgatgcctataccaacgatatgctggagtccatcaaggtggccctgtgctcccagcggagccagaactgcctgcccaacgtgggctggtgtgaggtgacggatatgctgttccgcaacaacgccaaaatcggtgagaagtacttccccgccaccctgggcgtgctgaaggccggtgcggcggcggacatcatcgtcatggactataagcccttcacccccttctccgacgagaacatcgacggccacatgatcttcggcatgaccggtcgccagtgccagaccaccatcgcaggcggcaaggtgctgatgcaggaccgtgtgctggtgggcatcgacgaggaggcagagaacgcccacattctggaagccgccaaaaagctgtggggtgacctgaaccacagaacgtattgatatcccatcatccccatatcacaataaggaggaatccccatgtctgaaaaaatgtatcccatccccttccgctcccttatgaactgggtggtcaccgaatacgccgactgcggcgagatcttcggcatccacaaggcctatcgtgcctccggcaagagcctgcccatcttcggtgagcgcatcgaaactcccttcggccccgccgccggccccaacagccagctggctcagaacatcatcgccgcctatgtggccggcgcacggttcttcgaggtcaagaccgtccagaagatggacggcgccgatctggccgcctgcgtcccccgcccctgcattctggccaacgacgagggctacaatcaggagtggtccacggagctgacggtgccgcaggccatggacgagtacatcaaggcctggtgcgccctgaaggttctcagcaaggtctacgatctgggcgatcccgacggcttcgtgttcaatatgtccgtaggctacgatctggagggcatcaagggcgagaaggtgaacacctacatcgacggcatgatggacgcccgccgtaccgccatcttcggtgagtgcaaggcggttctgaaggagctgttcccggcggagagcgacttcatcgacgccatctccccccgcgtctccggcagcgtcaccgtctccaccctccatggatgtcctcccgatgagatcgagcgcattgccagctacctcatctccgaaaagcacctgcacaccttcgtcaaatgcaaccccaccattctgggctacgagactgcccggcggacgctggacgccatgggctatgactacatcgtctttgacgagcaccacttcaacgaggatctccagtgggcggacgccgttcccatgttccagcggctccagaagctggcggacagctgcgggctggagttcggcctgaagctctccaacaccttcccggtggacaccacccgtggtgaactgcccaacaacgagatgtatatgtccggccggagcctgttccccctgaccatcgagatgtgccaccgcatctcccggcagttcggcggcaggatgcggatctccttcgccggcggcgccgagtacttcaactgcgataagctgtttgccgccggtatctggcccatcaccgtggccaccaccatcctcaagcccggcggctacaaccgcctgctgcaaatggtggagaaggtggaggctctgccctaccgccccttctccggcacggacacacaggccatctgtgacctgtccaccgccagccacacggacttccaccacgtcaagcccatcaagcccctgcccagccgcaagagcgacaagcaggtgccttggctggactgcttcacggctccctgcaagggcggctgtcccatcgagcaggatatccccgaatatgtggagctggtccgcaagggcctgtacggcccggctctgaagctcatcaccgagaagaaccccctgcccttcctcaccggcaccatctgcgcccaccggtgccagaccaagtgctcccggaatttctacgacgagtccgtccgtatccgggataccaagctggtggcggcggagcgtggctatgaggccctgatggcctccatccgccgtcccgccaaggtggcaggcaaaaaggccgccatcatcggcggcggccccaccggcatcgccgcggcctattttctgggccgtgccggtgtcgagaccaccattttcgagcgggagcagtgcctgggcggcgtcccccgccacgtgatccccgccttccgcatcaccaacgaggccatccagaaggacatcgccctgatggagaagtacggcgtggaggtccgctgcggcgctcccgccccctccgtggcggagctgaaggccatgggctacacccatattctctatgccgtgggcgcatggaaacccggccagctgggcatccccggcgatgtggccggcgccatccagtggatgaagggcgtcaaggccgggaacatctccgtgggcggcaatgtggccgtggtgggcgccggcaataccgccatggatgcggcccgtctggccaagcgcagcggcgcccagcacgtcaccatcgtctaccgccgcaccaaaaaatatatgcccgccgacgagcatgagttggcgctggcgttggcggacggtgtggtctttgccgagctgtgcgccccggtggagcagaaggatggcgtgctgcgctgcgagaagatgaagctgggcgaggcagatgcctccggccgccgcagccccgtggccaccggtgaatatgtggacatcccctgcgatctggtgatctccgccgtgggcgagcaggtggacagcggcctcctgatctccaacggcgtggaggtggacggcaagggccgccccgccttccggaccaatgtggagggcgtgtacgccgccggtgacgcccgccgtggccccgctacggtggtggagggcattgccgacgccgcacagttcgccgaggcagtcatcggcgctccccatacctacgatatcccccagcaggcctacatcaccaaggccgacgccatcgccaagaagggtatcctgcggatgagcggctgcgccgcctgcgagggtgagcgctgcctccagtgctccaccgcctgcgaaaactgcgccgactcctgccccaaccgggccaacgtggtcattgtcatggccgacggcagccaccagattctccatgtggacaagatgtgcaacgagtgcggcaactgcacccagttctgcccctaccactccgagccctgccacgataagttcaccctcttccagacggcggaggatatggcggattcccacaacgccggtgtcctgttcctgggcggcgaccgggtgaaggtgcgtaccttcggggagcccaaggagtacgacctctccggccgcaacgacctgcctgcggagctggaaaagctcatcgtcaccgtccgtgaccggtacgcctacctgtttgcgtaagtagccatagtagaagggagccgcccttgggaggctcccttttatacggtacgaaggagtacaaaaaaagcgttccggagccaaaggctccggaacgctttttcaaaaggggaatatgatctgcggaaagaacttagaactgctccttcttcttagccaccagcaccccaccggccagagccatcacgcccagacccagatacaccacgataccggcgtcaccggtagcgggcttggagggtgtcacaggctccacgggggccacgtagcccagattcaccatcagatcggtgatctcggcgtcggtaagaccgatggccttcatgtagtccttagcgcccttctgcaggtcggccttggacagatcctccacgccgaaggcgttctggagggtcttgatgatgttgctgttggcaatggcgtcgtacttgtccgtaccgggctccacgccgtagtagttgtagtaggtgaccatgtagtccgccaccacctcgtcataggtagcgcccatcaggcactccagcagagcggagacgaaaccggcacggtccttgccctcggtgcagtggacatagtaggtacccttgttggcggcgaagaaccgcaggccctcggccagacccttctggaactccggagcggagaagtccacgcccagattcagatagatcaccttctggccggagtagtaggtatcagcgaagccctcataggcctcggcctcctcctgactgttggcgaggttcatgatgacgttcacgcccgcctgcttcaaagcggcatccacataggtgttgcggcccagctccgggttgatgggggaggagccacggtacagcacatccttgcccatgccggtggtggcgatgttgcggaagttgccgaactcggcatcggacaggttgggataatcggcacggtcattggtgcgctgcaggtcgtgcatgatgtactcggccatgtagccgcccttctccgccatcttgaaggtgacctccacgggataggtcacaccctcccaagcggtccagtaccacgtcttatcctcgttggtgtgcttcttggccagctcataggtctcagcgaagttacccatgttgatggccatggagacgtagccggtaggcttaccgtcggcgtccttctccacgatgatggcgggcttgccggaatccacataggaataggtaggcaccaccggcagggtcagggtcttatccaggaacttgaccgtcaccagatcgccccaggcaaagcccagcttgcccatgaagtccttggccttgcagtcggtgtagacgttgccgtacttggtcatccagacgttggcgtccagaccgccgatggtgatcttgccgtcatccgtcttctccggcgggatgatggtcatgcggccctgaggctcgccgtaccgggccttggtgacggtgccgcccaactcatcggtgatgtagtccatgaccacggtgtccagcgacagaccgctctcgatctggctgctggcagcggcgaaggcgtagtagatgtcgccgccggcggccaggaagtcgttggtgatgacagcgtaggtggcatccttatcaaagggcttgccgttgatgctctcgatggtcacacggttgatgctctttgggccatagtaggtggagccgggataggtggtgtcgttcttgtcgtaatccttggtgcagtccaccgtcagcttcatgccggcggtctgggggaagccgcccagggacacaggagtgcagaaggtagcagcctccaacgcctccagcagctcggcgccggtgacgttcaccaccgtcagcgtattgccgaagggcagaacggtgaacacgtccttcttggtgatgtcgccggccttgatggcggcacggatgccgccgccgttggtgatggccacagcgttctccatgttgatgctgggcatccgggtcttaacggcccacatcatggcgtcggtaataaggtcgcccatgttggtctcctcggtgcggttgccgggctccttgtcgccgttgagctccacctcggtcttggcgaacaccttgccgtactcggcatccacctcaccgatgatcttgtcggcgatggccttgacggaggcatcctccttggtgtaggtgctcaggtcgatgagaccgttgctctccacgctcttggtggcgttatcaatgacgaaagcgcccacatacgcaagacccgtaccggtagactggatcatgccgttgtccttgctggcggtcatcacggtgtgggagtggccgtcgatgacgatgtccacaccggggacgttcttcacgaaatcgatggagcggttgggttcggaggaggcatccacgcccagatgggtcagagcgatgacgatatcggcgttgccctcctcacgggcgaccttgatcttggcgttggcggcgtcatacagcttctggccggacaggaaggtcagacccttcatcagagcggggttggccttggtctgagtctccggagtggccacacccatcacggtgaggttaaagagggtgttgccgtcagcgtccgtaacgggagcggtagcgccgggagcgaagatggaatcacccttgtcgtccaccagattgacgcaggtcaccaggaagtcggcggcggcgttgctgagattcgccttcagctgggggaagccgtagtcaaactcgtggttgcccagcgtcacggcgtcgtagcccacggcattcatcagctccacggcggtagcgcccttgctgaggctgacataggtagagccttggctgaagtcaccggcatccagcagcaccacagcgctggcgccccggtcgtagcactcgtttttcagtgccgcaaccttggcgtatttgtcaatagcgccatgtacgtcgttggtgtgcagaatgaccgtcttgcccttcagagaagctggcagctgatatccagtcgccgttttctcttctgcccaggtggccggcaccaacagagtcagtgtcatcaccagggacaggagcaatgctaatactttccgcatggtcctttcctcctttattttttggaacgcccgtggcatcccataatacgtctctatcatacatgattttgcacaggaatacaagtccgttctgtgtttttttgtgtaaaagtacgataaaatctctctgtgcgagccatacaaaaatcccatgacgtttttgtacattccgccgcaaccggtacggacgaccctgaaaaatggtgtggctttttggtttttttctgttataatataggttagtttcgtgtcaaattcggaagggagtgcaagctatgaagtatctgtttcgaggcggcaccgttgtctccggcagagggacacgccgtgccgatattctggtggagggtgaaaagatcgtggaggtgggccgcaatatcacccgcaaggccgaccagatcatcgacgtcaccgggatgttgctgatgcccggcttcatcgacgcccacacccattttgatctggacgtgtgcaataccaccactgccgacaatttcaccaccggctcccgggcggccctgcggggcggcaccaccaccgtggtggacttcgcctgccccaacaagggggagagcctgcaccacgggctggagctgtggcaccggaaggccgacggccgcacctgctgcgactacggcttccacatgaccatcgacgactggaacccgcagatcgaggcggagatcgacgatatgtacgccgccggtatctcctccttcaagatgtacatgacctatcccgccatgatgatcggggacaacgccatgtaccacgccctgaaaaagctgaaggagaagggcggcatctgcggcgtacactgcgaaaacagcggcgtcatcgacgccctcatcgaggaaaagaaggccgccggggaaatgggtgtctcctcccacccccggacccgtccggactttctggaggcggaggccgtgagccgcctgctgcggatcgctgaggcggtggatatccccgtggtcatcgtccacctcaccaacgccgccgccctgcgggaggtggaggccgcccggaagcgtggccagaaggtctatgccgagacctgcccccagtacctgctgctggacgacagcgtgtatgataaccccgactactctctggcggcccgctacgtctgtgcgccccccatccgcaaggcagaggaccagaaggccctgtggatggccctgcgccgtggcgaaattcagaccatctccacggaccactgttcctttacgctggcccagaaggacgccggccggggggacttcaccaaaattcccggcggcctgccgggggtggagacccgtggcgagctgatctacaccgccggtgtcaccacccggaagatcagccttgccaccatgtgccgtgtactggcggagaatcccgccaagctctacgggatgttcccccggaagggcatcctgcaggccggggccgacgccgatatcgtggtgtacgatccgctggcggatcacgtcatccgtgcggcggacatggtggccaatgtggactataacccctacgagggcttcaccacccgtggctccatccagcaggtgtggctccggggccgtctggcggtggagcacggcaccgtgctggccgggcccgacggtaagtacatcccccgtggcaagaactgcctgtaaagagaggggaaggcttccatgaccgagatattatactgccagtcccccgccctgtttctgctggcggtggtgctgctgatctgcttctttctgcggcggcaggctcaccgggtgcgggcggcgctggatctggtcctgtgcatcctgctgctcatcggcggcgtggtgctatattatctgggaatgtacggcgactgcttcaccatccatgacttctggcagatccgcacctccggatgggtgggactgggcgttgtagccgccgggtcggtatggcatctgtgcaaggtctgcaagcggggcgtggagcgccgccggacggaaagggccgcccgccagacggaggaggcccaccgtcaggcgctggagagcgcccgccgggaggcgtatgaagccggaaaggccgacgccgccaaggagcgtcagccgtccccctccaccccggagacatccgcccctgagcttcccctcaccccagcggacgccgtctcaccggagtgtgcagccgctcccgctgccgacgcaccgcagtcctccaccggaggaacaggtcaagccctgtaaaaaccccgacacaaagcctatgaccctctggttacagtgtctgccaaacaccgtgcagccccggtaagcagtcggtgctgagctaaaataccgccggtgcagcaaccctcaaaataccatgcggaatcggcagaacaccatgcagcaccgacagaacactgtccttgacttccccaccggcatctgctgcaatcccccgtgttcgctgggagggcgagtcgttcggagaaatgacagccggataaggcgcagactgaaatgtctgtccttatccggctttttgtctgggaaaggagcgatcccatggagttaaaatttctcccctccctgctgggggcggagagcctgtggctggccatgcccatcgcagaggtgctgacggccctctatgccgcctataccatgagtcgctatacccgtgcgctaccgctgagcacgagataaaaaggacgccggtcgcttctccggcgtccttttggtattttgtggatcacttccacagagagcagatcaaatccgtatagtcggagggattctccagcggcagacccgcaatgagcatggcctgattcagcagaatctcggcatactttttggcccggtcggggtccgtgatgcgggcggactccagagcggcaaaggcgggatgctccacgttcacctccagaatacgcttggccttcagggcgaggtcgggctgcacggcggcgaaatacttctccatctcgaaggtcatgccctcaccgctggtaaggcagacggggtgggacttcagcttgccggaggccttcacctgatccacccggcttcccagcgtctccttcaggaaatccagcgtctcctgatgatccgccgtctccggctgcttctcgtcccccagctccagatcgccgtccacggcggagcggaatgccttgtcgccgtaggtgcggaagatatcggggatgaactcgtcggtcttatcggtgaagtacaggatctccatgctgcgatccttcagcagctccgtctggggcagatgatccaccgcctccacgctgtcgccggaggcgtaatagatatacttctgctcccccggcatccgggagacgtactcacccagcgtcaccagcttcatctgggtggaggagtagaacagcagcagatcctgcagcttctccttcatggcgccgtagttgttcagggcgctgagcttcagctggcggccgaagctgcggtagaacttctcgtagccctcccggtcgtccttcagcatccgctccagctcgctgcggatcttcttctccagattgttggagatgaccttcagctggcggtcgtgctgcagcagctcacgggagatgttcaggctcaggtccggggagtccaccacgccacggacaaagttgaagcactccggcagcagatcggcgcacttatccatgatcatcacgccgctggagtacagctgcaggcccggctcgaagtcctcggtatagtactggccggagggctgggagggaatgaacagcagggccttataggtgacggcgccctccgcagagacggtgatcaccgactggggcggggcgaaatccccgaagtgctcctgatagaacttgtcgtactcctcccgtgtgacctcgctcttcttccgctgccacagggggaccatgctgttgagggtctcccactccttgatctcctcatactccggcttgtcctccggacagccctccttgcgcttggagcgggtcatttccatacggatggggaagcggatatagtcggagtacttcttcaccagacgctggagggtgtgctcctgcaggtactggctgtactcctccggctcctcgtcggccttcaggtgcatgatgatatccgtgcccacagtgtccttccggcagggttcgatggtatagccctccacgccgtcggactcccagcgccagccctgctcatcgccgtacttccgggtgacgacggtgatgtggtcggccaccatgaaggcagagtagaagcccacaccgaactggccgataacgtcgctctcggcgtccttatccagctcctgacggaactggaaggtaccgctggaggcgatgacgcccagattctgctccagatcggtatcgttcatgccgatgccgttgtcgctgacggtgagggtgcgggcctcctgatcggggcggatggtgatggcgaaatcctcccgcttcatgcccacctgctcatccgtcagggagcggtagcacagcttgtcgatggcgtcggaggcgttggacaagatctcccgtaggaagatctccttatgggtgtagatggagtggatcatcagctccagcagacgcttggactccgcctgaaattcttttctttccatagttgattccccttttctaatagatcgggagacgccgcagcgcctcccgctttttacctgttcagctgcgctggcgtttgctgcacagcagatagcccagtcccgtcagcaccgtggccacagcggagacgatcatggtgagcttcagcagcagccgcacggccttgctctccagcagatgatccgtcacctgccggacgcagcggcccacagcacccaatagccggcccgccagacccgtcaccttgtggagaagtcccttccccagcgacaggatgcgccgtgtcagaggcagggcgtgtgacgccagctgccgagccttgtgtaccttggtcgaaagcattttcatccctccccatttctctatggtcaattatagacagtctgtccgttattgtcaattcccgccggggcggggcgtgtaaacttcctgtgaacaatgggataaaaaagctgcggtagggcttacgctctaccgcaggggacattattcgccgcttccggtgggggccgccaccggatcgatggcggtcaggacacccaccaccacaaaccgggcatcttcaaactcatacgagcaggtggagagggtcaccaaatgggcgctggagaggtcctctggcaccggcgtcttggactcgaaccgggacgagcgcaccagcgcactcaccgtatctgccgacagcaccgtggagtacacggcgtcgtcatagtccaccacggacccggcgatcaggtccagccggtagctctgctggggagtgtagagatacagataggggtgggcgtcgtagaactcctgcttcttatactgcaccagtgcgccgaacatggcgccggacttcatgtgatggccgtagaccagcgtattctggtcggagaagtccgagcgattgacgtagtccatgaagatggtgccgttcttgttccatgtgccgtccagcaggcgatagaggtagtagtcgttgtcctccgcctgcacgatggggtagttcaggcccgtgtccgccccgtagagccacgccacgatgtcgctgttgacgccttccagcgccgcaaagtccacgtagacctgctccggctccccttccggctcctcatcgctgctcaggtccgggatgtagacgtatttgccggcatccttcagcacctcgtcgctcttgtgcttttccagcatatagctgccaatctgataggctgcaaagagaaatacacctatgaataccgccagcaggatatagtataccgctttcttcataccggagccctccctgttgattttttacattataccagatggcccaccgcttttcaagaaaaagcttgatgccctccggaggaacgggacaggggtttctgcgctggacagggggcggcagatgtggtatgatagcttagattgacaaggcaagaaaggtgtgagacagatgcaggtagagagcctgagctggttccccggtcacatgaccaagacccggcggatgatcgccgccgagatcgggcatatggacgccgtgtgcgaaattctggatgcccgcatcccgctggccagccggaacccggatgtggacgagctgacggcgggcaagccccgtctggtggtgctgaaccgagtggatcaggccgatcccggccagacccggcgctgggctgcctacttccgggagaagggctatgccgtgctggaggccaacgccaagggcggcgccggcaccgcccagttcgccgccgccgtacgggagctgctgcgggataaactggaggcctatgctcagaaggggcaggtgggccgtgtggtgcgggtcatggtgctgggcatccccaacgtgggaaaatccacctttatcaataaggtagcccgccgcaagaccgccaaagccgaggaccggcccggcgtcacccgcagcaagcagtgggtgccggtggacagcacgctggagctgctggacacgccgggtatcctgtggcccaagttcgacgacccggaggtaggcaagcgtctggccttcaccggggccatcaaggacgatgtgctggacatcgaggagctggcctgctatctcatggaatatctgggacagcactatacctcggtgctggaggaacggtataagatcgccgtggagtcggaggacagcgggtatgacctgctggaaaaggccgggcgcaagcggggctttctcatgcggggggcgcaggtggacaccgagcgcatggcccgcatcctgttggacgagttccggggcggcaagctgggccgcttcacgctggagacggtggaggacgccacatgacggacttctcgctggaaaaggccgccatggcccgtggctgcgccgccgtatgcggctgcgacgaggcgggggccgggccgctgatggggccggtatacgcagcggcggtgatcctgccggtggacggctgcatccccggccttgacgacagcaagaagctgacggagaagaagcgggaggctctgttcgacgtcatctgccaacaggcggcggcgtgggcggtggcctccgtcagtgcagaggagatcgacgcaacggacatcctcagcgcccggatgaaggccatgcagctggctatcaacgctctggcgatcccggcggattacgccctcatcgacggcaaccgggatcacggaaggacctccgccatcaccacgccccatgagacagtggtgggcggggacgggcgctcggcgtccattgccgcagcgtcggtgctggctaaggtgagccgggaccggtatgtgtgccgggtgctggatcccctgtacccgcagtatcagttcgccaaacacaagggctacggcaccaagctgcactacgccatgctggaccaatacgggccatgtccggagcaccggatgagctttctcaccaagtggaaggagcggcgcacatgagccgggcggagggcgtatggggcgaggcccagatcgccaactatctgcggcgcaggcgctatgagctgctggctcacagctatcactgccggttcggggagatcgatctcatcgcccgcaagggcggcgtgctgtgctttgtggaggtcaagacccgcagcaatctggcctgcggcctgcccagagagtacgtcaccgccgccaagcaggagcgcatccgcaagacggcggccttctatctgatggaaaaggggctggactgccccgtccgcttcgacgtggcagaggtctataccgacggggcgcactcccctgccgccacccacatagaatacatcgaacacgcattttgaggtgatacatacgattccctattttgacgcacactgcgacaccatccaccgctgccacacggcagggacactcttccgggacccggagctgcgggccttctacgacaccgcgggtaatttgcgccgcagcggcggacacatcgatctggagcgggccgggggctttgcccgctacgcccagttttttgccctgtatcagagcccccagctggtgccggagggcagctccatgccggagcagggtatcctgctccatcagcggttcctgcgggagatggaggagaaccgggagcgcatcctcccctgccgcaccggggcggaggtggacgaggccgtccggcagggaaaggcagcggcgctgctgagcatcgagggcgccgagctgctggactgcgacatccggcggctggacactgcctatgactggggcgtgcggctgctgaacccggtgtggaactacgccaaccgtctctccggctccaatgcccagcagccggagcaggggctgactgcctacggccgggacttcctgcggcggatggaggagctgtccatctacgtggatgtgtcccatctgtcggatgcgggcttctgggacgtggtgcgtctggcccggcggcccgtggtggcctcccattccaacagccgggccgtctgtccccatcggcgcaacctcaccgacgatatgttccgggccatccgggacagcggcggcgtggcggggctcaactactaccagcactttgtgggcgacgaccccaccatagagggtctggtgcgccatgtggagcattttctggagctggacggggaaaggtccctgtgtctgggcggcgacatggacggctgtgagctgctggccggcgggatgcggggtctggaggatgtgccgctgctgtggcaggcgctggcggaccggggctatccccagtcgctgctggaggacctgttctggaacaatctgcggcggctgatataaaatcgggagaggaggcggcgcatggcgctgtatgctctgggggacctgcatctgtccctcaattccaacaaatccatggagatcttcggagacggctggcaggactatgtactccggctgaaggaggccttctccgctctgaggccggaggacgtcaccgtgctgtgcggcgacctgtcctggggcatgagtctggaggaatcgctggaggacttccggttcatcgacgccctgccggggaagaagtatctgctcaagggcaaccacgactactggtggaacaccgccgccaagatggagcggttcttccgggagcatgagctgaccaccatggaaattctccacaacaactgtaagttctacggagagctggccctgtgcggcacccgtgggtggttttacgagctggacaaccaggggacccacgacgaaaaggtgctgctgcgggagatcggccggctggagacctccctgaaggcggcgggggagcatgagaagctggtgtttctccactatccgcccctgtatcagggctaccgctgcccggagatcctgcggctgctgaaggagtacggcgtgaagctgtgctgctacggccatctgcacggcgcttcccaccgccgggccatcgagggaatgtgggatggaacggagttttcgctggtgtcggcggactatctgaaatttgttcccaaaaaaatttgcgaatgatgcaaaaaaggtgtggaaattgaaattgttttctggtattatataaaattgcattgattataaatgaatgctgaacggaggaaaagtcaaaatgagtgtaaagtcctgtgaaaatctggaaaagagccaggtcaagctgaccatcgaggtcggcgcagaagaattcgagaaggctgtcaacaaggcctatctgcagatgcgtggcaagatgaatgtccccggcttccgccccggcaaggctccccgcaagatcatcgaggggatgtacggcgctgaggtcttttacgaggaggctgtgaatatcgtgctgcccgacgcctatgaggccgccgtgcaggagcagaagctggaggtcgtgggctatccccaggtggagctggagtcctgcggcaaggacggcgtggtctttcagtgcaccgtggcggtgtatcccgaggtgacgctgggccagtacaagggtctggaggccccccgtgccgaggtgaaggtcatggccgccgacgtcaacgcccgtctcaaggagatggccgagcgcaacagccgtctggtgagcgtggagcgtgccgtgaagaagggcgacaccgccaccatcgacttcgagggcttcgacaacggcgtggctttcgacggcggcaagggcgaaaacttcgatctggagatcggctccggcagctttgtccccggctttgaggatcagctcgtcggcatgaaggccggtgaggagaaggatatcgacatcaccttccctgagaattacacccccgaactggccggcaagcccgttgtgttccatgtgaaggtcaacgaggtgaaggtcaaggagatccccgccatggacgacgagtttgccaaggacgtctccgagttcgacaccctgaaggagctgaaggccgatctgaagaagaagatcaccggggagcgcagggagtccgctcagcgggccttcgaggacgtgctgatgcagaaggtggccgagggcatcacctgcgatatccccgatgccatggtgaatctgcaggctgagcagatggccaacaacttcaagcagcagctggcctctcagggcatcccctttgaccagtatctgaagatgaccggcaccaccgaggccgacttcctgtctcaggcccacggccccgctcaggagcaggtccgcatggatctggccgtggaggccatcatcaaggccgagggtctggaggccaccgacgacgaggtgaacgccgagatgcagaagctggccgacaagtacggcatggatctggagtccgtgaagaagtatctgcccgccgctcaggtgcgggagcaggtcatccgtgagaaggtggtcaagctggtggcggacagcgccgtggccgtggcccccgaggcggaggagaagaaagaagataaggcggaggagactgccgaataaaaccggcgtattctgctaaaatcacaaacgggcgggtatactttgaacatctatctgtacaggaggcatattttatgagtttagttccttatgttgtggagcagaccaaccggggcgagcgttcctacgacattttctcccggctgctcaatgaccgcatcatcttcctgggcgaagaggtcaatgataccacagccagtctggtggtggcacagctgctgtatctggaggcacaggaccccgacaaggacatccagatgtacatcaacagccccggcggctctgtgacggcgggtatggccatctacgacaccatgcagtatatcaagtgcgacgtgtccaccatctgcatcggcatggcggccagcatgggcgctttcctgctgtcctccggggccaagggcaagcgcatcgccctgcccaatgccgaggtgatgatccaccagccctccgccgggacccagggtaaggtcacggatatggagatcgacgtggagcattttctgaagatcaagcagcggatgaacaagatcctctccgaaaacaccggcaagaccccggagcaggtgaagctggactccgagcgggacaactggatgaccgctgaggaggcccgtgactacggtctggtggacaaggtcattttcaagaggtaaatcatggcagaagacaagaaaaatctgcgctgctccttctgcggcaagccggaggggcaggtacatcgcatgatccagggccccggcggcgttcgcatctgcgacgagtgcgttcagctgtgtatgtccattctggacgacggctacacccccggcatgggggaggacgtgcagacgatggatcagctgcccaccccctgtgagatccgggaggtgctggatcagtacgtcatcgggcaagaggatgccaaggtggctttgtcggtggcggtatacaaccactataagcgcattttcttcggcggcggcgaggatgtggagctgcagaagagcaacatcctcatgatcggccccaccggctccggcaagacgctgttcgcccagacactggcccgtgtgctgaaggtgccatttgccattgccgacgccaccaccctcaccgaggcgggctatgtgggcgacgacgtggagaacatcctgctgcggcttttgcaggcggcggatttcgatgtggagctggcggagcggggcatcatctatgtggatgagatcgacaagatcgcccgcaagagcgagaacacctccatcacccgtgacgtgtccggcgagggcgtgcagcaggcactgctgaaaattctggaggggaccgtggccaacgtgccgcctcagggcgggcgcaagcacccccatcaggagttcatccagatcgacacccacaacatcctcttcatctgcggcggcgccttcgacggtctggagaagatcatcgagcagcgtaccgatcgcaagggtatcggcttcgacgccgtggtggagagcaaggctgagcgccggacgggccaactgctaaaggaggtccagccccacgatctgctgaaattcggcatcatcccggagctggtaggccgtatgccggtgatggtgaccctcaacggtctgggccgggatgatctggtacagatcctcacccagccgaaaaacgcactggtgaagcagtatcagaagctgctggagtatgacgatgtggagctggtattccagccggaggcgctggacgccgtggccgatcaggccattcagcggaacatcggcgcacgtggcctgcgggccgtgatggagggacttctcaccaagatcatgtacgagatcccctctgaccccaccatcacccgtgtgaccatcacaccggaggcggtcctaaagaccggagagccggagatcacccgtgatccccagcgcacggagcggcccggccgcacccgtgacggcaaggcggagcacgatccctccgccccggcatcctaacgaatcatgaggagaggcgaacccgttcgtctctcctcttttccacagcaaaggagaccagttatgaataccatcaatatccccgttctggcgctgcggggcatgaccgccttccccggcgaaactgtaagcttcgacgtggagcgggagatttccatttttgcgctggacaacgctatggagggcgaccgtcgtctgtttctggtgacgcagcggaagatcggcgtctccgagccagaggagcaggatctctacgagatcggcacggtgtgccatgtgctccagatcatcaagacctccgagactacggtgcgggtgctggtggagggtgagcagcgggcgagactgcaccgcctgtggcagacctccccgtttttgcaggccaatgtggagctgctggaggatgctccctaccgaagcacctctcacacggaggcgctgctgcggcagacctacgccatcttcggcgcctataaggagctgtccccccagatgtccgacgaggtggtggcgcaggtgctggatcagcgtgatcccggccgtctggcggatttcatcgcccagaacctgaccctgcggcatcaggaccggcagcgggtactggatcaactgcacccggtgaagcggctccagctggtcaatgacatcctcacccacgaggtggacgtcatgggtctggagttcgagatggagcagaaggtgcgccagcgggtggcgcaggtccagaaggacatgatcctccgggaacagctgaaggtgctgcagcacgagctgggagaggacggcgacgaggagctgtcggattatgaggcccgcatcaccgccctgcacctgccggaggagctgcaccgcaagctcatgaaggaggtagaccggctggccaagcagcccttcggcagcgccgagggctccgtcatccgcaactatctggacgtgtgtctggagctgccgtggggcaagtatacccgtgaccgggcggacgtggcgcaggcccggcgcatccttgaccgggatcacttcggtctggagcaggtgaaggagcgtattctggagttcgtggcggtgcggcagctgagccccgactccaaggggaaaattctctgtctggtgggccctcccggcgtgggcaagacctccatcgccctgtcggtatccaaggccctgcaccggaagatggcccgtctgagtctgggcggcgtccgggacgaggcggacattcggggccaccgcaagacctacatcggcgccatgccgggccgcatcatcgacgccatctcccgcagcggctccatgaatcccctgttggtgctggacgagatcgacaagctgggcagcgatatgcggggcgaccccgcctccgccctgctggaggtgctggacagcgagcagaactacgccttccgggatcactatctggagatcccggtagatctgagtcaggtgctgttcatcaccaccgccaacaccacctccaccattccccggcccctgctggaccggatggaggtcatcgagctcaccagctacaccgacgaggagaagctgcagatcgccaagcgctatctgctgccccggcagatgaaggagcatgggctgaaaaagacccagctgcgcctgtcggatgacgccatccggcagatcatctccggctataccagagaatccggcgttcgactgttggagcggcagctgggcaaggtgtgccgcaagaccgccatgcgtctggtggacggtggggagaagcgggtgaatgtgacccccgactccctgcgggagctgctgggcgtggtgcggtatcaggacggcgtacatagcacacggaatcaggtgggcgtggtgaacggtctggcctggaccgaggtaggcggcgaaattctggaggtggaggccggcgtcatggagggctccggcaagctggagctcaccggcaatctgggtaccgtcatgcaggagtccgtccgggcggcgctgacgtgcttgcggagccggggcggcgagctgggcatcgagaaggacttttacaagacccgtgacatccacgtccacttcccggagggggcggtacctaaggacggcccctccgccggcatcgccatcaccaccgccatgctctccgctctgacgggacggaaggtccggggcgatgtggccatgaccggcgaggtgacactgcggggccgggtactgcccatcggcggactgaaggaaaagaccatgaccgctctccgcagcggcatccgcacggtgatcctccccaaggacaacgtcaaggatctggaggagatcgaccagaccgtccgggcggccctgcacttcgtgccggtggagagcgtggatcaggtgtttgcggcggcgttggtcccctcccctgccgtgtcggcggtggagcatatgaccgccctgcccatggaaccggctgtcccggccctgcgggtctgaggcagtcagagaaggaggccatcatgaccatcaacttcaacaaggcggagttcgtgctgtccgccaccacccaaaacgcctttatccgggacggtcggccccaggtgacctttgccgggcgctccaacgtgggcaagtcctccgtcatcaaccggctgctgaaccggaagaacttcgcacgggtgggcgctacccccggcaagacctctcaggtgaactacttccgcatcgacggcaagctctactttaccgacctgcccggctacggctatgccaaggtcagcaaggaggagcgggagcgctggggccgcctgatggagagctactttcaggagccggggcttatctcgctgggaatcctcatcgtagatgcccggcacaagccctcagcggacgacgtaaccatgtgcgactggttcaaagaggcaggctgccccatgttggtggtggccaacaaggtggacaagctgaaaaagcgggaagtagagcccaatctggagatcatccgccagacgctggagcttccccccgacacgccgctggtccccttctccgccgagaagggcgacggcaagacggaggtgctgtccctgctgagccagttcttcgcctgagtatgttccgtatccccctgtccttcccggcagggggatatacgtacccgttcatggaacacacgctcggtggacggctctggcgtacaaacagtctccgtgtccgtagaaattttcatcaaatattgtatgaaaagattgtatttttcctgaactgtgatacaatcagatggaatgagactgccccctgcgggcagaaggcccctgtgaggaaaaactctgcggataaaagcgtcccttcggggacagaaaggcggttcctgctgtgatctatctggataatgccgccaccaccctgaaaaagcccccctgtgtggcggaggcggtggtgcgggctatggccaccatgggcaactccgggcgcagcgcccatcaggaggcgctggacgcctcacgggtcatctatcgcacccgtgagcagctggcccggctgctgggctgctccgctgcggagcgggtggtgttcacctgcaactccaccgaggccctgaacatcgccatcgacgggctgttcgcccccggtgaccacgtgctgtccaccgactgcgaacacaattccgtgctgcggcccctgtaccggctggagggggtggaggtggacttcctgccggcggatcggcggggctgcatcgactacgacgatttccgccgcctgctgcggcccaacacacggggcatcgtctgcacccacggctccaacctgacggggaatctgctggatatccggaccatcgggcgctttgccaaggagcacggcctgctgctggtggtggacgcctcccagacggcgggggtgttcgacatcgacatggaggccatgggcatcgacgtggtgtgcttcaccggtcacaaaagcctgctggggccgcaaggtaccggcggactgtgcatcgctccgggggtggacatccgccccttcaaggtaggcggcaccggtgtgcagacgtatctgcctcagcagccgccccagtaccccacccggctggaggccggcaccctcaacggccacggcatcgccgggctgtcggcggcgctggactatctggaggagacggggctggagaccatccgcagccatgagcaggcgctggcccggcagttttacgagggggtgtccgccatccccggcgtcaccgtatacggcgacttcaccacatgggaccgggcgccggtggtgtctctgaatatccgggactatgactcatctcaggtcagtgacgtgctggcggagcagttctccatcgccacaaggcccggcgcacactgcgccccccggctgcaccgggcgttgggtacgatggcacagggggccgtgcggttcagcttcggctggttcaacacggaggaggaaacacaggccgccattgcggcagtcaggagtgttgcagaatgatcgaaaaaaagcgttggcttcttatcaccttccacaccacctctgaggccatggccatggagcagcggtgtcaggaggcgggccttgcagggcgtctgatccccgttccccgcaccatcaccgccgactgcggccttgcatggcgggcagagctgtccctgcggccgcagctggaggctctgacccagagcatggacgtggcgggctactacgagctggagctgtaagaaaacaccgccccatccggcaaagccgggatggggcggtgttttgtgtgtatgcccctctcctgccggtcttggaagggaaagggctattctccaaatagaatcaggcttttccctgtcccagcttgcgtaggcaacaaaaatatagtataatatctccggatatcatgtgcaattccgataaaatcagcgcaatttcgcagaaggagacacgtcatggccagctttatcgtcaacggtcaccccgtcaccgtggagaaaaatcaaaaactcatccgctatctgcgggataccctgcacctgacctctgtgaaggacggatgcagcgagggtgcctgcggcacctgccatgtcctcattgacggcaagcccaccaaggcctgcgtcccccagacggagaagctggaggggaaaaccatcgtcacagtggaggggctgtccgactgggagaagcaggtctacgtctttgccttcggtgaggcgggggccgtgcagtgcggcttctgcatccccggcatggttatctccgccaaggcgctgctggatgtcaaccccgaccccacccgtgaggaggccgccttcgccatccgcaacaacatctgccgctgcaccggatatgtgaagatcatcgacggcatcctgctggcgggtaaaattttccgggaggggaagctgccgcagcccaccgccgatgactggcagatgggcagccgggtccaccggctggatgtggcggagaaggtactgggctacggccagtaccccgatgacgtgtacgtggacgggatgtgctacggcagtgccgtccgcagccagtatgcccgtgcccgtgtgctgtccatcgataccagcgaggcggaggcactgcccggtgtagtgtgcgttctgacccagaaggacatccccggcaaggtgaatgtgggccacctgaaaaaggatcagcccaccatgatcggcatcggtgagatcacccactatctgggggacgccgtggctctggtgtgcgcccgtgaccgggagacgctggaggaggccaagaagctggtgaaggtggagtacgaggtcctccctgccgtccacaacccggaggaggccgctgcgccggatgcgccgctggtctttgaggaggaggagagcaatgtgcaggcgtataagcacgtctcacggggcgatgccgagggcgccatccgccattccaaatacgtccttacgcagcatttccacaccccgtggacggagcacgcctttctggagccggagtgctgcgtggcgctgccgctggaaaacggcggcgtgaagctgttgaccaccgaccagagctcccacaccaccatgcacgagtgtgcctccatgctgggagtggactatgagcactgtcaggtacagaatatgctggtgggcggcggcttcggcggcaaggaggatatgtccgtgcagcaccatgcggcgctgctggcctatgtggcccgtgtgccggtgaaggtgaagctcacccggcaggaatccatcctcattcaccccaagcgccacagctttgacatggacttcaccatgggctgcgacgaaaacggcatcattcagggcgtcaaggccagcgtggtatccgataccggtgcctttgcctctctgggcgggccggtgctggagcgggcctgcacccacgccgccggcccctacgcctatgagaatttcgagatcgagggccgcgcctactataccaacaacccccctgccggggccttccggggcttcggtgtcacccagacctgcttctgcacggagacgctgctcaacgagatggctgatctggtgggcatcagtccgtgggagatccgctaccgcaacgccatccgccccggcggtgtgctgcccaacggccagatcgtggacgattccaccggccttgtggagacactggaggctatcaagcccgcctatgacgaggccgtcaaaaacggcgatccggtgggcatcgcctgcgccatgaagaatgccggtgtgggggtgggcatccccgactggggccgctgcaagctgatcgtggaggcggacgagaaggtgcatatctactccggcgcctcctgcatcgggcaggggctgggtaccgtgctggtgcaggtggtggtcaccaatacggggctgcaccgggacaacatcgtttatgagcgcagcaacacatggatcgctccggactccggcgacacctccggctcccgccagacgctggtcaccggtgaggccacccggcgggcctgcgaaaagctgtcggtggcgctggcgggcaagaccctccatgatctggtggggcaggagttctacggcgagtatctggccaaaacggaccctctgggggccgatgtgcccaaccccgtcagccatgtggcctacggctatgccacgcagatgtgtattctggaccgggagacgggccgtgtcaagaagatggtggccgcccacgatgtaggtaaggccgtgaaccccctcagctgtgagggacagatcgagggtggtgtggtcatgagtctgggctatgcgctcacggagcagtatcctatcgacgtaaactgcaagcctaccgccaaatacggtatgctgggtctgttccgtgccaaccagatcccgccggaaattcaggccattgtggtggagaagcccggcctgaaggtggccggaggggccatcggcatcggagagatcacctccatccctacggctcccgccattgctgacgcctacttccggctggacggacagcgccgcctgaccctgccgctggagaataccccctacgcccggaagaagtgatttgaatttttctgcacctcccccatgcagtccgctgcatgggggaggttttttgggacgctgctgcatgggccacgggttggccgtccacagggattctttctgtgaaatttatacaacactttccccttcgttcataattttttcacacctatgtgctaaaatgaactccattaacggaacgtatcataaggaggcttctgtcccatgatgatcgaaaagagcggcagcatccgtctcaaggatatccccattccctccggcgctacgccggagcagcgggagctggctcagggcatggtacgggtgaatcacctgtaccgcagtgccctgaaggtggccgtgacccagatggagatcctggacgaggagttcgccagtctgtacgaccattctcccattcaccacatcgagtaccgcatcaagacgctggagagcatcagcgataagctgcgccgccggggctacgacgtcaccatcgacaatatctatgcctacatacaggacgtagccggtatccgggtcatctgcaactatctggatgatatctactatctccgcagcctgctgacccggtccgaatccttcaaggtgctgcgggaggtggactacatccagcagcccaaggaatccggctatcgcagtctgcacctcatcatcgacgtacccatcgtcatctccgaggggacgctgcatctgccggtggagatccagctgcgtaccattgccatggatatgtgggccagtctggagcatgagctgcggtataaatccgaccgcaatttctccgattccgacgccgcacggctgcggctatgcagcgaggccatcagcgagatcgaccgggagatgcaggacatctatcagggcaaggaacccagctatcatgagtaaagcaaaggagtgctgcggctgtgcagcactcctttgttttggatgatttttgcgtgccgacggcatgctttttctgatagcttttccctttgtgcctccggcggcccacttttcccagcagctggaaaagtgggcaaaagagtcgtttgaaaccgatggtttcaaaactttctttcctctcaagagcttcgtttattataggtcgtaacgggaattgactcagcaacagacccgctgccgctcccactcagttgaaggggtaggagcttctggtctatgatatcgtgcccgggacagcaactttttctccctgataccggccgtagtacgaatacttgcagaaaatcccatccggatactaaaaaagctctcccgcttcaagcaggagagctttcgtccgtctctgcggagccgcctgccttacagcgccgcccactcctcctccgtcagcagcgtgttcagcgcctgcaaaagggcgttgggggtcatgcgctccggcagactcagtttcctgcacagcgcctgccgccgggcggcggagtcggggccgatcagtcccttttccaacagatccgccttggtaagccgcaagggggccgccggggcctcctctccctcccatgtggcgccgcagcggcgcagggcttccagcagcacggcggggggcatcccctccacgcccagcttgccctccttaccgcccttgcgtttgcggcgctccttgccgtacacgtccggcacataggcctgcaagatctgctccggcggcagaacacccttcaggtgattgcggatcacaaagcccgccccgtccgggtccgtcataaggatgacgccccgggccgccgccagacggcggagataggccagcttctcccggtcgtggaacacggaaaatccccccgtctccacgatcacggcgtccaccacctgcgaaagggcattcttatcgtaccgcccctccaccacgatgacctgccgcacacggggcttcaccggctgccggccagctccatgaggaacagcttcagctccgcctcgctgtccatattcttctcgcttttcatccgccgatccagcctctggcatcggatgaccgccgtttgacaccattcgtgatccacctttcctgccgcctgcatcaacagcttggcgggataatcggagctcatgctccacagctgcttgagccagaaccggtccttcccggcatccagcgccatccgggccgtatacagccgcctcagctccttgcccaccgccgccagtatgacgatgggctccgtctgcatccgcagcagctcccccagcacctgcgctgcctgatcgtacttcccggcagtgatgctgttggtcatgtcaaagacccgtgcgtccagcaccgggtccgccacggcgttgatatcctccaccgtcaccgcccggcccttggcataggcggcgatcttcccgatctccggcaccagctccgtcatcagggaaccgcaggtgaacagcagatgatccgccgtggcgtcgtcgatgtcgtgtccggcggcggcaaagcggcgcttcacccatcgcagcagctgcgcccgctcctgctggcggaactccacctcgcacacggacttgtccagcgcagcgcacagctttttcatcttgccgtcccgcttatagggcagcagatcgtataccagcaccagcgtgcagtactccggaaagtccgccagcagggccatcagcgccgtgcgctgctgctcatccagccggaagatgtccagatccgtcaccaccaccatggtgtgctgggccatcatgggcatggcctccgtcacctctgccagttcctgcactgtcagtcccttgccggagagccggtggtagttgaactcctcgaagcccgccgggatcagcagcctgtgcagctcctccagatagtagctccgcagatacgtctcctctccgtagaacaggtatacgttctgtggggtctgtgccttcagatccgcccgcaggcgatcgaagccgttgttctttttttcagccttagggggcatggtcagtctcctccgtgtacggtcactaaaatatttccctgccggtcggtgcggtagatctccgctcccgcctgactcagccggtccatggcctcctgcgtggggtggccgtagctgttgtcacccacgctgatgatggccgtctccggccgcacggcctgcaaaagctcctgcgaggagctgtatcgggagccgtggtggcccaccatcagcacctcgatatccggcagatcgtactgccctaccagcttgcgctccgtgctgcccgccatgtcgccggtgatgagcacgtcaaaatccccggcgctgcacagggccgtcagcccctgctcattgaggtcgccctcccccaccgggggatagaggctcagcaccgccccgcccagcggacactccaccgtccggcggacatacaccacctcgatgccgttcttctccgccagccgcagcagccgctccctcacgccgtattcgtcctcgatatccggcagatacagggtctgcacctccaaccgggccagcagctgatacaggccgttggtgtggtcggcgtgatagtgggtcacggccacggcccgcagcctgtggatacccatgctctccagctgatccgccgcacggctcccggcatccacatagctgttgctggagccgcagtccaccaccaccgcctgatccccggcatacagcagggtacactgtccctgccccacattcaccgccatggcgttcatctctccgcagcggctgagccggacattgagtcccaccgtcagcagcagggtcatggccgccagcgctgccgccacggcgtatttccgccgccgctccccggtgatggcgcaggcggtgaagagggcgtaggcgtacaccagccagtatttgagataacggttggaaaaatacagcgcatggcccggcagacgggtcagagccgatgccatccacaggacataccgcaccagcgcccacacgccccagcccagcacccgtgccgccggaagccagagaaagcccgccagcgtcgccacgaaggccagcatgaagctccatcccgccgccggaacgatgagcaggttgctcagcggcgctatgagggaaaatgtgttgaagtaacaggccgtcagcgggatggtgaacaccatggccgccagcgaagcggagagattggcggccacgaaggacaccaccgcccgcaccggccgctttttcccccggtacagccccttgaaaaagccgctcagcctttgggagaagcacaccagtcccagcgtggcagcgaagctcagctgcaagctcacccccgccgcagcgaagggatcggccagcaggatcaccagcagcgccgccgacaggctggtaagcccgtcgctctcccggcgcagcagcggagccgccagcaggaatatctgcatgatgcaggcccggaccaccgagggtgtcagacccaccatcaccatataaaacagcagcaccgccatagagagccccgcccccagcgcccgccgccggacggggagcagcagtcccagcagagacaccaaaaaggcacagtgcagccccgatacggcgaacagatgggccacccccgcctgcgtcatgacggcagcgtcctcctccgccataccgctgcggtcgccagtcagctccgccgtgacgaaggccgccgtgtcgccgtcgggccatatggcggcgatcttctcccgcagggcgtacaccgcccgctggggcagccaccggatgcttccggcgctgccctcctctgctgtcagcggtccacgggcatacagcagagcgaacacgccccgtgaggtgaaggccgtcacatcgttttcccggatgcgggcggcgtcctgccattgggccgtgccggagagctgctgccccggctctaaaccggcatattccgcatcggcgtagacctccgccttggccgccgagccggagatccggatggtgacacggacgccccactccgtctccaccgggcgggagagcaccgtgccggagaactcccccatctgcccgcagcgggctgtcaccggagcctgtaccagtgcctgaaacagcgccgtgtacaccagcgccccgcacagggcaaagaggatcagcatcccccgcagccgcagccgggcgggcatcgtccgcttcagccccagcagcaccagtcccgccagcaggcaggcccctgccgcccacagctgccagacgcccacgcccagcagcacggcggcaaaaacgcccgccgcaaaggacagcgctatggtggccaaggtccgcatcctttctcccccctccttgctgcttttcgtcttattatagcaaacctcaccgcccccggcaaggcctttccttgacaggtgcctcatgcgtgtgatagcatccatatatgctatccactctcacatgagagggaaccatgaagcttctggtaaacgatccgaagctgtacttcggtctgatgttcctgctgcccctgacgctggccggtcacaagctgcacctgaccctccctgcgggcagcttcttccaccttctggttttcctgaccctcatcgggggggctctccaacaacgacgtgatctcctccgaccaggacaaatactacgccgtgtccctgcttctggtttaccggctggctccccgcaccttccgtctccgcatctgatttcacgaattatagcaatggaggttctgcaccatgactgatctggaacgggccaaggaggccctgacaaccattgactgcacctgcgccctgtgccgggacgaggagatccgcaccacccagcttcggggggtagcgccccttcttagctggctggaggagggcctttccggctggagcgtggccgatcgggtggtgggtgccggagccgcatggctctataccctgctgcacccggcgatggtctatgccccggtgatgagccgccgggccacggccattctcacccaatacggtgttccctatacctgcgatgaggtggcggagtccatcctgaatcgaaccggcacgggcctctgccccatggaggaggccaccgccgacgccgccgacccccagcaggcactggcggccatccggcaaaaggtacaggaactgcgctctatgtccggccgctgatccccccgctgccccagcccatgcaagccccacaaacagcgcaagccccaccaacagcgccccggccgcatggccggggcgctgcttttccgcaatattttcctgtcacttcccccgtggggaacgccacacctccaggaagtactgtacctccatcgatactgcacctccgggaacgcatcccgataaaagcaccatttgcccagaaaaatgcccgccgcaggccgaagcctgcggcggacacgcttttgcagttggtgcttatcctctcatgtgacggtcacgcagacctctcacagcgagtgcttcagcgagccttacgcttcaggaccaccacagcggcggggatcataccgcagctgataacggccaaagccacccacagcatcacgttgctggtgtcgccggtctcgggaggcgtagtgggcttgggatcggtggtaccggaatcaccgggcttaggctcgggcttggggtcggggttgtcgggctcaggattctcaggctgctggacaccctcataagcgacggcgctcaggctgcgagagaagatgaagttgctgatgaaggtaaattcatccgtctgatggatcttgtggttcagtacattggcaaacagagcgatgtccatgttgccggactgatactcgaagcccaccacaccgttgttgtaggtctcgaactgcttcaccagaccgtcgtcggtcaggcagatgcagccctgcaggggatccttcccggcgttctgcaccagaacggtagcaccgtcgggaatcttggagaaccaataggtaccatactcgtacatcacgtcgtcaccctcgttgatgtaggtggcgttgatgagagtgttgttgggatacaccacgcggcccaggaagtcggtacccatctcgcaggaagaaatctccagacccaccagctccctgacccggctaacggcggtggcggtatagcccatgtagggagtaccggccttgacagcgcccagagcctcatcattcagagcacgggagcccacgatgacgttggcagcggagaggtcgtcggtgacggtgaagcccatattggtcagagccagccagtcgaaacgatagttgtaagagccggagcgcagagtggtctccacatagccgctggtgttgttggcgggcttgccgggcagatacacggtggggttgtcgatgacggcagccgtgtagttggcgccgtacacgccggtggcggtcacgacatactcatcggcgatggtcaggaagtcctcataggagcacaggaagttgcccttctcctcgccctcggtgatcatggccacggtcttgccggcgttcagcagagcgttgacggcattggcggaatcgttggagacgttgtcgatgatgacatcggcgttctcaacgccgtcgaagtcagcggtgcactcagccagagcgaccagagtaccctcatagtcgatggtagcctggcaggactgcatgatggtctcataggcggcgggctcagccacgatgatacggtcatagccacgggcatggctgcgctgggcaaagctctcggagtacaggccggaccacacgctgatgaaggtgccgtcgtacagctggctgttagccagagaacgcttggcctgatacatggagatgaccgtggtgccctcgggataggtcacgccgtcatagacgaaggactcggtggccacgttgaccttgacatcgttgcgggtcagatacttcagctccgcagcggcgtcgaagaggttcttctggttgtcacgatccagggggatgatgtagcactcaggatagaagttgccgttctggccctcgccgtcgtacacgggacgcatcagctcagcctgagcgccggtctcgtcgtactggttcacgtaccagggagccacatcggcgttggagttggtgttgttcacgccacgggagaacagcttggcctgattctccagcatggagatcttgttgtcacggatgaacatagcctgggtcatcaggccgtagggaaccatgtactcggcgctgatatcgctatacacgggcagctcccaagtgatgccggcggtgccgatcagcacgggatactgagaaccgtaggcagtggtcatatcatcccaaggctgggtccactccttgccggtaggggaatcctcgctgcctctcaggaaatcccggaaaggcatctcgaagctgttgtgatcggggttgttggcgatggcgccgacaccgacggcctcgcccagcttaatgaactgctcagcgatcaggtcatactcgtagttgggctcgtggggaggcgtgcagggctcaatgaggacggcgtccacacggccatggatctcggtaaagaccatgggattgaacttgttcaccagagccatagcgttggcatcctcgaacagggtctggttggcctcgtcacggttggggtcatagccctgaccggtggtacgggtcatgtgctcataaccctccacgttctgctcaggaacgatgacgacgaacacgtcggtcagcagttccttaatattcacggtttcgctctcaacgttgtagtacttctccagatccagctgcccggagtacaggcccttggaggagccgctggtggtccagtggttgtagccgttctcgccacggatgtagcccagataggaggcgtaatccttgatgaggtcgggagtcttggcattgtttcttgccatttcctcggccagaagcgccttgccggcctccgtgaagcccgtcagggtcttgacgtcaacggtctcgttctccagcagcatatggccgaactccagaataccgttgacggcggcattctcgttggagtggacgttggaggcgaacatggggacacgcaggtcatcccacttgccttccttcagctgagccaggaccagatcgggatcctgctccaccagttcggtgtactccagccagcgatccacggacgccttctggtcggcaatgatcacgtaggggatgtcgtagccgtcggtggtggaacggcccatggactcacgggagacgtacagatcggtctcggcgttggccagagcatccacatcgtcgtacagctcatagatggtgcggaaggtgtcatagggaacgaccttcgtagccacgctgcccacggtcttctccgccacgatggcgttgaagttgaagtagccgcagatgtccagatacgcaccgccgttgttgtggggagcgctgtagtcaacggcgccgaaacgggtggtgtagaagtagcagttgatgtccatcaggaccttcagatacaccttaccgtcgttgtcggtctcgatacccatctccttgatgtcaaacatctggacggtctctttgttgttctgggtgacccactgatccagtgtgccgccctcccaggggttggggaacttctcggggttcaggtactgacgctcgccgtcacgtaccagagagaagctgatggactgcgcctcgatggcggcggtcagctcgtcagcggtcagggatacgggaaccctcacggtgacgtccttggtgtcctcagccagagatacctgccagtctaccggcaggttggggtaggtgtttgccagagatttgcctggaacacgggtgtcatccgccagatcagccacgctggcgaaggcagacacagggaatacgagggaaactgccagaacaaacgcaaggatcttcgccatcaggcggggtcttttgtgttgcatagttgcctcctcattcttctcatattgtgttacttcgggtcttgagtctctgcttgtgtcctacgcttttcaaacggtccggcccttcgtcagtgggcttgtgcgcctccttccgccaactgccaccgtcaggatgcctgtccgccctctgccggcggacctttccgtccgttagtttgagtgtaacaaggtcttaacgtattgtcaatattgctatacgtacattttgcgtaatatattttgtgtatttcgctgtcactcccgtcaatcaaattggcacgccgccgcttttttctgtatatactgcataaaagcagctcttcgatacatcgagagctgctttttagcgaatttccacttgtttttgtcagaaaaaccgtcatacagatgtcttgtccccatccggcgcacagtactgctccgccagacgctgcaccagtgcctgcatcttctgcaccaccggctccggtgaaacgatccgcaggccgccgccaaggcccgccacccagcccaggaactgggggctcaccgctacatccacgaaggcctgaaagtgcgccccgtccaccggcagcaccggcacctccttgccaaaccggtcgatgagcacgcccaccatctcgttctccccctccagcgtcacccgcaccggctgaccgccgtacattccgaacagccgctgggtgtatacagccgggtcaaaccgagccatccgctcctgccccaaccggggcgcctccaacagggtgatgcgcttcatcttgtccacccgatagtgcttcacccggtccgcctcggcgtcgtaggcaatgaggtagtagttctcgtcgtcccaccgcagatgccatgggctgacgcagtaccacccgccgtcccggcgcagcgcttccttcttctccaccgtccactgaaagtactggaaacggatctgctttccctctccgatggcagtatggagcttatcgatgttgtagtagatgctctcattcatggtcttgacccgtccggcgatgagcacctgccgctgaagctgccgggcgtcgtggacgctgaccagcgactccagctttttgatgagactgcgggatttattctccgtgatgaaccgggaggcctgcaccgcatccaccagcagcttcagctccggcagttcaaactcccgtgacgccagccggtagcggtactcccgcccctccttccagctgtcgatgtccagtccgcagcgccgcagctcctccatgtcggcgtacagggtcttgcgctccgcctgcacgccgtaagccgccagacgctccgtcagctccgccagtgtcagtccgtgcgcctcgtccgtctcccggtgaaagatctccgccagatagaggagcttccccttctgattcctgctcttggccatgtcccccgcctcctttttctccagtgtaccacattttttctcatatgaaaagcctaactgtccgttttattggatagtttctcttttataatagcctcaagatcaagcaaggaggccacggatatgaagggttatttcgtcagcggaggatatatgggactggtgggcggcagctatcagctgttcgccacggagagcgactatctggagtatctggcagactgacgcatggggcaggctctcccccgcatacactcccttcacagggccacgcccccatgggctggcagacaggaggagcgctatggaaaaacgagccgtgctgaaaaattacggacttctgggggccatgctggcggccatgctcaccggcggcgtcaccggctggctgtggcctgccgccgccgggaccctccgcccgctggggcaaattttcatcaatctcatgttctgcgtggtggtgccgctggtgttttcctccatcgcaggagccatcgccgggatgcggagcgtccgtcgggccgggcgcatcatgggcgtcacggtgctgaccttcgtggtgacgggcatcctcgccgccgtgctgatgttcctgttgatgaaggcatttcccccggtgctgaccccgtggcagtcgctgcccaccgaggccgtaggggactatgccgcccccggtcagctgctggtaaatttcttcaccgccgaggatttcgtgggcctgctgagtcgccgggccatgctgcccctcatcgtcttttccgtgctgctgggcttcgccgccaatctcgccggcggccccgacggcccggtggcccgtggcctgaccgccgtcacgcaggtgatgatgcagctgatccgcctgctgacctactatgccccggtggcctttttcgccatcttcgccgggctggtggcggactatggccccaagatcgccggggcctacggccgggccatggcggtgtattaccccctgtgcttcgtgtacctcttcaccgtctttcccctgatggcccggctgggcggcgggcggggcggcatcggcgccatgctgcggcacatcgcccgcccggccctgacgtctctggggacctgctcatcggtggccaccatccccgccaatctggaggcggcggaggacaccggcatcagccgggacgtggcggagatggtcattcctctgggggccaccatgcacatggacggctcgtgcttcagctgcgtgctgaagatcgcctttgtctggggcgtattcgggcaggagctcacatggggaaagctgctgcccatcgtggcggtggcggtgctgtcctctgtggggatgtccggcgtccccggcggcggctacatcggggagtacatcatctgctccctcttcttcccccggcagatggagatggccttccccattctggtggccgtcggcaatctggtggacccccccgccaccatgatcaactcctccggggactatgtggtctcgtttctggtgtcccgcttcgtggacggcaaagactggctcacccgccatcaaaagggatagcaaaagcaccctccggtatagacgggtgtccgtaaaacagttgatcctccgtatggcttagaccatgcggaggatttgtttatgtctgatcttcaaacttgctggcggcaaacggtttgtcaaaaccgtttgccgccagcaagtccacaggggatagccgctttagcagcgcaagggggtgtagccaccttgacggaaagtcgtgacgaaacatgttcggtcgggcagttttcttctgctgaccgggaatgaagcgacccaggacgcacatactcccgataggagagtatagaagtgcgccctttagtccctaaagggatttgctccggcttaacttctcgacaaactggaattttcaaattagtctttgcaaatcacctttgactcgctgccatcaactataattgcctgtttgttgttaatggggcatagattcaaatccgaaaactcagtcattattttctcagtaactttcttaaatggtgctgtaagataatgcggaagaacatagaaatcaatcaaatcaa

SEQ ID NO: 12353 - DNA, 18043 bp, Unknown
  gut microbiota DNA sequence
agcctgaatggatcgcagaaaaatcgatttcttatgcggctggccggtttcggcgtgtgcgatggaagatcagtcccacgaacaggcccacagcggcagggcagatccagcccaaccccagctcgaagaagggcaggtagctgtcagcgaagccgatgacagcggagacaacaggggtctccgtaatggccttgggcagcgccttcacgaaatcgaagagggcggccaccagtgtgaagcccgtgacccaccgatacaccacggtatcgtggccgtacagatttcccagcagcgccagcaggatcagggtgatggccagtgggaacaggaacatcagcaccggcagagagatggcgatgatggcgttaaggccgatgttggtgaccagcagggaaaaaatactgaagcaggtggcccagaaaccgtatttcggcccattggggaacatggcggtgaaggtttcggcacagctggtgaccagaccgatggaggtcttgagacacgccaggatcaccgtcagagccagcaccaccagtccggcccgccccagatagtgctcagcgatgacggcaaaggcctcgccgccgttggtgcaggagacggtaagggagtggctctgggcccccacgatggtgacggccacatagatgccgcccataaaaagacagctgaagatgccggagagcactgtgttcttggcgatggcgccgggttccgtgacgcccagtccccggatgacgttgatgactacgatgccgaaggccagactggccagagcgtccatggtgttgtaaccctccagaaaaccggcgaagaagggagctgtggcataggccgccgatggcgtcatatcggtgatgcggtccgtggggtgcagcagggctgtcaccaccaggatggccagcaccagcaggaacagcggtgtcagcagcttccccacccacgtcaaaatcttgccgggacgcagggagaagaacagcacggcggcgaagaacacgcaggagaacgccgccagcagcaccgtggcgttgacattctcgcccagcagcggctcgatgcccacggtgaaggacgtggaggcgcagcggggaatggcgaagaagggaccgatggtcaggtacagagcgcaggtgaagaagatgctgtaccgaggactcacccgcccggccatctcctgcaggccgttgctgcggctgatgccctgtgcggctacgcccagaagggggatacctacgccggtgatcagcagaccgacgatggcgggccatacattgcgcccggcctggctgcccagaaaaatgggaaaaatcaggtttcctgccccgaagaacaggccgaacagcatggtggcgatgaagaattgctggctgaaggtcagccgattgctttgcgttttcataatacactcccccaatttaattgcgtgccagtataacacaatttttggcgggcgtcaagaaaaatcgcagacatttgtacctgataaacggacgaatagataaaatgtccttttcaagcgtatctttgtgtgctataatggaacgaaagggggcgatgcacttgcaatacggagaggtgcggcaggcgtactttttggagcggcccaaccggttcatcgcccatgtagagctggagggtgagacggtggtgtgccatgtgaagaacacaggccgctgccgggagctgctggtgccgggggccacggtctatctggagcgtggaaccaatccggcccgcaggacggcgtgggacctcatcgccgtggagaagggccaccggctcatcaacatggacgctcaggcccccaatcgcattttcgctcagtggatccggcagcaggagccgggaatcgccgtccacccggagtaccgttacggggattcccggctggacttctgtctggagcggccggaggggctgcacttggtggaggtgaagggcgtgacgctggagcgggagggccactgcctgttcccggacgcccccacggagcgtggtgtccggcatctgcatgagctgatgcgggccgtggaggagggccaccgggccacggccttcttcgtgatccagatggcggacgtactggactttgcgcccaacgacaccactcacccagcctttggcgaggccctgcgggaggcggcacgccggggcgtggagatagcggcctacacctgccgggtgacgccggagacggtgacgctggacgcccccgtgccggtgcggctgtaacagggtatgccatcccgctgcggcggcgatgtatatatacaatgtatcaggaaaggatgatgctttatgaacatgagacgtatctggagggtgtacgtttcctgaccctcccaatttatttaggaggaaaccatcatgaacaagaccattcacatccgggaggccgtgaccccggaggaggtggagtgcttctggcaggagctgcacgcctatcacgcacgggacattttccccgacccggcggaggaggaccgggcatattttctggacgacagccaataccgagccgccgtacagcggatccatgaccgggagggagatcgctgctactacctgctgttccagcgggagggccgggatatcggctttgctctgacagcactgtacccctcggaggacggcaagtgcttcgtcatggagttctgtgtgctgccggagttccggggcggcgggacaggcaccgcctgcgcccgtctgctgctggattgggcagcggatcggggagcgcagtatggggagctgaacgccgccgacccccggcgcatccgattctggagccgtctgggcttccggcccaatggccgggacgagtggggcgagccgctgatgctgcgccctccggagcaggcgctgtccatcaccgttgagctgctgcaggacccggcggactggcagctgcggaagctggagaacggctatctggcggagatcggagagccgctgctgacggaggagagcacagagcggctgcgggccgccgtggaacaggggcatatccgcttcctgctggcataccggggctgccgggccgtggggatgtgctccgtggcagagaacttctccaccttctgctgcgggccggtagcggtgctggaggatctgtacgtggagccggtgttccggagacagggcatcgcccggcagctgacccgcagcgctcaggcactgtgccgtgaacggggggtgggcagcctgaccgtgtgctgcgccccttgtgacgaggccatgtatcaggcgctgggcttcaacgtcccgctgggcgtgagccggagctgcctgctgtaagaaatcaaaatctccggctaagccggaggtttgacgaggccctataagggcctattacgggcgaagccccttaaggggcccgaaaggtctgccgaccgcatttccttctcgggctaccccttaaggggttttatttatgccttgggattcgtactacccgtaaacgggtctataaatccctttatgctgatttagtcggatattttgtcctgataatgtacaataagttgcgcaaattggaaaatgcataaaagaagacatagcttgcaggctctggcagaatgaagttaccacacaaacattcgaaaggagacagcaaactatgtccgagaaaatcgtacagttgaatgaggacggctttcgtgaggttttgggcgctgccgagggcatgaaagaggacaagaccagctgggtcagcttcttccagtggctccgtggacgcagcttggatggcgcaaagctcatcgttggtgacaagtgcatggggatgctgggagatggcggactgggagaggtagttctcctctgtcgcctgcgaacagctgcgcagccgcaccacgaactggaagtatttgagttgtctcagcacttgcccactcccttttcctgatgctctcccattgtaacgcagcacttccacagcgtccaccgcctgcgcccacaccatagtccatcccaaggagcgcctcgccgtctgtcatgcgaaaaaatcgttatgccgttacagcttccccagccgctctgcccactgggcctccttgaagcccaccagaacgaaatcgccgcccaccagcagcggtcgcttcaccagcatcccatccgtggccagaagctgcaacatctcctcctcgctcatgcccggcagcttgtccttcagccccatggacttatacagcagcccgctggtgttgaaaaatctcttcagcggcagcccgctgcgctgatgccacgcagccagctcctcatagccggggttctcctccttgatgtcccgcagctcatagctgatgtggtgctcatccagccacttcttcgccttctggcaggtactgcacttgggatagcaaacaaaaatcatggttctctcctcctgtttcattagatcgtatgaattactacctgcttttcttgttcctgtaaatcggccgctcctgtattttctttaggcgattttcaatagctgtcggcgtccgttttaaaacatttgcaatcatgtagatattagctcctctatgatgcatttggataagttgcctctcctcttctttactccaaaactccatacaacgtggatatttttttctattctcttccctacgctgctttctttcctgcaccttttcttgcttaatacgaaataggtactgttcgttagattcgatcgtgcaatgatccaaaatttcgatcaatgcatcttggatcttctcatttgaacagctgtcattcagtggaagcactctgccgctgagcgggttaattcctttgctaaggctctcaaccatagttcttgcgagaaaaggatccataccatcatcatcctgttgatttcctgtgatacacgttccaaggctgcccctttcattcacccgtaccacgttgtcatcacaatatacggctatctttcctccctcaattataccgattcccccgcaaaaagacaacaaaaaatgtgcaggcgcttgcttgcacatttttctcccgactgctacaatgttaaaaatattctgcgaaggagttttcatatgatcctctatttttccggcaccggcaacagcaaatatgtggcccagcgcatggcggaggctctgaaccaatcgctgctgagcatgaatgaccgcatccgctcccacgacacctcccccgtggagacggacgagcgccttgtgatcgtcacgcctacctacgcatggcgcatcccccgtctggtgcgggactggctgctggagacggagttccccggcgcagcgcaggcgtggttcatcatgacctgcggcagcgagatcggccacgccggccggtataaccgctccctctgtcaggccaaggacctgacggacatggggacagcccagatcatcatgccggaaaactacatcgccatgtttgacgctccgcaggcggaggaagcccgacgcatcgtggccaaggcccagccggatatcgaccgttctatcgccgccgtccgggagggccgtccctttcccccgccccacgatcgtctctatgaccgcttcatgagcgggccggtgaaccccatcttctatgcctgcttcgtcaagtccagcgcctttaccgtttcggaggcctgcaccggctgcggccggtgcgcccgccgctgtcccaccaacagcatcaccctccgggacggcaggcccgtctggggcaaaggctgcacccactgcatggcctgtatctgctactgccccacgtccgccatcgagtacggaaaaaagagcctcggcaagccccggtatcacttcgaggccctgtaagccctcccgtcaggcgatggcctcccgccgcgttcccgcagcggcaaatttccggtactgctcctgattcctccggaagaagccccggatgatcagcagcacgaacaccgtcggcaccacgccaaatgacagcagcagcacaccctttttatattgtgtgttcatgtcccgctcctttccgtatgtttgccttacactactgtgtaatattcagtagtttcattttgtcaataaggcttttgaaaaaaattgcatatcatggaaagcgccaccggaagatatctccggcggcgctttttggtatactatttgggaagaatcttacctcgtccagcctcaccttataggtattctgcataagctgcaagcttttcctcagcagcggcagcttcctgccgtatcctgtcggcacgggacagcagggccgacaattcatcatattcccctttatcgactcccgttttgagggaaatgatccccgatttgatgcaatcacgccataccagcgtaacggaacggttcttttcgggaaattccacttcgatcaaatatttgccgggccgccctatgaccctcccaacaccaaagcttctgtgcgcaatgggactgcccgcagagagtctttcttcaaagaactcctctgcgtgctccaacctcgccacctgctcctccgcctttgcccgttcctctgctgcggctcttgcggcgtctatctttgccagataggcctttctctcctgcccattcctcatggtataatggataccatcaaacaggccgtagaccgagcagcagtaaatgatgtcaaacgccagaagatgcagcgcttcgtccggatggataggacctcttgcataatctaccctgccccggtttgtttccagcaaagcaggacaatccctgatggcctttacaagctcatcgcacatccggtgatagacctgcaagtccatctgggtgccgctgccccagttgtcatagaactccacacaatcagcgaatctcttggcctgaagcgccttatacagataataatgctccgggtcgtagaatcccgttatcatcatgggaagccggatgcctgcctgatagcgccaccgatcccgataatatttttcatgcatggtctggcaaaaattcaagaatcctgtaaatcgatggtttcttacctgcaagtcgccgccgtccggctccagcaagtcacgaagcgcttgacgcaccgccgtcggctcacgcttggcatagtccgacagcgcatagaaggaaagttcatagcgattgtcgatggtctgttccgtcaactgcaccacatccacaagccgcttgggaaaactgctatcatcagccgccaaagccctatctatcatcgggcggaactgcgctgcgatttcccatttatatacctcgtcatgtcccccggtattcaattccggaaaccgcttcacatagcgtccaaaaatctgttccagatttgcacgattcattctatctatcccttcgcccgatatatcttctgtctactgtttattataatactacatccaactataaatagcaagaaatccctgtttcttacgacatctaatattctcccctcccctgcatctttccctccttcaccgcataggcttgtctgtgaggtgataccaatgaaacagatccatatacgccgattcctgtccctgctgctggcggcactgactctgtgggccgccgccgtcaccgccgggagcgattctgccgccgcagccctccagcagctgcggcagggcagccgcctgccccagcaggcgctgcgctgggagctgggggacttcttcggcctggactccctgtccgccgtcacggtgatgacgctggcccagtcccccctgctgctggcaggccgcagcactgtggcagccctgctgtccgccggcgtgaccagagatccgccggagcctgcggccccggagtcaccggatacgccctccccctccgcagatccctccctcaccgacggcctgacctttgccgacaacggtgtccccgctcagaccaccgctcctacctcctccaaggggtataccgtggtcaacggcgtatatctgaaaaactcctccggcacggagatagatgccgatgctctctccgacggcagctttgccgcccaactcaccgatgacggcccgcaggtactcatcgtccacagtcacggcagcgaggcctacaccatgcccgccggacaggaatacacccccaccggcagcttccgcaccgacaacgatgcctgcaacgtggtgcgggtaggcgacgagatcgccgccgccctgtcggagcgtggcatttctgttctacacgaccgcacccttcacgacgttccggactacaacgacgcctatcccaacagtctggcttccgtggaggattacatggagaaatacccctctctggtgttcgtgctggatgtccaccgggacgccgtctccgacgccgacggcaaccagtacaagctggtcagcgccgaggagccccacgccgcccagatgagttttattatgggcaacgcctacgacggctggcaggagaatctgaagctggccatggccattcagcagaacctcagcgccgattatcctaccctcatgcggcctattacggtgctgaactaccgctataaccagttcgtcagccccggcgccatgctgctggaggtgggagccgccggcaactcgctggacgaggccctttacgccgcccgtctctttgcacagggctttgccgacacgctacaaagctgaaaaccacacgggacagagcaccgctctgtcccgtgtggttcgttcaattttcccgtcatagtctctcccccgcatcctccctttccgcatccgccagacacagccgcagacgcagccgttcattccggtacgcccgctgccccttctccgtcaaccgatagttccgctgccgtccctgcaccgacgtctcctgaatgaagccctcctccagaaaacgccccaagatggtatacagtgtccccggccccagacggacccgcccctccgtacaccgctccgcccatgcggcgatctccgtgccgcacagctctccccgccgcagcgccatcagcacgtagaacatggcctccgtcagcggtgcgcccgcttttcctgtcatagctcccctcctgcatcgtcattcgatatcatatatcgatattgtatcctttcctgtgggctctgtcaagaaaaatgcaaaatttacaaaaatttttgtggacaactcttataagctgtgataatatgaggaatcaataaaagagataccacccagcgcatcccgcccggcgggagaaaggagccgtttatgtctgtcaaggaaagctatgccggcaagatcaaccgtaagctcaataagaagctccacgtcatcgacgtggcggcgggccgggctccggcggatctggtgctgaaaaacgccacttacgtcaacgtattctccaatgagctgtgtcacggggacatcgccgtggcagagggcctcattgtaggtatgggcgaataccacggcaagatggaggtggacgtgtccggcaagctggtgctgcccggcttcatcgacgctcacatccatctggagagttctctggtgagtcccacggagtttgccaaggcggtgctgccccacggcaccaccaccgtcatcaccgacccccatgagatcgccaacgtcatgggtaccgacggcatcgagtatatgctgcaggccacggaggacctgccggtggacgtgcgcttcatgctgccctcctgcgtccccgccacgccgctggacgagtccggcgccaatctggattaccgtgccatcgactccttctatgaccatccccgtgtgcagggactggcggagatgatgaactatgtgggcgtggtcaacggcgacggtcaggtggtggagaagatcgtggcctctcaggcccaccataagaagatcgacggccatgcgccgggcctttccggcaaggatctcaacgcctacatcgccgccggcgtctactccgaccatgagtgctccgatatggaggacgccatgaataaactgcgtcttggccagtacatcatgatccgtgagggaacggccgcccggaatctggaggctctcatgcccctgctcaccagccagtacgtggatcgctgtatgttctgcaccgacgacaagcaccccaacgacctgctggaaaagggccacatcgactacatcgtcaaaaaggctatctccctgggggccgaccccatcgttgccgtgaaggccgcctgccacaacgccgctcggtacttcctgctgaacaaccgtggtgccattgcccccggctatttgggcgacttcgtcatcatcgacgacttccaacacttcgagatcgagatggtctataaacgtggcgtcctcatgtacgacggccagctgcgggacttccctgccccggagatcgacccctatctggtgaagcgggctcacgacaccttccatgtggcccacctgacggcggaggacttctccgacggccgcccccatgccgtcatcggtatgatccccggcgagatcgtcactcaggatgccggctacgccgaccacgccgacccggagcaggacattctgaagatcgccgttatcgagcggcataagaacacccaccacatcggcttgggctacatcaagggctacggcctgaagcgtggcgccgtagccacctccatcagccacgacagccacaacatcatcgtggtgggtgccaccgacgaggatatggccgccgccgccaaccgcatcgtggagaaccgtggcggcatcaccgtcatggagaacggtcaggtgctgggcgaggtgacgctgtccatcgccggcatcatgtccgacgacagtctggtgatggtgaacagcgctctggaggatgccaaggacgaggccttcggtttgggcgtctcccgtggcatcgaccccttcatgaccctgagcttcatggcccttccggtgatcccttctctgcggatcaccacccgtggtgtgttcgatgtctccagtcagcgttatatctgacctcctcatcctccccatagcgtgatatcccccggagccttcggctccggggggtatcacattttcccttgaaaagagggaggacgccgcagcgtcctccctcttttcacaggctattcttacttcaccgtaccgtcagcgttgaacaccggcagcggagccagatactggatgtccttgcgctgctgggcgtcgccctcggccagcacggcgatgcggtccaccacgatgccgccggccagcttcaccagctcctccatggcgtggaggctgccgccggtggagatcacatcgtccatcagcacgatgcgcttgccacggatcatgtcggcgtcgtcccggcccagatacagcttctgcaccccggcggtggtgatggagcgatcctccacatggatgggatcgggcatataggccttggggcccttccgggcgatgaagtacttcttggcgccggactgccgggccatttcgtgaatcaaggggatgctcttggcctcggcggtgaagaggtagtcgtactcctcattctccaccagcttcagcaggtcacgggcgcaggccaccgtcagctccgcatcaccgaaacagatgaatgcaccgatatacagatcatccgcaaccttgcagatgggaagttcccgctgcaggcccgccacggtcatggaataggtcatctttgaaactccaatccgccgggcgcagccacgcctcggctgccgcctttgggcggacggcacgcctttgtttttaagtaccgcttggatgcactggccaagccatagtatattatataagcaatttggcaaatgtcaatatccgtctgcacttctgcttatgaaagttcctgcttttcgctcccgcctgtttctcgccattctaacattttttcttgcgctctcataaattttcagcttatttttacgttttgcacaaaaaacgccggtatttttcagtaacccccgcccgtccttttcccccggacccccttgcgggaaccggaaattggtgttatcatgaccttaacagggttcattcttcctgtgaaagtaacggaacaaggatttaggaggaacaaattatgaacgcatatctggccagtgttttggaaaacgtccggacaaagcacggcaacgagccggagttcgtgcagaccgtagaggaggttttctcctccatcgagccggtcatcgaaaagcaccctgagtatgagaaggtagatctgctgggccgtatggtggagcccgagcgtatgttcaccttccgggtggtgtggtgcgacgacaatggccagtggcataccaaccgtggctggcgctgccagttcaacggggccatcggcccctacaagggcggcctgcggttccagaagaacgtctacgagggcatcatcaagttcctgggcttcgagcagaccttcaaaaacagcctgacgggcctacccatcggcggtgccaagggcggctccgactttgatcccgccggcaagtccgacgccgaggtcatgcgcttctgccagagcttcatgacggctctgtaccgctacattgggccggacgtggacgtccccgccggcgacatgggcgtgggcggccgtgagatcggctacctgttcggccagtatcgccgcctgaagggcgcttgggagaacggcgtcctcaccggcaagggcctcagctacggtggctccctgatccgcccggaggccaccggctacggcgctgtctactatctgcaggaggtcctcaagcacgagggcgacaccatcgagggcaagcgcatcgccctgtccggctacggcaacgtggcatggggcatcatgaagaaggccgctgagctgggcgccaaggtcacttatatgtccggccccgacggctatgtccacgatcccgacggcatcaacaccgaggagaagctgaacttcattctggagatgcgtgccaaggatcccatgcactgcaagccctatgccgaccacttcggctgcgagttcgtggccggtgccaagcattggggggccaaggatgtggatgtgaatatgccctccgccatgcagaacgacgtccgcatggattctgccgaaaagatcgccgcctccggcgtgaagtactacatcgaggtggccaatatgcccaccaccaacgacgctctgaacttcctgcgggcccagaagcatatgatcgtggccccctccaaggccgtcaatgccggcggcgtgggcgtctccgctctggagatggcacagaactccgagcgtctggtctggaccgccgaggaggtggatgcccagctgcataagatgatgaagaccatccatcaggtgtctgccgaggccgccgaggagtacggtctgggttatgatctggtggccggcgccaatatcgcaggcttcaagaaggtggcggaagccatgatggcgcagggttgcttctaagccgtccctcctccctaattaagtccaaaaacatccccggcgcagctgcgccggggatgttttttctttggatgcggaaaccaccagccctgccggtgaaggtgctccctgaaagctttcccttccatcgacgagcagccaagtgagccgcaagcagatgtcttgatcgaggagtttgtgcaagcagatgccttaatagggagaatccgtgcaagcagaacacaagtttcccgtttacgggtcgaaaatcgcaaggaaataaaattcagtggtttctgctccgtgtcccttgattggttccgccagcaaaattgcccttttcagggcaatcgaacctccggagtcatcgagaaatatagttcttcacaagaaaaacagctgtaaggtaactctgccttacagctattttattttctcacttttccccttttccccacttactcatagggcggaataccagcggccagacggctcccgccaccagcaccagcaggaagtaccgcacgccgccggccaacccctcatggcccaatagcgccagcagcggagccttcaggccgctcttgatggccagcagcagcgccatgcccacagccaccttgatcacctgcacccaccagacggcctgcgtctcgaaatgaatataccgccgatccagcagccaagccaacgtcatacccgccacagcgcccagcatcttccatgcattgccgatgccgctggccagattctccgcatccatatccgccggaaagccgcaggtctctacgaacaccacaaaggccccgctgaccaccagcatggcagccagcacatagcccatgtatcggggcttttcctgcgcccgccgcatcaggggatacagtcccagcaccagcgccgccgccagtaccaacgacacccccacgtccgccggggtatgtacccccagatacatccgggaaaaggcgatgaccagcgccagtgtcgtcagccccagccgcacccaccggcgtccgccccaccgggccatgccgccgaagagccctatggcgttctgggtatggccgctggggaaggagtaccccgtggcctccgcccgtgcgctctccacaatggtaaagttggggtcccgcacccacggcctcggcacccggcagatcagcttcaaaaactggttcagcaccgtgccgcagaaagcgatggtcatcagatagtacccctcccatttgctgacgcaccagaacaccaccaccgccgccacaatgaagatcacctcgccgcccagttgggtcacggcactcatgacgccgttccaaaagggcgttcgaattttttccagcgcatataaaatgtccacttttccgcctccttttgtcctgatctctgacagaaatttcgtcctatatctgtccgatatcagttggaattttgtccagattatttgtctcgatcagaaaaatgtattttcttcttccaaacgatcctcctccgattctttcttccgacaaggctaccgagaagggcagcagctgccctttctcagctgtctgacttttctgtcatttctttctccgacagctgttccccgatcgtctgctttccaaccaccctcttttagcggtggccgccgcagccgtggggctccttctccggggcagcgtaactctttcccgtcaccgtctccggcacgatcttcaccacacgggtggccgacatatatttttccatatactcgctgaaccggcccatgcccttggggtcataggcggtacacagcagcagcatggccttcacctgctccgcttcatcggtgaccacctccgcacggccatgaagcgccgccgaggcataggccatggagaactcgttaggaatggccgccgcataggagactgccgacaggcataccggcgggtttttcgccagcagctcccacttctcgccgtgaccggcgcagtggaaatacaccacatggtacgcctcatccaccaccggggagatggggatggcgtagggcttcccttccccgtctgtcagagacagggtggcatagggagccttctggaatacctcccaggcaaaggcggcatcccgctcccgatcctttcgcagcattgctttttcctccttatcaggcggccgggccaccctgttttaccccgctctcttgaccagcagccaaccggatatgcggggaaaatatcagacatattcaagtgatatggtctatcctatggatggtaccatgattcccatagaaatgcaacaaacattcttgacttttcccggaggtgaaatataatatatgggtgaaaatttttgcaacgtgatgaatcgatattaggaggacaagcccatgacactggatcacagctatttcgaggaaatggaggccaagatcccccacggaaaggtccgcacccggttcgccccctcccccaccggctatatgcacgtgggcaatctgcggacggcgctgtacacctggctcatcgcccgcagccacaacggcacgtttatcctgcggatcgaggacaccgaccagagccgtcaggtggagggcgctgtggatgtcatctaccgcaccatggccgagtgcggcctgacccatgacgagggcccggacgtaggcggccccgtggccccctatatccagtcccagcgccgggacacctacggaaagtacgcccggctgctggtggaaaagggcggcgcctactactgcttctgcgaaaagacggagtctgaggaggattccggggaatttgaccgggccgccgatccctgccgggagttgacggcccagcaggtgcaggaaaagctggaggcaggtctgccctacgtcatccgccagcgtatccccgccggaaccaccaccttccacgacgccattttcggggacatcaccgtggacaacagcacgctggacgatcaggtgctgctgaagcgggacggtctgcccacctataacttcgccaacgtcatcgacgaccacctgatgggcatcacccatgtggtgcggggcagcgagtatctggcctccgccccaaagtataacctgctgtacgaggccttcggctgggaggtccccacctatgttcactgctcccccgtcatgcgggacgctcagaacaagatgtccaagcgccacggcgatccctcctatgaggatctgaaggcggagggctatctcaccgaggccatcctcaactatgtggccctgctgggctggagccccaagggggagttggcggagcaggagctgttcaccctgccggagctggtgaaggcctttgacatgacgggcatctccaaatcccccgccattttcgaccggcagaagctggatcacttcaacgccgtctatctgcggggcatggccccggaggctttcgccaaggccgccgagccctacatccgccagacggtgacaggcccccggttcgacaccgccgccatcgccgctcttttgcaggcccggtgcgagaagctcacggacatcccggagaaggtggacttcttcgatgccctgccggagtatcccgtggactactataccaataagaaatccaagaccaaccccgacgtctcccgtgccatgctggaggcggtcatccccgtgctggagggcctgacggagtggacggacgaggccattcacgacgcactggttgatctggcgcagcggctggaggtgaagaacgctaccctcatgtggcctgtccgcatcgccgccgccggtaagctggtgacccccggcggagccgtggagatctgccgcattctgggcaaagatgagacgctgcgccgcctgaacgccggtctcgccatgctgggggcatgatggactggctggcgcagcagcgcacccggctgcacggattttaccgcacggagtaccgctactccctccgcatcaccgccatcgccttcggcgcactgatcctgctgggctttgccggcagcctgctgctgccgaagctggccgaccagctgttcctgcagttcgcccagcagatggcggagctgggcatcatggacaccaccggccgggtggatgtgctggcgctgttcggcaacaacgtccgggcgacggtgttcagcatcgcctacggctttatcccctttatctatctcccggccctgtccatcggcatcaactccctgctgctggggctgtttgccggggtgtacgtcaacaacggcatctccctgctggcgtattttgcgggcatcgtcccccacggcattttcgagttgccggccctgatcctggccctcagcagcggcatctatctctgccgcaaggtcacagactacgtccggcacaacgaaaagggcgttatgggtcccctgatgaaggatctgctgcgcctgttcgtcatgcacatcatccccctgctgatggcagcggcggtgatagaggcctatgtgacaccgcagcttttgaagctgtttctgtaaaaactttagtgccgcagcgtgcggcgaaaggagcatcacatgaacgagaagaatgtacgaagcatcccggagctttttggcagcatggtattcagccaggctcagatgcgacagcgtctgccggaacgggtctatgacgcatggcagcagtgcctgatccaaggaacttctctggatcgctccatcgccgacgagatcgccgccgccatgaaggactgggccatcgaaaagggcgctacccactacacccactggttccagcccatgacgggctttaccgccgagaagcacgacagct

SEQ ID NO: 12354 - DNA, 20150 bp, Unknown
  gut microbiota DNA sequence
ctatgaatcagcggtttttttcgttcccataaaaatttttgaaattttttcgtttagggggtctataaatgagccttctcgctgcctacctattgagggacgaaacaaacgccctcacgagccttgaaaatcgaatacacattcaacaggtacattcctgatcgggggcgaaagccccagccggatgaaggtgcgccacgaacttcctgcccacaagggttatcacggaaagcaaggttggtagcgattccgaaccattctgaaatatccgcttgctgcggataaggcgatgaaacgattcagggacaatgatacttccctatggggctggcggagtacccggcagaggtaagattcctatgagttcggtcagcagccgaacgcctgttgatttccttttacgcattagggggatgagatcgagttaaatgcgaccaccaaagcacaggacacgcttcctgtgttttggtggatcaagcgatccaaatctcataagaaggaggaaaagcgaaatgccaaactgtaaaaccattgctatctgcaatcagaaaggaggcgtgggcatcctccacgagctgaacccggaggagatggaagaagccttccggcagcacctcacccagcgcagcaaagagaaaacggcgtaaccacaagggttacaccgtttcagagaacttattaacccgagatacaagagccgccccgggacaccttccttacggagggtgcctcggggcggtctttttctgtgtttatcgcttagttatcattatggacaaaacatgctgcggtgcggtacaagtggagaacggttttcctttctgggccgctgcggcagaaaaaacacgcccttgccaatcgatggtactgtattgctttattatctgttgtgttttttctttcggcttacaaccgttgtgccgataacagcgccgccgctgatgaacagaagtgcgttccacaaaacgagattgctgctgtcaccggtttttggcgaggtagtatttcccaaattgtcgggctggtcgctcggcttcgccgcagaacccgttgcgggaatttcaacagcggccttcttatagccacagacggtgcattcctcgtgtttggagcctctcgtggttgcggtggcttccttatcgatcacccacttgaagctatgcgccgccgtgtccttcctgtcaccgcaggggcattcatgccaatggttatctgcgtctgacttccaatctgctccatagctatgggtatgcggaatactcttgtatgttacaataacggtcttgtcggcgtccatgataacttccagcgtattggagagaacctctgctttaacaccattcaccgtaacagtgtcaatttcatagccgctatcgggagtaaaaacaattgtttcatgcgatccggccgccagccctgctttgcttgcagaaatcgttccattcccaccattcacctgtgttgtcaggctataggtcgtctcgatcttctgcgttttcgtcacattagagggaatgatatagtcgagctgtccaacagtgattctcagctttgcagaggcaagcaggaagtctcctgccttgaactcggagtggggcagactatatgtcacctggatgctttccccattgaaactgccgggatttcctgtaaggcggacatcctgatcaatagtaagaacatattcagcctcaccgcccgattgttcaataatgctttccatgctttcagacatatcatacgttacagtatatgtcacgggatagtctgcaccggttttatttctctcgatggtttcaggtccatttatgaccagtgtgccgtggttctgcgagggttgaacgatggctacagcatggccgtttccagacacatccggaagcgtgatgtctatatctcctgtgtccgtcttctgagcttcataaacctgcacttccgaagcatcgagaacctttccggtttcatccaccggcaaggacagcacataaaccggcagatcgttcactgtcaggccgcctatcgtcagttcagctgcgccatcacgctgaacccagagggtcgtcaacggatcattccagcccatgctctttgaagcaccggttagagcggtcacatttgcagcactggtgttccccagcctgatgtcgaggctgctgtcatccggggttacggtcttactgccagtctggaaataaactgccttatctccaacagctgcctcacgggagatatagaggtaacgatcgcactttccatagtctttaccggtgacagccaaatcatttgatatgccgcctgtgatctgatattcgtcaccgacggtgacctgcatgagattgtttctgatggtaccggcattcagctcgatcttcggcaccgtgccgccataatcactggcatcaaagcagacaccgccgccaaaggctgttgttgcgttgttctcgattgcgccgccattcataatgaactggccgcctctgcggacaaatacgccgccgccgatccggtcagcttcgccttttgcactgtttgtaccggaaatgttgccggagattgtaccgccgttcattgtgaagacgcctttggatatcatggctccgccgcctgtttgctcggctttgttgttgcagatctcagcgccttcatacatggttgcattgtggtttccgccattattggacagcaccacaccgccgccacgattcgcacaaatattaccgttgattttcccgtaaatgtctaagtgctcatccgttccattgatataaactgcgccatagtatgcgtgattgttgagaatccttccgttttctccaattgtcaccgctgtgccgccgtcggtttgcaggatatggttgcctgtggcatacacattgctgatttcaccgtcaatcacgacggtgcagttttttgcatagatgacattgccgttcagcttggggcaatccgtgattttggagccgttttccattttgaaggatttggcatcacccgcacagtagattatgctgccgctggagattttctcaatcagcgcggtggaggtcagcgttccctctgcgttattgcgcagatgaattacgatgccgctattcgcctgccacattgcactcttgtttgcggcaatgctgctgatggcgccgccgatctcaaccttcccgccgtctgcataaactccacgaccgtccatattccggatcttcgagccttcctccatcacgagtgtaccgccctgaagccagatcgcacctgccggaccgactgagtctgccccagagccttttgttcttgtataaccagtcagggtatcctctatcacactgccgctttccatgacgatttttgcctggtcggtggcgcgcacagcggacatgccgccaaagttgcgcagcacagcatccttacccagcgtcacggtgcagggcacagtggcgttggaggcaatgatagcgtcctgcacataaactgtattatccccgttgccgtcaccgctgacagcctgtgcgaatacagtaccctcgtgcatccctgcatcgttcagaacgatgtcggaaagagtcaggccgacagaactcgccgatgaagactgaacctcgatcatggcgggattataccagctgcgggctgtgtcactttgctgcttaaaatcagcgctgcgtgtaatagtgtaaggaccgccttctccactggtgattttaagactcttatcgtaaaaacgggcacactgatccatggtcagatcgctcatgacatagattgttgtaccatcagccgcagcatcgaccgccttagccagcgtggcgaaggggagatcttttgtgccggtattctgttcgtcgttaccggtgctgctgacatagatctccgcagcaccattctgtgctgtcggatccgctgccttcggcgcatttttctgttctccatattcggacaacagctcctcgttgacgttttgttcctccaatgcggaagtcggagcctcttccaccgcctcaggggtattacccaactccatcggaaaagcggcagtaggcagtaaccccatcaccaacgcagcgcagagtaagacacttaacaacaattttcgcataaaacattcccctttctattccttgttttgtgttccgttgtaattgcaatcgtccgatgaatcgaaaattataattgggcaatcgtctaacttttgcatgaacatccgcttgtccattgccgttatcaagttctccttctgcaattattttgcggcacaaacggtacaaaactccttcccccgcaagtgtatagttttagtatggcatatttttatcaacttttcaaccgtttttttggaaattcacgctgcaaatacaaaaagtccgtctgccgcagcgaaaaagaggctcatggaaagccttgtatcaggttctttttaaaccgcaaacattgcgggagaaggtaattgcaccttctcccgcattttggtaattgtgctgttcttcttcgctgtccgccagaaagctgatagggccgcagggagaggacggggctgcttttttgcggtgcgtgtggtaggataagaaaaacaagagaggagttgagaggatgaacctaatttcctgctgaatgttggcacgatacggcatcagccccaagcgctccgcctccctgctggacaccttctcctgcatctttcagggcatcatcccctacgggcccagatgctggtggccatttccacctgcgcaaccctcggctacgccatcagcgcctttgacatcatccccctgctgttctgtcccttcctgctgtgcctgtccagcctgctgttcatcctgtttgacaagaaataaagcgtctcattttgtgtgcttacgccgagagcccaccttctcaagaaggtgggccctcggcgtaatgcttctgcgatacctgtatgacgcagtgctgtggccgctgtccgctgaaatcgccatgtaaaaaagacagcttccaagggatataggtttaagtgcggcaaatgctccggcacacactctgccagaagccgccggttggctcccccttattcttccttcaggtgctcctccatccagtgcaggatctcgctgagtcggctgatgcggttggagggctttccctctcggctcaggccgtggttctcgccgtagaacatgcacagcttgctctccacgccatggagcttgagtgccgcgaacatttccagaccgttggccagcgtgcagcggtaatccttatctgcgtgaataaagagtgtgggcgtcttaacacggtcggcataggtgaggggcgacgccttccacaagcgctccggatgctcccaaatggtgccaagctgctggtcaggcacataatagtagccgatatccgagaggagataatcccccacatagttggcaatgcttcgctgggacacggcacagcggaaacgatccgtgtgaccgatgacccagttggtcataaagccgccataggaaccgccggcaacgcccattcgatctgcgtcgatttcgggatacctccgcagaacctcatccgtgaactccatcagatcctggaagtctacctctccgtacttgccctgaagatcggcaaaggcatttcccttgccgcagcttcctcttgggttgcagtagcatacgaaaaagccggaggccgcccaaagctgcatctcatggtggaagcccgggccaaataccatcttcggcccaccgtggatatgaaggatgcccggataccgcttgcccgactcgtagcccaccggcttcatcacgaagccgtcgatatccacgccgtccgtgttggtaaaggtaagccgctccggcgtggaaatggtcacgccctccagtgcagctccgttgaaatccgtcagctgctccagctggccgccatcccaaaggtacacctcaggaagcttcagacccacagccgcggaaaagaggaacctctttccgtccttagtatcgaaatcaatgaggtagtcgtcgccgccgaagagcgtctgtacaccggtttcccgcgtccatacacacaagccggagcccacgccgtccgtgttgaggaaatacagcgtctcgcccaccattctctgtcccgtgacggagccggagaagcagtcggtgaccacctcggagttgacccggcggtcatagcggcccagattttcctcgccattttcgtccaccacaaagaatgtggggtgctcgtacacgccatagtcccgcatgaccagtcccagacagagcgccttccggcctaaatgccccacatagtcgatgctgtatttgtcgggcgtgatcagcgtctccgtctcgttccgctccgcatcccagcgatacattccctcggtgaccggctttatatcccggaaggggaacgcagtgaagagcacctgaccgggccggacattcacatgattcacatcatagtcctccggcgtgatccggcgatattctccggtagcctccagatagagaaacagcgtaattctggtctgattaaacatcccaaccccgttctcacataggggtaattccgtcaaaaccttatagcccttggtctgctgacggcgaacgagctccttctccagcgcctctcccgtcagctccagaagattcggccggtccaaatgggtctcgcccgtgaaaacataacggccctcgtccattttccagagcccggatacggacatggggagacggaatgcctcgcgctcttcgcctgtacatacattcaggcggtgatacaccgtccactcttcctcgaagccccgcgcccgcatagcttcgtccggctctgtggttttatagagaatatgggtgttatcctcccaaaccgccttccgctggtcatctccttgggtgatctgccggctctctctgctctccagatcatacagccacagattccaccggtagccgtccccttccctgtcgacctccttgagtgcaaaggtcagatatctgccgtccggagacagctccagtgcagaaggataccgatacttggcaaaatccgtcaatgccagcttcttcatacctgcgtcccctccttttccatcaccttgaacgtctcataaagcatccgcgtgccaaatccgatgccgccctttgtatagatcccctcacattcggtggtccaagcggtaccgccgatatccaagtggatccaaggcgtctcctcgacaaactccttaacgaacatggcgcccaccgtggcatatccacccacgctggagcccatcgcgctgtttttcagatgggctacacgggagtccagcacccggcggagattctcgtcacagggcagctcccacatccgctcacaggcggcggcggcgcccttctccacctgcgcggtcagggcccggttattgctaaaggctccgcagcggcgatttcccagcgccgtctggataccgtcggtgagtgtggcaatatccacgatgcgatccacgtcgcagcactgcttggcatacgtcacggcatcggccagagtgatacggccctcggcatcggtgttgttcacctcgatataccgcccggacatggagcggatcacatcgcccggcacataggccgtggcggagagcttattctcacaagccgccaccacaccggtaatattgatccgaaggccccgcttctgcgtcgcccacagggcgcccatcacggcggccgcgccgcccatatcatgctgcatggtttccataaactcagacgactggagggagtatccgccgctgtcgtaggtaaggcccttgccgatcagccccaggcggctctccacgtcctgcgcgccggtatactccatgacaatgagcttgggctcgtaaatcgagcccttcccgacctccagaaaagcggtgagcccgatgcgctccacctcatctctgccgtaaacggtcaccttcacgggtgtctccttaaaaagctcctgcgccgcctgcgccagcttggcgggggtaagcaccgtggggggctcattgatcagatcccgtgcgatgcaggtggcctcagcagacacctccgcctctaccaaggcggcctcgtagcgctccggcatctcgcagagaaacgcagccgtttcgatccccggcaccgtaggggtcgtcttgtacttgtcaaaccggtagccggtaagagcggcagcctctgccgccttttggaagagcgccggcgtgaactgcgggcacacgccccgcagatcggtacacaccgcacgcagatccagctcctgacactgacgatacaccttggcacagctctccagcacctgctccaggctccagtctttccccagacccagcaggaaaatttgggtcagcacgccctctgaaagaacagaaaagcggaaaatctcacccgttttcccttcaaagcgccccgaggcacgaactgcggcaagctcctgctcccaaggtccctgatagctgttcaggttgccttctcccagcgggaccaccacaccgtcccatgctctggtgtcatactttttcacaagttgcagttccattttttcttcctccttctggtctattcaatgatagagaattaaaaagcgggggcggctatgccgcccccgcaggggtatgcgaggtgatccacccgcgctaaatccccttttttacagcagatggcaggctgcgaagtgtccgggctccacctctttgagctccgggatctcccgtgcgcagtccgggcaagccacaggacagcggtcatggaagggacagccggagggcagatggatcgggctgggaatctctccacgcagctcctgagattcggcaatactgccctcatcaatcgtcggcgcagcggaaaaaagcgccttggtataggggtgaaccgggttggagaacagcagcttcttcggagcccgctccacaatagttcccagatacatgacacccaagctgtcgctgatgtgcttgaccacgctcagatcgtgtgcgatgaacagataggaaaaatgaaattcatccttcagatccataagaatgttcaagatctgagcctgaatggacacatccaaagcagataccggctcatccgctatgataaatttaggctcgaccgccaacgcccgggctatgccgatgcgctgacgctgaccgccggaaaactgatgcggataccggttggcctgctcagagctgagtccaacacgctccaacagatgaatcgccttctcctccgcctccgccttgctgctgcacagcttgtggaacagcatcggctcggtgaggatctccatgatcttctgccggggattcagagaggcatagggatcctgaaagatcatctgcatctctcgacggatggggcgcatctcctgcggcttgagccgggtgatatcgcgtccgtcgaatacgattttgccggactttggctcgatcagcttgatgatggtgcgggccgtggtagactttccgcatccggactctcccaccagactgaacacctcgccctcctccacatcaaagctgacgttgttgaccgcatgaaccactcgattttccagtgaaaaatgaccgtttttgaattttaccttatccagaaaatccttggtgagattgaactcctgcaccaaattctccacctgaagaatcttactcatggctctcgcctcctgtcagcggaaagtggcacaccgcacaatgccccgggccaacctcatggctttcaggcgccacggtacggcaaatatcctggcagtatttgcatctgggagcaaaataacatccttggggcagatccagcatactgggaaccatacccggaatggattccaggcgtttttgctcctctcccattctggggatggagttaagaagtccctcggtatacggatggctggggcggcggatcacgtcatcccgggagccgctttccacgattttgccgcagtacatcacaatgatgcgatccgccatttgggaaaccaccgccaagtcatgggtgatcaggatgagagaagcgtcctgctccttcaccagcttatccatgagcttgaggatctgcgcctgtatggtcacatccagagcagtggtaggctcatcggcgatgatgagcttcggattggcggccagggcgatcgcaatgatgacccgctgccgcataccgccagaaaactgatgggggtaggatttcagccgatcctcaggattggggatacctaccatatgcagcaattccacacagcgcgcgtgcttttcctgtttggtcatctgcttctggtggaggtccagcatctcggtgatctgtttctcaatggtatagagcgggttcagggaggtcatcggatcctggaacaccatggagatcgccttgcctcggatcttcatcatttcccgctcgctctttttgctgatgtcctcgccctggaaaagaatcccgtccgattccaccacaccgggcggctcgatcaatttcagaatggaaaagctgctaacggatttaccgctgcccgactcgcccacgatgcccagcacctgtccctcatccagggaaaagctaatgccgtccaccgccttgactacaccgcggaaggtgtggaaataggtccgcaggttttccacctgcagcagtgtttcgctcatctcgctccccccttacttcagcttaggattgaactcatcgcgcaggaaatctcccagaaggttgattccgaacacgatcagcatgatgtagagacccggcatcaccgcgatccaccagtatccgctgaacagcacgtcgaagccgttcttgaccagcatgcccagagagggttccgtgaccggaacacctacgcccagaaagctcagcgtggcttccgccagaataaggccgcccaccttcatcgtggaaagaacgatgacggtggtcattacgttgggcagcacatgcttggcgataatcaggatattggggaggccaatgactctggccgcatctacatattccatctgcttcaccgtcagcacctcggcgcggacggtacggatgtatgtgacacatccgatgatcgtaaatacgaccagcagcttgcttacgccccgtccaaacatggtcatgatgaagagtgccacgaggatatcgggaaaagagagcaggatatctgccaaacgcatgatgacagcgtctacctttccaccaaaatagccggagatcagtcccagcgtgatacctacggcacaggccagcagcgtacctacaacgccgataaagagggagatacggcttccgtaaataagagagctgaaaatatcccgtccctgactgtcggtaccgaaaataaaccgggcgtcacctcccgcctcccatgcaggcggcttgtaggaatccgtaagggagagagaggctacatcataggggttctgcggagcaaacaacggcccgaaaagggcaatgaacagtaccagtaccacgatcaccgtaccgacgatagcggacggactgcgcttgtaattgtgaaagaactcagactcagcgatgcgccggaaaaagctcttgttgggggccgcgcccttttttttcatttcacccatagcgcatcacctgaatttgattctcgggtcgatgactgtatacagaaggtcgaccacaaaattgataaacacaaacaacaccgtagtcaggatcagataggccacaatgaccggccgatccaccgagttaatggagtcaataagaagcttgccgagtcccggccaggagtagatggtctccgtcaccgtcgtaaaggcgataagggaaccgatttccataccgaacaccgtgataaccgggatcagggcatttttcagggcgtgtccaaagaggacctttcgggtggacacacctttggctctggcaaatttgatataatcctgccgcatattctccatcacaccggcacgggtaaggcgcaccagagatgcgatgttggtcacagacagcgtaagagcaggcaggataatgtacttaagtccaccgggcgcaaacaggctgaaatccatccccagaaacggtgcggtcgcgccccgtcccgaggaggggaaccagtgcagcttcagagagaagatgtagatcagcatgatgccgatgaagaaggagggcagggaaatgcccagaatggagcctcccatcaccaatgtgctggattttcgtttggggaaagcgcccgcatatacgcccagtgggatagagataccgagcgccagcacagcggatacaaaaaccagctccagcgtagcaggcacccgctgggcgatcagagagagcgcatccactttatagatataggacttgccgaaatctcccttgaacgcattggtaataaacgatacgtactgctccaggatcggtctgttgagccccagttcttctcgaacctgctctcgaacctcaggcggagccttgggcgagaccagcatattgacgggatcgccaatgaagttggccagaacaaataccagaatggacacaatgaacagtgtaactaccatttgcgccagccgcttcaggaaatacttgaacatggtaatacctcatttacgggcttacacccttttggtgggaggcagaagggaagatccccttctgcctcctcccattgactgttcttatgtgcgcttagaaggtgaagtcccaagccagaatatggtcatcggcactgggggtgtactgaatgccggcgcgcacgccgaagatattctccttgaagaacaggggaatgtaggcggcctcgtcccgggcaatctgatctacctgctccaccagcgctgcgcgcttggcctgatcggtctcaacagatgcctgatccagcagcgcatccacctcggcattgctgtaatggcccctgttgccttcgcccatgccggccttgccgtcgtaggtatagagcatatcgttgaagatgaccatgccctcgccggagccgtcgccccagcctgacatgaagaaggaggactggaggttctctgcgtctatcttctcatagaaggaggcgcgaggcagcaggtttacctcggccttgatgcccaccttctccagatagctggcaatggcctgagacacctgatcggcgttcatgtcactgtcgctgcgggcgtcgatgcggagatagaagccatcgggatagccggcctccgccaaaagctgcttggcaagctcgggatcgtaggcgggacgctctgcgtcggcattatatcccacacagatgctgggcatataggagttagccacggtggcgtagccgttcatgacggtatcgatgatcgtctgaatgtcaatggcgtggtagatagcctgacgaaccttcacgttgagaagcgggttgggatcgtcggtgccggcagagccatgctcattgagcagatcaaagcccatgtagctgcaggacaggctgggattggtaatgacctgaacgttggaggcgtccttcagacggtccacgtccatcacggggatgttggagataaagtccacctcgccgttgatgagagcggtggtgcgggtggctgcattggcgatcacgcggaactccacggtctctgcatcaggcagctcgccccaatactcgtcgttgcggaccagcttgatataggattccttcacgtgctccaccagacgataccgaccggtacccacagggttcgcggagatctcctcgctggtaagaccctcacaggtctccttgtcaagcatcatgatatggaccaggctgccggcaaacacgggataggggatcttggtcaccagctgcacggtgtaatcatccaccttcttgacttcctgaagacgcatgaggtacacgcccatctccagagtaggatcgttgaggatgcgctcaaagctgaagaccacgtcgtcggcattgaagtcgtttccgttggagaacttcacgccctggcgaagcttgaactcccacgtcacgccgtcatccagaactttccagctctctgccagaccgggcttcttgctcatgtccgcattatagtccaccagagggtcgtacagatgagacgccatctgcatctcggcgctgctgtcctttactgcggggtccagcgagacaacatcattcagcactgcgatggtcaggctctttttgccgtcatcagcggggtcactctgctgcggtttgtctgccccacagccagtcaaggccaccgagagacacagagctacggacaggaacattgcgatggttctttttttcatagctgtttctcctttaaaaaatttcttatctcacaaggtgcgtcgtttacaggtattactgaagcgacagaccgttgatcgccttttccatctgctccagagcctttgtcagggtacaccggggacaggccacattcatgcgcagaaaagcctctccctgcttaccgaattcatagccggcgcagaacgccaccttggcctcattgatcatgaaatgctccagcgccatgccccggtagggcagctgggagcagtccagccagaccagatacgtaccctcggaggggatcatacggatctgaggaatgcgctcccgcaggaactgatccagatacgccttgttgtcggagacgtaggcgatggcctgatccagccactcctcgccgtcgttgtaggcggctatgagggcggccatgccgaaaatgttgtccagccgcgtctgggcaatggacatctcctcgttgaacttgcaccgcaggtcgtcgtccgccagcaccagggtggccatacccagtccgcccagattgaagcccttgttggaggagtagcagaccatggaatggcgcagcacctcctcgcccagcaggccaaaggtggtgtggggatgctccggcggcacgaagtcgcagtggatctcgtccaccagcatgaagatgttgtgccgcagacagatctccgccacgccctccagctcctgacgggtccatacccggccggtggggttgtgggggctggagagcaccagtaccttcacgccggaggcagccttggcctccatatcggcgaagtcgaaggtgtagcgcccgtccttccagactagcggcgtctctaccagcttccggccgccccgggtgaccatgtcaaacagcgggtcgtagttgggcatggggaccatgaccctgtcaccgggcttggtgaggatacgcagcattacgttcaaggcgtagatcacgccgggaggcgcaaaggccagatgctcatatttggcctcaaagccatggcgctttttcagccagcccatcaccgcgtcataatagggctgctggcgcataccgtagccgtaaaccggatgggcggcgcgcttctgtacagcctccacgacgcagggggcgcaggcgaaatccatgtccgccacccacatggggatcacgtcgtcccggccgaaatagtccatatcgcagtcccacttaaaggagaaggtatttctgcgattgatgggggtatcaaaatcgtatctcatgcagcgcctcctaccagtgcaacgacggtccacggaatgatggactctgccgccgccagcagcgcatagtttgcagcttccattacaaatgcctccttaaaaatataacgtgcgggggggatggcattgagcctcccttctgacaactttttagtttttctgattataatttatcacactgcctttgtcaatcttgaatagcttgaataagtgccaagaaagttgataattttttgtctaaattgctgcctcgaaggctattcccgccttggtctgcaaaaaaaatattacatccccccaccgctttccagcatattagggttgatttatccattcattttcgatatactgactttcagcagcactatgtgacagttttttatcaggcaagaattattgttgagaaagtagggatacagtgagcaactacgccagtcttgagcgatacatccctctggtggaatttatgggaaagatctgcggaaagaattatgagatcatcctccatgacgtttccacgccggagcgctcggtgattgccgcctgcaacgagcatctcagcggccgccgcataggcgaccccatgacggagttggccaaggaactgctgcgaaccggagtctatcaggagcacgactatgtggccaactacgagggccgcacccggggaggtaagcgtttcgtctcttccacctatttcattaaggaaaagggtcatctggtggggctgatctgcgtgaaccacgatgtggaagatattctggtgctctcggagcatctttccagcctgctccattccttttctcttccgcaagaggaggagagctccgcctataccgaaaacctggatgattccatcccggagctgtccagcaatctgatccactccaccatcctcggctatggtatcccctccgatgccatgcataccgccgacaagctggagatactccgctctctggaagcgcagggcgtattccataccaagggctccatcggacaggtcgccagggaactgcacatctccgaacccacggtctaccgctacctgcggcgtatccgcagcgaagcaatatgatcttccgctgcggcgcttcacccgcgggcgggatgcgctgacgtctcgatgcgtaaagcggccggccaggaacatctcatttaacagcagctattggtggatccctgacattttgcccaatacttcccgatccctatggctccgcatttattaccattacgcttctgataaaggaggactcaagcatgaaattttacattctttgtgacattgaaggcgtggcttctttgacctgctgggacgaggcacgttccgtcaacgcctgctatgcgcctatggcacgggaaatggcgttggaggctgccgctgcggcccgtggacttttctccggcggagccgacgaggtcgtcatagaggatatgcacggagacggctgcaacattgactgcgccctgctccccagagatgcccgtctccttcgggggatcacccacgatattgtgggccttaccggtatttttgacgagagctatgacggtatgctgatggtcggctttcacgacgctgcctccgcccccggaaatcccacgtcccacacgatggtaagctcccgcattttccgccttacggtcaatggtgcgctgtggggagaattcgagatgtacgcccatgccgccgcttaccggggcgttcccaccctattcgccagcggcgacgaggggatgtgtgcggctgcggcgcacaccgtacccggcctgctgaccgtaccaaccaaatccggccacggctacggcgtcctgacaaagaccccggagcttgtccgcgaggagatcgagggcatgatggccgaggctgtggcggcggcaaaaacagccgcacctccggtacttcccgatcacttccatgtggaggtcacctatgtacaccattatgacgcctatggatgctcccactatcccggcgccagcctcatctctcccaccaccgtggcctttgatgccgatgattacggtgatgtgctgcgctttttctactttgtgatctaagaaacggaggtatatgctatggctgttattgcttatcaataccgtggtgatctggtggatcagatccaccggggacatatcgcggtaacggatcacacaggccggatcctttggaagctcggtgatccggagcgtcttacgtttgcccgctcctccgccaagccccttcaggcgatccccgtggcagaaagcggtgcgctggagcattatggtattaccccgcaggaactggccgtcatctgttcctcccacaacggagaaccctttcatgtaaaggccgtggagagcatcctgcacaaggcaggtctctcccccgatcagctgtgctgcgggtcggaataccccatgtatgtccccgccgaggacgccttgaagatcgccggcatcccccgggcgcccatctactgcgactgctccggaaagcacgccggtatgctcatcaccgcccgccatttaggggagtctttggaaggctatactgctttggagcaccccgtccagcagcgtatcctctcggtgttcgctgaaatgtgcggcgtagagacctccgatgtccagttggccgtggacggctgcggcgttccggtccatgcgctgcccctttaccggctggcacagggctacgcccgcatgtccctccccacgcttttcgcccccacccgggccgctaccctccggcgcatcacatccgccatgacagcacatccggaaatggtggcgggaaccgatcgcatctgcacccagctgatggccgccttcggcgaccgaatcttctgtaaatcaggcgccagcgcattctatgccgtgggcatcaaggataagggaatcggcattgccctcaaaatggaggacggcgcctcctccatcgtcccgtatgccatcctctcggttctcacccagctcggcgtcatcacgccggaggaagcctgctctctgccccgctaccacgacaaaaacctttacaacaaccaccacgccgtcgtgggccgcaccgagctggcctttcaactggagcagctctgctaacgatataaatacggtcacacagtccctttggattgtgtgaccgttatctttgccatgcttttgcatggcaaaaataagaaatgtgccatttcctcgcccctgtggggcaaccggaaatgatgcacaaaaacttcatgcgccggcatttgcgcattttcgtggtgcggtgctcaggcatgaagttttttgcccattttcagctgaatacaccgcaaatcaagccactggtttcactacgaaatcagtgcctttttttcggctttcctcttgggcaagggtcgccatgatcgtcagccgcaactcaccatcgttgtccattgtccagatattctcctcgacgaaatgattttcaattatgcagctttctcattgcaaacatctcagaattatggtaaaatgagcggataaaaatacccaagataaagcagggattatagtgaaacgaatcagaaccggatttacattgatggaaatgctgatcgtcattgcgatcatcgctgtattgattgcgattgcgatcccgttattttcatcacagcttgaaaaaaccagagaagcgacggatcttacaaatgtacgctctgcttatgcacaggtatccgcagaggcactgctcggaaattcggagatcaccgtgacggttgacctgacgcagaagcaggccgactggcaatcattggaccccgtgaatatcggcggtatcgtccactacaaaaagcaaggggacacagataattggaaaggcgttgctgcgccgaacgggacctgcgttgtgtcatatcatgaagattacggaatcattctcacttggagcggaaaagccgacccgactacgcctgaatacccgtttaatacaagcataacggatttcttctcacttctatatgatacagctttctggaaaaacggcagtataaagaacaatacaaattttgagtttgactccagatgtccagattcgaaatatgtcccggctattttcgaagcaatcgaaaagctggacaacagccttttacagcagccggactgcacctgggcctatcttggcaacgggaaagacgggcaagaagcaaagcggtatctcttctggacctctctgaacactgacaaagtcggcgccggaaagagcatccccgtaatcatccagaccggtgacggaaaatattatgtttccgaaaccataaccggcaagcggaatggcaaagactatgtcaccatctcggaatcgcttacgccgaaccagtatacgcaaaccctgaaaaaaggaaaagaatattcctccttggaagcagcctacgatgcctatctcaaggccttggagcaatatgattcggttcgccagccttgaggtgctttgtcccgctataaccgctgatgctgggaaacgtcgtatttcaaatcgaagctgctgaattgacgtgaggtcatttgcatgtggctgttctataaaacaggattccagaagcaaatggtatgtcagttatcgggctggatcgtttacaaatggggatgtgccattacggcacatccccatttgttttgtgtccgctttgcggatagatcctacttgtgtgttacaggttttctgccttaaacgtcgtatatcccttataatagctgtggtcaataccctt

SEQ ID NO: 12355 - DNA, 403 bp, Unknown
  gut microbiota DNA sequence
gagttcgtcatctttgacggtggacggcatggctacgacaatatgttctgcgatgaacatgatccatctgagctggagcaccgtcccctcaagcggtatgagatccctgcctccaaactggtgctggagctgggttacagtatcgactatgaggacgaaaaagaggacttcgaaccggatgaagcgggtaccgtagagctgatcaacggtgaacggatgccgtgggaacaggtcaagcgggacggcatcgactatatcgccctttactatgtgaacgagaaaggaaaaccagtccagattttggacgcggaattggcatgagttttgtactggctcaggaggtggaactgcaatgtccataactgcctataaagtggaagccgtcggtcatgaccgaaccggc

SEQ ID NO: 12356 - DNA, 637 bp, Unknown
  gut microbiota DNA sequence
catattctgcatcctgcacccagttaccaaagccgccgatggtattcacatcctgacaggccgcaccgtaaaacagggacacaggcgcttcgcccagcacaaagggattttccgtgagggccttgtactcctcgggactgacatagcaatccgtcttctccgcgccgtcaaagagttcggagggaaagacctccacgccgccatccagagcgaaccggttgaaggcggggcctttgaggaatcccacgcagctggggcagcaggtggcagtcaggataccatccagccccagaaatttcagccgctcatcccggccatccagcaccagcatgtccaccatgcgtccgccacagtgggggcatgtgtcctcccgtgcccggccaatgcggacgggagatttctcgctggtggttcctttgaccataggatagcaggtatcgaagttgagctggattttctggccctccttgtcgaaggtccagcctccgatctgcgcatagctggatgggtctacatagaggcccttgcgccagggccggggatttcgctccagctccagcagagtctccattgccttgtcatctccttgcatagcaaggcaactcatcaggttggaggccgcgctggaatattccgc

SEQ ID NO: 12357 - DNA, 1375 bp, Unknown
  gut microbiota DNA sequence
taccttactcctcccgctttttgcgcttgagcacaaaggctgctgcgaccgccgccacaggcagggcgatggcccacaccagcacgccggtgtcgccggtggccggagtgccgccgttgttggtgccgttgccgctattgtcgccgccggaggtgccgccggtctgaatggtcacatcgctcatgtcatagagccgggtctggccgtttacgaagcggtagtaggccgccagggcgtagtagccctgctcggtggccatgtcgttccgctcgccgccagcggtgtgccggaagccgccgccggtgacatagaacccggccagagcatccagaacggtgtggccgttcttcacgaagcggctatccgcggtgggatcgatgcccagggcggtgagagccacgatgacctgggcgcaggactcgctgttcacggtgccccagctgccaaagccgccgtcagtgcgctgcagggcggaaagggcctccagagccttatccacagcagccttcacggtttcgttggtcttgtagtaaggtgccagggcctggatggccatagcggtcatatcggtgtcggcgttctcgccgctgaggttccagccgccgtcgggaagctgggcatccaggatgacctgaatcagcttctcccgggtcacatcgcccatagtggggtagttgtggctatccagggcaatgagggtgaaaatggggccgttaatgtcctgggtctgcacataatccatgctatccagacccttcagcaggttgtggccgcccacattggtgacatccttgccgatggccgtcagggccaggatcacccgggcgttgtcggtgactttggccgggtgcagacgctcattggcgtcagccttggccttcacatactccaccacattgtcatagtacccggcgggtacggtgcggccgctgcgggccaggccgatgaccatccactcgccgccggtggagttcacggtgggggtgcccaaggtggccatgaagtcgccggtggtcttatagatggtgtccaggtttgccatgaggtccgcgtgcttgagctggttgagcctaatgatagcggcggtgagagcgtccaccttatcggcgtccaccagggccttgtcctcgtcggagagggcatcgtaggcggacttggcggcggtgatggcggcctcactatccagggtgacatcggcgccgatggcgtcaataaggtcctccacggtctcgatgtcgcccttcaaaacggtgatggtcaggtcgctgatctccatccgatagaacttcgcatacttatctagccattcgtatccgccgcttctgtgggtaacatccagatagccgccgtaaattctgtaggtgcctgccggggt

SEQ ID NO: 12358 - DNA, 69316 bp, Unknown
  gut microbiota DNA sequence
tggctggaacaagagggcagcggggcggcgcagccctgcttttttctggggctgacgctcctcccctgaccccaccggagggcgctgtgtgtccctgattttccttcccccgccggtgcattttcgatgcgccaaatcattaggttcacttatgtcaatcatttcaaacccatacttcccctatgcctccggtgcgcctataataagctgttgtttgaaaaaactcgcttttaacaccaagtcaggaggcagtatctatggcaaattgtgcaatcgtaggcatcaactggggcgacgagggcaagggccgcatggtggattacctatcccagcggtttgacgtcgtggtccggtatcagggtggcggcaacgccggccacaccgtcatcaacgacatgggcaagtttgccctgcacctgctgccctccggcgttttccacaaaggggtcatgaacatcctcggcaacggcgtggcgctggactgcgaaaacctcctgtcggagatcgagacgctgcgggccgccggagtgcctgtttccccggaaaacctgctggtcagcgaccgggcctccctgctgctgccgtggcaccgggagctggatgcattggaggaggcccgtctcaaggacaagcagtacggctccaccaagcagggcatcgcccccttctattccgataaatatcagaaaaagaccattcaggccggagagcttctgtatccggagcacctgaaggcccatctgcaggacctgttggagtggaagaacctgatcctccgggaggtctacggtgccgagggctacaccatggagcagctgctggcatggctggatcgcttcggcggagccatccgtcccttcatcgctgacaccggcgcatggctgcggcaggcgcaggcaggcggcaagtccatcctcttcgagggccagctgggcgctctgcgggatctggatttcggcatctacccctataccacctcctccaataccatcgccgcctacgcccccgtgggctccgggctgcccggtgccaagctggacgaggtggtgggcgtggtgaaggcctactcctcctgcgtgggggaaggccccttcacctgcgagtggttcggcccggaggccgaggaactgcgggaggccggcgacgagtacggcgccaagacaggccgtccccgccgggtaggccccatcgatctggtggcctcccgctacggtgtccggatgcagggcgccaccaacattgccctcaccaagctggatgtcctcagctacatggagcgcatccccgtctgcgctgcctacgaggtggacggccagatcacccacgagttccccttcccggttctgctggatcaggccaagcccgtgacggagtacctccccggctggcactgcgacatctccggcgtccgcacttgggaggcactaccccaggccgcccgtgactatgtgacctatgtggagcaggccatcggctgccgcattggctacgtctccgtgggcgccgagcgggacagcctcattcttcgataaccaccgggccgccctgcccgccaacatcaccaaaggagcatccctatggcaaacgacgtatacacctccccgctggcgtctcgctacgcctccccctatatgctgcacctgttctcgccggacagccgcttccagacctggcgccgcctatgggtggcgctggcccgagcgcagcatcagctgggcctgcccatcaccgcccggcaggtgcaggagatggaggcccacgtcaccgacatcgactacgaggtggccaccgcgcgggagcgggaggtgcgccatgacgtcatggcccacgtctacgcctacggcaaggcggccccgtcggccgccggcatcctccatctgggggccaccagctgctacgtcaccgacaacgccgacctgatcctctaccgggacggtctgcgctatctccggggtcagctgctgtcggtgctggcggatctggccaccttcgcccggcgctatgccgccgtccccaccttgggctacacccactatcagcccgcccagccggtgacggtgggcaagcgggccaccctgtggatgcaggacttcctctccgacgtggaggagctggatgccctgctctccggcctgaaatttctgggctgccgtggcaccaccggcaccgaggccagcttcatggatctcttcgacggtgacgaggagaagatcgacgagatgaaccgccgcatcgccgccgagttcggcttttcggagtgcttccccgtgtgcggccagacctacccccgcaaggtagacagccgcatcctgagctgcctcagctccatcgcccagagtgcctatcgcatggccggagacatccgcctgctgcagcacgatcgccagctggaggagccctttgaggacagccagatcggctcctccgccatggcctacaaacgcaaccccatgcgctgcgagcgcatctgctccctgagccgctatctcatggccgacgccatgaacgcccctatgactgcctccacccagtggctggagcgcacgctggacgactccgccaaccgccgcatcgccctgccggagggattcctctgcgccgacgctatcctgcggctgtgccagaacgtagcatcgggccttcgggtcaacgagacggtggtggatcgcactctccgggagtacctgcccttcatggccaccgaaaacctgatgatggaggccgtgaagcggggcggcgaccgccagcagctccatgaggtcatccgccgtcactctatggccgccacggcccgcatgaaggagggacatccctgcgacctgctggaccggctggccgccgacccggccttcggcctgacccgtccggagctggaggctctcatggatccccggcgctacatcggccgctgtccccagcaggtggcccggttcttagagcgctgccagccccttctggcgcaggcccaaaccgccgacggcgccatcaccctctgaccaaccccgcaatacttcgtctgccgcaaaaccgtctttcccgcaagactccaacatcgcaaagccgcaccataccgcacgccccatagcagcgccctccattcggcaaggcttttcctgccatacccccaatggcaccccagaaaactaaaaatcagaccctccggctgggccggagggtctggtttttaccccaccacagcgaggaagccctccggcatcgccggagggcttcctattatacttgcactctcttattcgccggtggttccgtcggtgccgttagacgtgtcgccggtcccagcgtcaccgccggtactgccgcctgcgcccgtatcacttccggtgccggaatcactcccctgttcgccggagccattgccggtgctgccgccgttctcgctgccgggtgtctcattgctgccgctctgatcaccggtattggcatcgtcagcgccgggaaccgcagcatccgtggtctgctgactgtcgccgctcaccgcaggctgctcatcaggcgtatcggagggttcctgctgagccgttccgatgcttccgccgttccccaccgccgttcccggcaggctgtcctgctttccccaacagagggtcagcgctgcgccgctctcgttgacggtaatcgtataaccatccgcagtaagataatccgtgtgatactccgtgtcgcccactttgatcaccacataggcatattgggcatcccccgccatatgcagtgtcagcgtgccggtaccgttcaagctgtacggttctccgaccttcagctcacccagagccttatcgttcagcgacgccgtcaccgtggcagtggcggactgaatgggctgcacaccgctgttctgggtggccgtgaaccacgcccatgtcaggctgcacaggcagaccagacaaatcgccacccccagcagggagggcatcagcagcgccgtcagcgacgcaggcttcttctcctgcggatgctcacgctttcctgtatagaaagtttccttccaattcatgtcttgatgctcctttcaatccggcagagccatatggcgggcgccggtcaataggcgagccaaggacgcaaggagtctaagcttgtgtccttggctcgcccctccccggcggtcaaatcggggaggatcgagcttgtaaagaggggttttcgatagaatgatcatccatgatgattcccaatgtcatggtcggagcgtccctccgacaacgctccccgtggagcggcagatcacgcctgagggggctcctccggagtcttttccttctcctccagccgagccttcatctccatcagctcctgcatcatccgctggttctcctcccgctggcgctccagattcgcctgctgggcctgtatttcccgctgctcctcgctcttatagcgcttgaacagccggatgcagttgatgccctccatgaggatcagcaaaaagaacggcaggaagatgcacagaatgtagccgggggtggttttcaggaactggaagaaattgcccacgccggacaggcacttctcgtacttgcccagcacatagggatacgtcaccggcatctcgtcgtcggtatcggtggtggtaccgtaggtgataaaagcgggctgaccatctgcgtcggtggtcagggaccggatcttatgagtcacggtctctccaaagctggctgtgtcctgcgaggtataggcgatgatatccccctcctgcaaagtagcgggatccaccgaccgcaccagaatcagatctccggccttaaaatccgtggcgctcatggagtccgatcgcacgatatacatcttgtagccgaacagcgcccggtcattgcggtcaaaggtggtgacggagacgatggtgaacaccatcatgcacaccgccagcagcacgatcagccatgtcagtacggtcttgatcacttcaaaggtttttttcatggcttttctctcctgcaacggtctccccaacatcagtcaaacagccgctgcgggttgttcttggtctgggtggcgtcggcacagagggtaaaggtcaaatccttggcctgagcgctgttgccggtcgcctccgggaagtggaaatacatggtcagtgtccgccgctgacccaccgccagcagatcgtccgccgcctgcgtgttctccaactgagtgggggtcccggagtagagggtcttgttgccgtccttcaccgtgacctccagcacgtccgccagatcgccggagacaccggcgaagtacagccggtagtacaccgtgccggtgctgtcgttttcgataaagaagtccttcttcaccgtcatgcccggctcgaacaggaactcgtcgggccggatcaccggctcgccatcgttgaggttgatacggacgccgccggtggcaaaggtgttgtcccggacggaaatcatggaataggccagtgccacggtggtgaccaccagacacaccgccagcacgatcaccgcaacgatgccgccggttagacggctgcgggttttacgctcagtcatgggacacctccctgcggcgacgcagcagcaccgtcagtgccgcaccggacaccagcaccgccgctccccagagcaggggctgcatggtgtcgccggtagggggagccaactcctcgctatccgccacccaccagtaaaagtccgctaccagctgctgatacatatagggattgccgacgctggtatccagatacgccgtcagctgatagtccagcgtatcgctgccggccgccagcggggtatccactgcggcgggcatctcggccatcaggccgtcatacaccacactaccgcccacggacacccgcagcttcagcacctccgccagcttctcatagccggggcgcacctccgcccggaagtggacggtgacgttgcccttgtgatctacctgcacgcagtcgttctgggtctcggcatcgccggggaacatattggtcacggagaactcccggttatactccgggctgcggtcatacagccggatggtgaccttgccggtccgggccgctgtgggaacgggtgcgccggcgggctgcgccgccgtctggatgccgttgccgggggcctctgccgcccggcctgcctgccgcccgtaataccgcacggcacacagcgccgcaaggctcagcgccaacaggatcgccagcacaacgatcagccgcttcaccgtgctgcttcgaatgggttgccgcacctgtaacacctcctgcttccttccaaaactcatatggcacatatagactctctggctcgcccttgccacaaccaatggtggtttttcggcaaatctcagcggccggagagcctttgcccttcgacatttcgtcttgctaattgtcaggtccatgagagatactaccacgtttcccgcctttttgcaacagggttttgccgatttgtgcaaaattctagttaatttcatatgttctttgcgttcatgcggcatatatgtctctttcaaaattcccccatgcttttaccccgccgggcggcataattttcttgacaaccaccgccgcaaaatggtagcctatgggtgacaagcaaacagagttcggatgactggtccgggagagaccgctgcggcggcgccgaaggggaatgcagaagctctcaggcaaaagggtcggaccacgacgatactccgaagagtgcggcctgtccgcacgccgaaggtgcaacccgctccggcggggaatctctcaggtacaaaaacggaggcgcaaaactgccgaaagcggttttgcgcctttttgtgcgtccaaaacctttccggaacgtgtccaaggcaccgccaagacctgtccacgatgcgtccggaatgtgtccagcgactggacaaacgaagcaaacggagcaaaacaagcggaacaaacaacggaacaaacatgataaggaggaaggaacatgagcgaactcaaacgcacccagctgtacgagacccatgtggcggccggtgcctccatggtggatttcggcggatgggaaatgcccgtccagtatcccacgggaatcgtggcggagcatctgtacacccggcacttctgcagcctgttcgatgtgtcccacatggggcggctgctgatcgaggggccggagcggctggcatttttgcagcacgtcctgtccagcaacgtggcgggtctggatctgaacatggcccagtactgcatcctgccggacgaggacggcggagccgtggacgatgcgtacctctatcgcttcgaggaggagcggctcttgctggtggtgaacgccgccaacacggagaaggatctgatgcatctgcgctccgtggtgaaggactatgactgcaccatcacggacatcacctcccggtgggcctccatcgccgtgcagggccccaagtccaaggatctgctgaccaccctctccggtggggtacaggtgacggagccgatgaagaacgccctgaacactctgaccttcgagggtcatgaggtgaaggtggccaagaccggctacaccggcgagcctctgggctacgaggtctactgccgcagcgaggacgctgcgtggctgtggaaccggctggtggagctgggcgcccggcccgccggtctgggcgcacgggacaccctccgcatggaggcgggcttccccctgtacggccatgagatgggcgtggatcccgacgggcagaggatgcccattttcgccgtgccgctggccaagttcgccgtgagctttgcgccccagaagggggacttcatcggccgcaaggcgttggagcggcagtttgacgccttccggcgcatcatgaaccgggatttctccgactgcaccgccctgccccgccgtattctgcccatcgccctgctggaccggggcgtcatgcgggccggaatggcggtataccggggcgagaagcaggtgggctgggtcaccagcggcaccatggtcccctactacgttgctgagggcgagggactggagacggtcatcaccgaggagaccgccaagcgggccatcggcctgtgctatgtagacagcgacgttctgacggacgacgtagtggaggtggacatccggggccgccggctgaaggccgtgatccccgcccgtcacatgagcgtgggggctccgccctatgcccgccctttgttgtaccggcggccagaggacgaggtgtctcagcccgccgaccgggcctccaaggcgctggagctgctgcatctggcgcaggataaccaccagtggcgccagcgccagtgcatcaacctcatcccttcggagaacacccccagccgggcggtgcagctgctgtcagccagcgatccctcctgccggtacgctgagcacaagaagatcatctccttctatgataaggatgtattctactatcagggcaccaagttcatcgacaccgtggagcaactgctggcggagcagatgcgccagtatctgggctgcactcaggtggagacccgtgtcatcagcgggcagatgagcaatatggctaccttctccgccctgatggactggaagaaccgtctggaccgcaagcatactccccagcggctgggctatgtgctgaacaaccacatcatccgtggtggccacctgtcggcccagcccatgggcgctctgaaggactacatcgccgtggatccggtgaccgagcgcaccgccgtggtgaacttccccgtgtgccgggacgatctgttccgcatcgacgtggaggagaccaagaaggtcatcgaccgctaccgtccggagcttatcatcttcggcaagagcatggtgctgcgccgggagccggtggcggagatccgccgcttcgtcacggagcagaatatccccaccaccatcatgtacgacatggcccatgtgctgggtctggtgggtgaccacttccagaagccctttgaggagggcgctgagatcgtcaccggctccacccacaagaccttcttcggcccccagcggggcgtcatcggcgtcaactatcgccgggaggatctgaagtgggggctgtgggagaccatccagtcccgtgccttccccggcagcgtctccaaccaccatctggggacccagctgggcctgctgatggcggcctatgagatgaactatttcaaggacagctatcagaaggccgtcattgacaacgccaagtactttgccaaggccctccatgaggcgggtctccacgtgctgggcgatcccgccatcggctacaccaaaacccatcaggtgctggtggacgtgggctacggcaccggcccggaggtagccgagcggctggaggagaacaacatcatcgtcaactatcaggccacccccgacgaggagggcttcaccgcctccggtgctctgcggatgggcgtcagcgaaatgacccggtttggcttcggccagacggagttcacggagctggccggtctgatggcggactgcatcctgcggggaaaggacgtagggcaggaggtttcccgtctccgcagccgctacaccaccatgcactactgcttcgacggcccggagttccagacggcgctggagcagttcatgggccagatcggcttctgatcccggcggaacacgtctaatgaaacacacctaaatcagcagatttgaatatttgaaacgaaaacggaggaacacatcatgaactatcccacccatttgcagtattccaagtcccacgagtggatccacaccgaggacggtgtggctgtgatcggcatctctgactttgcccagcacgctctgggcgacgtggtgtttgtgaacctgcccggcgagggcgatgaggtcaccgccggtgaggcctttggcgacgtggagtccgtgaaggccgtcagcgatctggtaagccctgtgtccggcacggtgtgcgccgtcaatgaggagctgctggacgctccggagctgctgaacagccagtgctacgacgcatggatcatcaaggtggagggcgttaccgccacggaggagctgctggacgccgacggctacgaggccttctgccagcaggagggctgatatgggaagctatgttccctccacgcccgcccagcggcaggagatgctggaggccatcggccttcacgacttccgccagctgtaccgggacgtgccggaggagatgctgctgcgggacgggctggacctgccggagggcatgagcgagctggaggtcagccgcaccatgaccgctatggccgcccggaacaccgcctactccgccgttctccggggcgccggagcctatgaccactacatcccctcgctggtgaagtatgtccccgccaaggaggagttcctcaccgcctacaccccctatcaggcggagatgagtcagggcattttgcagtccatctttgagtatcagaccatgatctgccagctgacaggcatggacgtgtccaatgcctccgtctatgacggcgccactgccgccgccgaggccgccgccatgtgccgggatcgcaagcgccgggtaacgctgatctccgctgcggcccacccggacaccatcaacaccgtccgcacctactgctacggcaccggcgacgagctgcgtgtcgtccccgtgaaggacggccgcacggacccggaggccctgcgtcagatgctggccgggggcgacgtctccggcgtgtacatccagcagcccaactttttcggtcagctggaggaggctgaggcgctgggcgagatcatccatcaggggggtgctctgtatattctgggggtgaaccccattgccgccgccatcctcaagacccccagagactgcggcgccgatgtggccgtaggtgaggggcagcctctggggatgccccttggctggggcggcccgtatctgggctttatggccacggtgcaaaagcatatgcgtaagctccccggccgcatcgtgggccagacagtggacagccgtggccagcgctgcttcgttctgtctctgcaggcccgtgagcagcacatccgccgggagaaggccagcagcaacatctgctccaacgaggccctgtgcgccctgacggccagcgtctatatggcagccatggggccggagggcatggcggaggccgcacggcagtgcctgtccaaggcacactatctggcaaaggccctgtgcgccatccccggcgtgtccctgcggtatccgggggaatatttccacgagttcgtcacggagcttccccgtgtgccggaggttctggaggcgctggagcagcacggtattctgggcggcctgccggtagagggcggcatcctgtggtgcgccacggagaaggtatcccgtgccgtgctggatgagaccgccgccgtggtgaaggaggtgctgagcaaatgaagctgatctttgaaaagagcgttcccggccgccggtgcagcatcctgccccggtgcgacgtggaggaggtgcagctgccgcaggagctgcggcggcaggaggccccggccctgccggagctcagcgaggtggatctgagccgccactacacggagctgtgccagcacgtccacggcgtcaactgcggcttttatccgctgggctcctgcaccatgaagtataacccccgcatcgacgaggagatggcggccctgccgggcttcgccggggtgcatcccctggccccggagcacgccgtggccggatgccgggaggtgctggacaccgccagccgctatctctgccagatcaccggcatggacggcatgaccttccagcccgccgccggtgctcacggcgagttcaccggcgtgctgctgatcaagcagtaccacgatgcacggggcgatcatcagcgcaccaagatcatcgttcccgacagcgcccacggcaccaatcccgccaccgccgccatgtgcggctatcaggtggtgaacatcccctccgccgccgacggctgcgtggatctggaggccctgaaggcggtgctgggagacgatgtggcggggctgatgctgaccaatcccaacaccgtgggcatcttcgacgagaacattctggagatcacccgactggtccacgaggccggtggcctgtgctactacgacggggccaacctcaacgccgttatgggcattgtgcgccccggcgacatgggctttgactgcatccacatgaacctgcacaagaccttcgccaccccccacggcggcggcgggcccggtgcaggcgccgtgggctgcaaggcgtttctggagccgtatctgcctcagtccgccattctgtcggagggggagcacctgcaggtgcgggccttcaacggcaacttcctggtggtggtgaaggcgctggcctacctgttgacgctgggccgggagggcatcccggaggcggcggagaacgccgtcctcaacgccaactatctcatgcggcgcattcagggcaccttccagcccgcctttgaccgcatctgtatgcacgagttcgtgctggggctggaggagttcaagaaggagaccggcgtctcggcgctggatgtggccaagagcctcatcgaccggggcatccatccccccaccatgtacttccccctcatcgtccatgaggcactgatgctggagcccacggagacggagagccgggagacgctggatcaggcggcggaggtgttccgccagctgtaccagctggcccacactgacccggagaccatgcgtaccgccccccacaatgcccagatcggacggcccgacgaggtgcaggcggcccgcaatcccattctgcggtggcaggcatgatccgacagctgctgacctatcgggacggctgcaccgatccccaccggaatctggccacagaggcgtatctgacggagacggtgccggaggatacctgcatcctgtatctgtggcagaaccgccacacggtggtcatcggccggaaccagaacgcatggcgggagtgccgcaccacgctgctggagcaggagggcggcgtgctgtcccggcggctctccggcggcggggcggtgtaccacgacatgggcaatctgaacttcaccttctccctgcctacggcggattacgatctgcgccgtcagcaggaggtgctggtggcggcctgccgccgtctgggtatcccggcggagtgctccggccgcaacgacattctcaccggcggccggaagttctccggcaactccttctatcaccacggggggcgctccttccacaacgggacgctgctcattgacgtagacatggagaagctgggccggtatctggccccctctcaggggaagctggagagcaagggcgtggcgtcggtgcgctcccgtgtggtgaatctctcccagatacagccggggctgaccgtctcccacatggaggaggcgctgtgggcggccttttctgaggtatacggcctccccacccggcggctggagccgtcccggctggatcaggccgctctggagcggcactatcagcgttttcacagctatgactgggtctatgggcaggcgatgccctgcaccttctcctgcgggaagcggtttccgtggggggagttgacgctggagctggcggtggagggcggcgtgtgccgccacgccgccgtgtggaccgacgccatggacgagggcttcgcccagccccttgccagagggttggagggctgccccttccgggtggaggacctctgccgccgggtggaggagacccccgcctgccgggaggtggcggcggacctgtgcgccctgctgcggcggcaggatatctgaaaggagaacggctatgtttgatctgctggtcatcggggcgggccccggtggctataccgccgccgcacgggcggccaagctgggactttccaccgccatcgtggaggagcgcagctggggcggcacctgcctgaaccgggggtgcatccccaccaagacgctgctccatgcttcggaggtctaccgcagcgccgcagacggcgccgccatcggcatccacgcagagggtctgcaggcggacatcccggagatcttcgcctataaagagcgcatctcccgacagctgtgcggcggggtggagagccttctgaagggcgcaggcgtgacgctgctgcggggccgggccgtcatcacggcgccgggaagcgtccgtgtcaccggcgaggacggcggcgactatgaggcccggcgcatcctcatcgccaccggctccgtgccggtgcggccccccattccggggctggagctggccatgacctccgatgaactgctggaggggacggatcacctgtactgctccatcgtcatcatcggcgggggcgtcatcggcgtggagttcgccacgttttacagcgatctggggtgcagcgtcaccctgctggagggcatggaccggctgctgcccaatatggatcgggagctgggtcagaatctggcgctgatcctgaaaaagcaaggggtgcaggtctgtacccgctccatggtggatcgtctggagcagacgccggagggcatcgccgtccactacaccgccaaggagacccccggctgcgccgtgggggaggcggtgctgtgcgccatcggccgcagggccttccgggatggactgtttgcccaggggctgacgccggagaccaatggtcacggtctgtgggtggatgaacactaccagaccagcatccccggcgtgtacgccatcggggatgtgtcctccccggtgcagctggcccatgtggcggcagcacagggggcagcctgcgtggagcacatggcggggctgtccgccggggtgtgcatggacgccgtacccagctgcatctactgtcggccggagatcgccgccgtgggactgacagaggcggaggccaaggagcggggcatccccgtcaagaccggcaagtgcgtcatgggcggcaacgcccggaccgtgatcgcagaccccggccggtgcttcatgaaggtcacggcccacgccgagaccggggccattttgggggcgcagctgatgtgtcccaacgccagcgacatcatcgggcagctggggcaggccattgccaacggcatgacaccggggcagctgctggccgccatgcggccccaccccacctatgaggaggccctcagcgaggcgctggagagtctggcgggcaagctgtagggcagaatttacggaaaaccgcagcgggagcgtaactcccgctgcggttttctccgttttcgttgacgaagggccggggcttgcgtataatagaagtcgaaatttgtcacaacgcagcgaaaggagcggctgagatgggcattgtggttctgggtgccgtatttgtggatgtgaaagggtatcccctgagcacctatatccccggcgggcgcaacgtgggacgggtggagcaggttcccggcggcgtatcccgcaacgtggtggaggacatcgccaatgtggagctgcggcccaccttcgtcagtctggtggacgacaccggcatgggggaggatgtggtgcggcagctacggaaccacaaggtgaacaccgactacatcctccggaccccggacggcatgggggcgtggctggcggtattcgacaaccacggagacgtgtgcgcctccatctccaagcggccggatctgcggccgctggcggcactgctggacgagaagggtgacgagatcttccgggacgccgacagcatcgctttggagatcgacatggacaaggaactggtcaagcgggtgttcgcctacgcccggaagtacggtaaggcggtatacgccgtggtgtccaacatgagcatcgccgtggagcgccgggactttttacagcagaccagctgcttcgtgtgcaatttgcaggaggcgggcatcctgttctccgacgattacagtgaaaagaccccggcggagatggaggagctcctgcggctgaaggtccgcagcgcccgcatcccccggatgatcgtcaccatgggcgagcagggagccgtgtacgccgagatggacggcgagagcggcatctgccccgccacccgggtggaggtgcaggacaccaccggggccggggacgcctttttcgccggggccaccatcggcctcacctacggcaagacgctgggtcagtcctgcgccatcggcagccggttggcagcctccgtcatctgcaccagcagcaacgtctgcccccggttcctgccggaggagttcgagttggacgtcgccgtgacggagtgaggtgcagggaatgaaaaagcttcgggaatgtgaaaacgataccctgctggtggcgctgctgctggcgggcatcctcatggtgatgggggcctaccgcattttctcctatctctgcgaaaatgcccgaatggataccgtcaccttcctgctgggcggagcctgcgccctgctggcggtgggcgggttcctgctggcacgggccagcttccggcggctgaaggagctgcacctggggcagtaggcatctctttcggcggcagtcttgtctgattccttgtcaagtgaacagagatatgatatagtgtgtggagggcatgaagccctatgagaaagagaacaacgacggagaaaggaagcaacctatgaaaaaagtgatttccctgatgctggcgctggtgctggcgctgagccttaccgcctgcggtggcaagaccggcccggagggcgtggtgggccagttctgcaagggattgcaggagctggacgagaaggccattgcccagtgctttgaaaacggcgacgatctggagctgtcggagctggaggacgtggacagcgacgacgccgtggcccagaagatcatggacttcatgaagtcctgcgccgggcggctgaagtatcaggtgggcgaggccaccgtggacggcgataccgccacggtaccggtggagttcacctatgtcaatgccgggagcctgatgacggagatcctgacggagtacatctcccaggcgtggtctctggctctgagcggtgccgacgatgagaagctggctgccgccttcgaggaggtctttgatgaaaagaccacgggggccgacttccccaccctgacggcgacgctgaccatcccctgtgtccagacgtcggacggctggaagatctcctccagcgccgacaacagcgaggatctgtcggcccagctgttggacatcctcaccagcaacatctatggggcgctggaggacttcggcgccggtttgctggggtaaattctctttcatacgagcggcaaaggaccgggtgcttcaagcacccggtcctttgccaatggtggagaaaagagtaaggaagaaaacgaaagcaatgttaacagacaccctgcgccagcatggcgtccgccaccttgcggaatccagcgatattggcaccgtccaacaggttgccggggacgccgtattccacggaggcgtcgtagatgttgtggaagatgtccagcatgatctgatgcaggcgctggtctacctcgtcgaaggtccatgccaggcgcatactgttctggcacatctccagaccgctgacggccacgccgccggcgttggcggccttggcgggggcgaacaggacgccgccctcccgcagcacctcgatggcggcaggggtgctgggcatattggccccctccgccagcgccatggcaccgccgcggacgatgcgccgggccgtctcggcgtcgatctcattctgggtggcgcagggcagggccacgtcgcaggggacggaccacagatcccggaagtcgctgcggaactcgctgccggggaccaactgggcatactcccggatgcggccacggcggcggagcttgatgtccttcaccacgtccagccggatgccctccgggtcgtagatgcagccgttggagtcactcatggtgatgaccctggcccccagctcctgcgccttctggcaggcaaagatggccacgttgccgctgccggaaatggccactcgcttgccctgcaggctctcctgcttcatgcagtgcagcatctcctccgtcaggtagcacaggccgtagccggtggcctcgttgcgggtcagggagccgccgaaggacaggcccttgccggtaaggacgcctccgtcgaagctgtcacggatgcgcttatactggccgaacaggtagccgatctcccggccgcccacgccgatgtccccggcggggacgtccacgaactggccgatgtgccgctgaagctccgtcatgaagctctggcagaagcgcatgacctcccggtcgctcttgcccttggggtcgaagtcggagccgcccttgccgccgcccataggaaggccggtgaggctgttcttcaagatctgctcaaagcccagaaatttcaggatggacaggttcaccgacggatggaacctcaggccccccttgtaggggccgatggcggagttgaactgcacccggtagccccggttcacccgaatgcggccggtatcatccatccacgggacacggaaggccaccacccgctccggctccacgaaccgctccagcagggcggcctcccggtactccgggtggctgtcgatcatcaggtccaggctctccagcacctcccgcacggcctgatggaactccttctgttcgggatcccgtgctgccaggtcactgtaaacctgctgcaaataaatgcttttcaacatgacattcgcccctttcctcggcggttttaatatgtccataaggatacgaggaaatgcgggaatgtgcaatgtcaaaattccatgaaatccgccacccggagcagcatggtttcgtatttttctccaaacggcgtgcatttgtccttgcattgtgtacacttcttcggtttttgtgtcgttcgcacaaagaacgtgagaaattttgtgcatcgtgtacaaggttttgcgtccatccgacgccgttggcttccgggaggtaggctggcagcgctgcacgggcgaaatctcggatgcggatgtgtcacgctaccggttcttcccggaaaaacggcggcgaccattgacgctgccttgtaggcagccgttttcccggcatggcgcagtctgtgggtgaagaaacagctttacagtcggaggggactatgatataaagaagtcagagacaaggccacgaaacaggcagcgctgcggcatcgcagaaagcctgcctgtcaggaaggagaatcagcacatgaaattccagatcgtagatgcatttacccggcagaccttcggcggcaaccccgcaggtgtcgttctgctgccggagggggcagagttccccgcagatgagactatgcggaaaacggcggcggagctgcgctactccgagacggccttcatcaagcccctgggcgggaaccgcttccatatccgctacttcacccccgctgcggaggtggagctgtgcggccacgccaccatcggcagcttccacgctctgcaggagatgggactggtagccgagggcggcacctacatcgatgagacgctctccggtacgctggaggtggtggtgggcaaggacgccatcctcatggacatggccaagccccagaccttccagcggctggagacgccggaggagctggaggagctgtaccgcatcatgggtctctccgccgacggacagggcgccgtgaccgggaagccggagctgatgcttctgccccagaaggtgtccaccggtttgacggacatcatgatgcccgtggccgatgaggcggaactggagaagatcgcaccggacttcccggctctgacggagcactcccgcaggtataacgtggtgggcgtccacgccttcaccgtcaacaccgccgacggcatgatccatgcccggaacttcgctcccctgtatgacatcgatgaggaggccgccaccggcacctccaacggggcgctggtctactatctgtaccggcacgggctggtggagctggacaaggtgtacactgtggtgcagggcgagaagatggggcggccctccatgatctccgctcaggtcatcctgaaggacagccagcccttcgtcaaggtgggcggcccggccgtgacgctggttcggggggagatcgagctgtaaaggcgaagctatgcgataaagaaggcgcaggctgggctgaactgcccccccatttgttggacagtatgggatactgttaaggttggcagtaccagatgaaggcttaccagcggatgctgaaagaaaaaggcactacacaaggtatgtctcgtaaagcgacctgcttggatcatgctgtcgccgaacatttctttgggctgcttaaaacggaattgttctatttagaaaagctcgattccattgaccaactcgaaaaggccattgttgcgtatatcggttactaccataaccacagaatcaaatgaaagctaaacggcctgagtcctgtgcagtacaggattcagaccgtttagttttaattcttgtatttgtctgacttttgggggtcacttccgtgggggtgcggctcttttatcgatcgctgcaggcggtcgcaagagtcgcccctacgggtggtttgcggcagcttcatacaataaggtggccttacagctccgggccgaaggggtccgtggggcggaaggtatcgtcgggctgctcaggacgggcctgccagccgatgcccttgatgcgcttgatctcctgaaaatagccgatgttggtctggatgatatagggagcgatccagatggagaggatgcccagcgtcaggctgcacaggaggttccagccgatgaaggtcaggtccagcaggaacaggtcgcccttatacccggcggtctgtgccttgctcatgctgatggcctccatgacgcctatatcggggttctcgcacaggttatagacggcaaaacggtagcggtagccggcgatgataccggggatgataaacagcatggaccacaggaaaacatagagggtgatgacgatattcagcaggatcagcttgccgatgaagccgaagccgtcgaagagggtggcgtaaggcatctcctcgccccggcgcacgcccagatggtacagcacccagccgccctgcagcagtacccgcagcagccagcacaccaccgccaccagcgtcaccaccgtggcgggcagagccaccgggtagagataagaggggatggggacgttggggaaatacgtctgcatatagagcgccacgtcgccgttgacgtagacgctggccccctgcagcagctccgtcagggccagatagagcaaagcgaacaaataggcagagacggcggcggtgcggacaacgcccttggcctcctgcttcagctcaatacggttcatcatgtgttttgtgtcctttctctctgcggtctgtgccgcaggatatctatataggtgtttattttatcatatagccttcccatttggcaagaggcgcatccgaactgcgccggtgggataaaatggatatttcggaaaaacgtggacaaacacggacaaacgtgcgtgaaaggcggagttcccagtctccagtattcaaaaagtgacaaaaatgagagcttaggtcttgccaacggggcaattttgttgtagactaatgtgcagtatgtggtggcgtagccaccaaggagtaagatgaggtgaaagacaatggcacaagctttctttggcggcgttcatcccaatgacatgaaggccgcaaccaatgaaaaggccatcgaacagctggaagccccggctgaggtggtcattcccatgtctatgcacatcggtgcgccttgcaagcctatcgttgcggtgggcgacaaggtgaccatcggtcagaagatcggtgaacccggcggtttcgtgtccgctcccattcatgcgagcgtgtccggtaccgtaaaggccgtggagccccgccccttctctatgggcggcaccatgatgtctgtggtgatcgagaacgattttcagaacaccgtgtgcccggacattcatcccgtggaggatcccgacagcctgactcccgagcagctggtggagatcgtcaagaacgccggtatcgtgggtcagggcggtgcgaccttccccacccatgtgaagatcagctccggtctcggcaaggtggactatgtgatcatcaacgccgccgagtgcgagccctacatcaccggcgaccaccgcaccatgctggagcgtccggagcaggtggtcaagggcgctacgctgctggccaagtgcttcggcgtggagcacgtgtacatcggcatcgaggccaacaagcagaatgcggccgacgtgctcaacaagaccatcgctgagctgaacgctcccgtggtggtggaggtcctgcacacccggtatccccagggcgctgagaagcagctgtgtcaggctgtctccggccgtcaggtcccctccggcaagctgcccgccgacgcaggctgctgcatcttcaacctgaacaccacctgcgccatctaccgcgcggtgtataccggtatgcccgtggtgaacaagatcgtcaccgtgtccggctccggcgtcatcgagcccaagaacatcgagtgccccatcggcacccccatctccaagctgttcgacgcctgcggcggcctgcgggaggatacctacaagctgatcatgggcggccccatgatgggtctggcccagtacaatgtggatgtcaccgtgggtaagggcaccggcgccatgctggcctttgccggcaaggaggagcagtacgaggagcatccccagtgcatccgctgcggcaagtgcgtgggcgtttgccccatgcgtctggagcctgtgttcatgtacaagtacctgatgaagggcgatgtggacacttggcagaacaccctccacggcatggactgcatcgagtgcggcgcctgcacctatatctgtcctgcccgtctgcctctgatccatgccttccgcatgggcaagcagaaggtcaataatgcgagaatggccgccaaggccaaggcggaggccgagaaggccgctgccgagaagaaggaggcgtaagcaatgacggattacaaaaatttgaagctgatcgcatcctcctctccccatatccgctccaaggataacacccggagcatcatgctggatgtcatcatcgccctgctgcccgctctggtcatgagcatctatgtgttcggcgtgcgggccctcaccatggtgctggtgtccgtggccgcttgcgtgttctgggagtgggcctatcgcaagctcctgaagaagccccagtccatcggtgatctgtccgctgtggtcaccggtatcctgctggcctttgtctgcccccccaccacaccggtgtggatgctgatcatcggcggcttcttctccatcgtggtggtcaagcagctctacggcggcatcggctgcaacttcgtcaaccccgctctggtgggccgtgccatgctgctggccagctatgccagcgccatgacccattgggtgggcttcggctccaagctgcctctggtgggctccaccgccgacgtggtgaccagctccacccccatggctgtgatgaagggcatcttctccgccgagacggctgaggatgcactggcggcggtcaatgacctgacctccaccttctccatcagcgatatgttcatcggccgcatcggcggctctctgggtgagacctctgctctggccctgctgctgggctttgtgtatctgctgctgcgtagggtcatcaactggcagatccccgtgtgctacatcggcaccgtggcggtgctgaccctgatctccgctcccgccggtatgagcgctgtggacttcatgctctacaacgtctttggcggcggcctgatgctgggcgccatctttatggccaccgactatgccacctcccctgtgaccaagctggggcaggccatcttcggcgtgggctgcggccttatcacctgcttcatccgccggttcggctcctatcccgagggtgtgtgctactccatcctcattatgaactgcaccacctggctgctggataagtacatccggcccaccatctacggtgccatcaagaaagacaagaaggaggcggctgcaaaatgaagatctccggtaagtttattctgaaggtcgccggtacgctgaccatcatctctctggtggtggctctgctgctgggtctggtcaacggcgtcaccgccgacaagatcgccgccatgaacgccgccgctactcagacggctctggaggccgtcaccgaggccggcagtacatacgacgagatcacctccattcctcaggaggtcatggacgccgccaaggaaatgggcggtacgctggaggagatgtacacggtcaccttcgacggccagcctgccggctacgctgtgaagctgacggccagcggctctcagggcctcatcgagatggtcatcggtgtagatgccgagcagaagatcaccggtatctccgtggtgagtcactccgagacctccggtatcggcaccaaggtgtgcggcaatatgcccaatgacgacggtgtacccgttctggaccagttcgttggcatgagcggcgcaggcactctgaaggtgggcaaaaccgtcaccgccatctccggcgccaccgtttccaccaagggcgtgaccaagggcgccaacgcagcgctggccgctgtggccgctctgggttaagagaggaggagctgagatatgaatttcggtaagcaattcaaagagggtctgatcactcagaaccccgttctggtacagctgctgggtatgtgctccaccatggccatcaccacctcgttcttcaacggtctgggtatgggcgtgtcggtgctcatcatcctgacgctgtccaatgtctttatttccatgctgcgcaagatcatccccaatgaggtgcgtatcgcctgcttcatcgtggtcatcgccggcttcgtgacctgcgtggatctgctgctgaaggcctttgtgccggcgctgtcctcctctctgggtgtgttcatccccctgatcgtggtgaactgcatcatcctgggccgtgccgaggcgtttgcctccaagaaccccgtaggtgcctccgccgtggacggcatctgccagggcatcggctacacgctggtactgatctgtatgtgcgtggtgcgtgagctgctgggcagcggtaagttcggtggcggcctgctgggcggcggcggactgggcagcgcccccggcatcaccatcttccccgaggagttcggcatcaagatcctgaccatgcccgtgggcggcttcctgacgctgggcgccctcattgctctgatgcagtgggccatggccaagagcaacgcaaaaaaggaaaaggaggccaagtaagctatgaaagtgactgaactgttggccatcgcccttggcgctatcctgaccaataactttattttctcccagttcttgggcatctgcccctttatgggcgtgtccaagaagatcgacaccgctgtcggtatgggcgcagccgtgaccttcgtgatgggtctggcctccgccctgtgctaccccgtcaataagctgctggacaatctggggcttggcttcatgcagaccgtggccttcattctggtcatcgccggtctggtgcagttcgtggagatgttcctgaagaagaacatccccaccctgtacgccgctctgggcgtgtacctgcccctgatcactaccaactgcgccgttctgggcgtggctctgctgaacactcagaacagctacaacttcgtcgcttccgtgatctatggcatcaccggcggtctgggcttcctgctggctatcttcctgtttgcggctgtccgtgagcagctggatgtctccagcgagtgccccaaggccttcgagggcttccccatcgcactggtcaccgccggtctgatggcgctggccttcatgggcttcagcggcctgcaggtctggtaaggaggtagaaaatcatggattttacaacgatcatctgggcggtcgtggttctgggcgctctggccatcgtgtttggcctgatcctggctgtcgccgccaaggtttttgaggtggaggtagacccccgcctgccggagatccaggcctgtctggccggcgctaactgcggcggctgcggctatcccggctgcgccggctgcgccgaggccattctggccggcaaggctcccgtcaccgcctgcgctcccgcaggcgccgagggcgctgccaaaatcgctgccatcatgggcatggaggctccctccggcgagaagatggtggctcacgtgctctgcaacggcggcaccaacgccgtgaagaacttcgagtaccggggcgtgcaggactgtctggccgccaccaaggtctgcggcggcgacgctctggcctgcaagtacggctgtctgggcttcggctcctgcgtggccgcctgcaagtttgatgcgctccacatcggtcccaacggcgctgccgtggtggataaggagaagtgtaccaactgcggcgcctgccgtgaggcctgtccccggaagctcattgtggaggtcccctattccaagaaggtattcgtcaactgctccaacaaggataagggtcccgccgtcaccaaggtctgcgccaactcctgcatcggctgcggtatgtgccagcgcacctgtaagttcgacgctatccacgtggtaaacaacgtggccgtcatcgactacaccaagtgcaagggctgcaccatgtgcgccaaggcctgcccccgcaacgccattgagcccatccccactcccgaggagaaggagaagttcaaggctgcgcagaaggccgctgccgagaagaaggctgctgccgccaaggccgccgctgaaaaggctgccgccgagaaggccgctgccccccaggcggagtaaggcctccctattgattgaaaagagccgtcacgcatagcgtgacggctctttttactgccgggagcgcctgctgcaatagcatgagggccgccggtgggcagccctcatgcttctccggcgaggggcaactgctgcccttagcttgccttttgggcgaaggagttatccaccagacggtcgaagtccacccattcctcctgcttcagttgtccggcggtggtcatcaccgtctccagccgctccagcgccgcctgctccatcaccggcgtcaggttccatgcatcgatctcccggtgccgggcgcagacccgttccagaaccgccaaatccgtatccgggaactgtccgcagatggcctccgccacctcccggtccgtatgctccgccacccagcgctgagcacgggcgatggcgttggtgaagcgctgcaccgtgccggcgttggccgtcaggtagctgcggttggcgaaataggcggtgtaggggatctcgccgctctcctgaccgatggagcagaggatgtatcccttgcccgcctgctccacctctgtggcggtgggctcgaacagcgtcacataatccccaccgccgccggtgaaggcaccggccatcatgttgaactgcaccgaggtgtccacggtcacgtcctcaccgggggtcagtccgtgctggcgcaggacgtactccagcgtcatctccggcacgcccccggcccggccgccgatgatggtgctgccccgcaggtcctcccagcggaaggggccgtcgctgcggcccaccagaaacgagccgtcccgccgggtcagctgggcgaagatcaccggaggatcctccttgccctgctgggccacgtagatgctggcctccggccccgccagccctatgtccgcctgaccggacaccacggcggtcatgaccttgtcggcgccgccgccgttgctcagctccaccgtcaggccctcatcagcgaagaacccctgactgatggccacatactgcggcgcatagaatacggagtgggtgacttcgctgagccgcaccgcagtggtctcctgcggttgggagcagcccgccatcgccggaagcaccatacacaccgccagcaggcaggcaaataccttcttcatgactgtaccccccaagttcgattcaatattttctccacccgcagcaccagctggtacatcaccaccgccgccagcgccaggatcagcacgctggtcatcaccagatccatgttgaacacctgcgacccgtagacgatgagatagcccagccctgcacgggaaacgagaaactcgcccataatgacgcccacccacgacagacccacatttaccttcagggtgttgaagagggtagggcagttggcgggaaacaccagcagccacagcatctggctccgcctggcccccagagagcgcatgagccgcagcttctccgggtctgtggtcataaaaccctgatacatggtcaggatggtgacgatcagggagatggccagcgtcatgacgatgatggcccccatcccggcccccatccacacgataaagatcggccccagcgccgttttcggcagggcgttcagcaccaccagataggggtccagcacacgggccagcttctcccaccaccacatggccacggcgatggcggttcccagcagcgttccggcggtgaagcccaccaccgtctccaggcatgaggtgccgatgtgccgccacagatccccgctgtgccacaggctttgcagggtaccggccatgcggctggggctgctggtgaggaagccgtcgctgaggcccagccgggtggtaagctcccacagggcgaacagacccgccagcaggcacacctgccacagccggatcgaccgctttctccggcggtagtcccgcagatattgcagccgccggggcgaaggagcgctatccttcatgcacttccagctccttccagatggacttgaaatacccggcgaaggccgggtgatcccgccgctgcaagggcggcaccccctgcagctgggtcagccggtggatgctcttcaccaccgccgggcggtgactcagcaccaccacccggtccgacaggctgatggcctcggagatatcatgggtcaccagcagcgccgtcttgccctcctgccgtatgatgcggtagatatccgccgatacggccagccttgtctgatagtccagcgccgaaaagggctcatccagcagcagcaccttgggctgagccgccagcgtccggatcagggcgcaccgctggcgcatcccgccggagagctgggagggccgcttctgagcgaagtccgccagcccgtagcgctccagcagctcccggacatgggcctgccgctgcggcgtattctcgccccgtaccgtcaggcccagcgtcacgttgccccagatgctgcgccactcgaacagctggtcccgctggggcatgaaccccaccttccgggaggggccgcacaccggttcgcccttcagctccacccagccgccggtgagaggctccagccccgccagcgccgacagcagggtggattttccgcagccggagggacccacgatgctgcaaaattccccctcctgcacatcgaaggagacatcccgcagcgcctctacctccccgtccggggactggtacacaaaggcggcgtgcaggatctgtatcatcatatccgtcctcccttgccattgggcattgcgcccggatcggagaatgtctctccgcccttatcctatgcccccgatgcggggcgggtcacaggaaaagtaccgctctgccggtgggctttccggcggcgatggcttgccaacatggaagcatctgaaaaaattgacggagattttacgtttcttataaaaaattaaaaattaaattggaggtttcgtgtattgcaattggtcgaaagccggattatcataagaatgtaaacagaaagaagaacacagcaaggacagacggtgaagcacatggcactgaaaaagaatctggatgtgaccatccacgaagcatttctggaagagatcctgcaaggcaactggaagccggggcaggcgctgaatctggacgatctggcggagcgctacggcgtcagccggacccccatccagcaggccctgaagcggatgcatacccagggcatggtggttttttccagcaagggacacttctccgtgcccaccttcagtgagaaggaggtctgcgatatcatcgagatgcggttgctgctggagcatcaggcgctgacggatatccagaacaagctcctgcccatggacttcgagacgctggagcgtctggcgggggagtgtgtagcctccaacaagacgtccaacatcgtccggacccggcgcaccgatctggatttccaccggatactggtggaacaggccgggaaccgctgtctcagcgaggtctatgaccgcattcagggccagttcatcgtggccaactaccttcttaccagccacacccgctcccagcagcaggtagcctccgacgaccatgagcggctgctggcagccctgaaggccggaaacttcacccgagcccacgacatcattgaggaccacattcagggcgcctgccagaaaattctggcgaaaatgaacgcataagcaaaacgatatcccttccccatcatgggcggccgccgggccgccagccgtacccaaccgctattgggacaacctgatgatctgacccgagggatatcgttttttcttaccgcataaaaaattaaaaattaaaaattttgtatacccgcctgcggtgcaggcttgaagaaatcgtcaccaattcaaaacgggaaaggaagaacatcatgaaagtgaaagaaaccgccaagaagccctatggtatttgtccggcgtccatgaccatctggaacgctgaccagacctacaacaagaagggcatcctcggctcctatgccctgcggaacaatatgttcgacgtgggcgctatgctgctgatcgccgtgatcggctatttcttcctgaagctggagatccccattgcgcccatcgtgctggcgctgattctggggccgctggcagagagcaatctgcgccggtccctgctgctgagtcagggcagcgcctccatcttcttcacccggcccatctgcatcttcttcctgctgctggcggtgctgtccctgtgctggccgctgctgcggaaggcactgagcaaccggaaaaaggcggcgtaaggaggggcggtatggcgcacattctcagctatggatcgctgaatctggatcttgtatatcaggtcccccacttcgttcaagcgggggagaccctgagctccaccagccgcaccgtccactgcggcggcaaggggctgaaccagtccatcgccgccgcacgggccgggggaacggtcagccacgccggaaagatcggcggagacggcaccgtcctgacggatatcctgcgggagagcggggtggacacggactttgtgaccgtaggcgacggccccagcggccacgccgtcattcaggtggacccctccgggcagaactgtatcctgctcttcggcggctgcaatcaggagatcacccatgaggagatcgaccgggcgctggcgcacttccagaccggagactatctcattctgcaaaatgagatcaacggcctggactatctcatgacgcaggccgcccggcaggggctgcggatcgtgttcaatccctcccccaccgacgagtccatcttccggctaccgttgggggaggcatggctgttgatcttcaacgagatcgagggtgccgctctgtcgggctgcgatgacgaggaggacatcctgaacactctgcggcagaggtggccccgctgccggctgctgctgacgctgggcagtcacggctgcgtgtacgacgacggccagcgccgcctgcggcagggcatctatcaggcggagacggtggacaccaccgccgccggagataccttcaccggttacttcgtggcctgtatggcggcggggcgtccggaggaggagtgtctggatctggcatcccgtgcggcggccatcgccgtgtcacgacccggcgccgctccgtctatccccaccatggacgaggtgcagcgctgcaccctccggcgaggggagtagatcgcatacggtaaacggccccggagagatctccggggccgtgcgttttgctgagggggagtatcgggcttttgccgccgacagcctgcttttccccacaatacaaggagaggaggtgtctccataggaaatacctcctctctttgtgctgaagccgcaaccctcacagggcggcggcgccaatgatgcccgcctcgttgcccagcttcgcagcggcgatggtggggatggccccttctcgctgaccgaaacagtgggtggccacatactcccggataggggccagcagggcctccccctgacggctgatgccaccccccagcaggatcatctccggggccagaatgttcacgaagtctgtcagccccgccgccacgtacacggcgtactgcgccaccaccgccttagcggcggcgtccccctgcccggcggcatcgaaggcggtgcgcccggtgatctcctccacctgagccagcagtgactccggatgcgccagcgccgcctgacgggtctggcggatcagggccgtagcggaggcgtaggcctcccagcagccccggcggccgcaggtgcagggctcaccgtccagcaccagcagcatatgccccgcttccccggcgccgccccgcagaccggagagaatttttccacgggagatgatgccgctgcccacgccggttcccagcgtaatgagcaccatatcctgacagcccacggcagcaccggccaccacctccgccagagcggcgcagttggcatcgttgcccagccgaacggggatgccgaaccgctggtgcagcatccggcacaccggtacgtcgaaccagttgaggttataggcccgcttcaccacccccgtctgggggtcgcaggcaccgggggagccaacgcccatagaggcgcagtccaccgccgtgagccccgcctgccgcagagcctcctccacggcgtcgcccatgtcccggatgacctcctccgccgggcgctccgccccggtggggacgctgcggcgggccacgatctcatagcggtcgttcaccacgcctacggcgatgttggtgccgcccagatcaataccgatgcgatacatgaaaacgctcctctccgaaaacgggagcggtcagccgctcccgttggtctgttttttcgacagcttacttattccggcgatagccgtcctgcaaatgggtcacgaaagagctgttgacactgacggtgcgccccgtctccgaggacttgatgcagccgaaaatggtccgcatggtggtcagtgcctcccgcccggagacctccggctcccggtcgtgctccagtgcgtcgatgaactcgtcgatgacgccggagcgggtctggtgctcgaactgataggcggtgatggtgttgttcagatcccgcacctcgatgggggcggtgagactgttgtagatccgcatgacgccacgggtgccgaacaggcaggtggagttgctctcctgaccgtataccgtccaactggcggccatggtgccggcagagccgccgttcatccgcaggatgcacagggcgttgtcgtccacgccgatgaggtgatcctcccggtcgtgcttgttgagggtcaggatcttggcggtggtttcgataaccgtctgccccgtcagatactgcatcagatcgatcttgtggatacccagatccgacagagcgcccataacggcctttttcttgtcgaagaaccagttgccctccatggaccagccctccggcccggaggttccaagccccgtacggaaggtgatgacgtcaccgatgaccccctgctccagcagttccttggcccggcgatgcaccggatcgaagcgcatattgtggccgatcatcagatgccggttgttgaactccgccgccgccaccatggactcgcactccgccagcgttacggccatgggcttctcacacagcacgtgcttcccggcgtagagagccgccgtggtcatctctgcatggctgcggttctccacacacacggatacggcgtcgatctccgggtccttcagcagatcgaagtaggagtcgtagacctttccgccgtattgggcggccacctcgtgagcccgctggctgttcttgtcatagtaggccaccagctgtgcgttggggttggtggcatattccggcagatggcgcacctgggcgatcttgccgcagccgatgacagcaactcgtatcataccgttcgctcctttcgcaaaacgcctgttgtcgcccctattatagcaaatctgcctgcgggatggaatcccctttttatagaaaatttcaccccggatgcagaccgtcccgctgtctgctttcagccgccgcatggcccgcaggttctcagtgcgggactcggctctcctcggcaaaaagtctcttttcccgaaataagtttccaggtttacgcataaaataacagcctgcaacctccgcaaatggcttatctactgggttttgcacagtttccacagacttttccacctcgttatgtcaacacaaaaaccctccaaaaagagtggaaattgtcgatgcagcggtagccctccggcggagtggttttgggaggttattttgcgtcttcccgacacggcggtgagggccgaataagcgaaaaaaacaccacccttcgggtggtgtttttggagcgggcgacgaggctcgaactcgcttcccggcatcccacgaatggctgtcgccattcgcaggagccctgcctcacctcagatcaaacgtgcttcgcacaggtcgaggcagcgacttccagcctgcccgctgtctcattccaaaagagaaaatcccatcctgacggatgggattttctcttttggagcgggcgacgaggctcgaactcgctacctcgaccttggcaaggtcgcgctctaccagatgagctacgcccgcaaacgcaagattgattatacctgcgtttttcggatttgtcaagcgctaatttgcattttttgtattttgttctgcaccctctgcgctccctgcgccactcagcagcacctcaatgatgccggcgttccccgaatccgggtagaaattcaccgtccacggctccttgctttccggctccacctcggcctgtatctgcgtcacctgtgtgcggacctcctccgcctgatggtcgaagtagcccacctgcaccaccagctccgcagcgtggttccgtgcggcctcccgcagcagatcccccagagcggaggtgctggtgatatgcacaatgcccgccacctgagccgccgtgcggcgatagccgacggtcagctggatggcgtcatagttccgaggtgtctcgtccaccgtataggtcaggtactccacggcgtaggctcccagcggcgtctccttctgcacctccagacacgcccgctccgccgcctgcggggcgggaagcccgctgtcgtcggggtagagccagatggttccctccttggccccgccgctgatcagcaccagcagggcattcaccagatcctgatagctctccgcccggaggacggatcggtcctcgctctcgtagtagctggagctgtggggctcggtgacgctgtaatcccggttcagcagggagccgcagccggtaaggagcagcatcagtagggccgccgccagcgcccatacacgttttctcatggccgcaccttacagtccgcccggcgcatatacgccgaagccctcgcccagtatctcgtgggcgtcgcagacgatgacaaaggcgtctgggtcgatctcctgcaccgcccgcttcacggggatgatctgtgtccgggcgcaggcgcacaggatcacctgcttgtccttgccgctgtaagcccccttaccctgcaaaagcgtcacaccacggtccagctccagcaggcggcgggtcagctcctcatggcagtcgctgatgatataggccaccttggcggcattggggccgtagaccaccttgtcgatggacacggagatcagagacagggagatcatgccatacagcgcacgggtcagatcccggaagatcagggcgtacgtcaccgtcaccagaatgtcgatggcaagacacagggtaccgatgctgaggctctccagcttcagcttcagcagccgggccgccagctccgtaccgccggtggtggccccctcccgcagcatgatgccgcaggagacgccgatgatgacgccgccgtacagacaggccagaatgggctccataggcttgaaggtatgcaccgccgccagaccgtcgatcatcagagagctgacggccgtggcatagacggaggagaacaggaaatccttgccgatgaaccgccagcccagcacgaacagcggcacgttgaggataatgacgatggtgccgatgggcaggcccggcagcaggtagttgatgatctgccccagaccggtgaagccgcccacgctgatgtggttggggtcaaacatccagttgaaccccacggcatacagggcgcaggacgccgtgatgatgagatactgcgtcaggacgttccgtttcataggctcctccttttttcttacagcagggtcagctgctcctcgccccggtcctccggccgcaggagagcgccggtaccggggatgctgcgggcccgatagcgggggagattcacgataccggactcctccggcgtgcagactcgctgcagctggtatttgggcttcagggtcatgaccgccacgccctgtgtggagcgggtggccttgggcagcagcagggacgtgtggaagatcagcgctctgggctccgtggacagcagcgtcagctcccgatcctccgccagcggcagaatggccaccagcctgctcttgtcggagtaggccccggtgagcttgcggcggttggaaacggtggcgtaggccttcatctccacacgggcagccttgccgttttcaaagaagaacagcagatgcccgctgtaatcccccggcagcaccatatagaccacgctctcgccctcgtccatgcccagcttcgccggcagatagtctcccagcaccgaggccttgctgtccccgaactcgctgaggcgggtcttgtagacctgacaccggtcggtaaagaacatgacctcggcggcattggtggcctccgcctgctggccggggccgtcgccctccttgtatttctgctcgccgctcatccgcagggactggggcgtgatcttcttgaaatatccctcacgggacaggaacacggtgacgggataatcctccacctgctcctcctcccgatactcctccacctcgtggctgtaaatgatctcggttttccggggctgggcgtacttcttgcgtacctgcgtcagctcctccaccatgatcttgcggatgcgggctggcttttgcagggtgtcttccagatcctcgatctccccttgcagtgtctccgtctcctgcacccgcttgaggatgtactccttgttgatgttgcggagcttgatctccgccacgtactccgcctgcttctcatcgatgccaaagccgatcatcaggttggggatgacctcggcctcctcctccgtctcccggatgatggcgatggccttgtcgatgtccagcaggatgcgcttcagacccagcagcagatgcagcttctccttcttgcgggagaggatgaagtacacccgccgcctcacgcactccgtgcgccatgcgatccactcctccagcagggccttgacccccagcacacggggcatcccggcgatgaggatgttgaagttgcagctgaaggtgtcctgcaaaggcgtcagcttatatagcttctgcatcagcttctccgggtccaccccccgcttgaggtcgatggtgagcttcaggccgctgaggtccgactcatcccgcatatcgctgatctccttgaccttgccggccttcaccagctccgccaccttgtccaggatcacctcgatggaggtggagtaggggatctcgaagatctcgatgagattctccttcttgtcgtagcgccagcgggcccgaaccttgacgccgccccggccggtgcggtaaatttccgccagctccgccgggtcgcacaccagctgtccgccggtgggaaaatccggcgccagcagggtggaggcgatgtcgtggtcgggatttttcagcagggcgatggtggtgtcgcacacctccgccagattgaagccgcagatctgggaggccatgcccacggcgatgccctgattggccgacaccagcacgttgggataggtggtgggcaacagggtaggctccttggtggtgttgtcatagttgtccacgaagtccacggcgtcacagtccagatcccggaacagctcggcacagatgggggccagctttgcctcggtatagcggctggcggcataggccatgtcacgggaatagaccttgccgaagttgcccttgctgtctacaaaggggtgcagcagcgactcgtttcccttggccagacgcaccatggtctcgtagatggcctgatccccgtgggggttgaggcgcatggtctggcccacgatgttggcggacttggtgcgcccgccggtgagcagccccatcttgtacatggtgtacagcagcttccggtgggagggcttgaagccgtcgatctccggaatggcccgggagacgatgacgctcatggcgtagggcatatagttctcgtccagtgtgcgggtgatgggctgctccaccaccgtcccccgcagccccagcacattgggatcggcgggacgatggacggttttctcttctgttttcttctttgccatgaaagatgattcctttcgtattcaaactggcgggagaaagatgaccccgccaaaaaacgcttgggaactggcgcagccgggccgacgcagatatcgtcccttacggagcgtctagcagcaggcgcatgtaggggccgatgcccacatcgtcccgcccggcccatacgctccctcagctcacgtcgatcatatccagatagcggcagccgttttcagcgatatagtccttccggccggagaggttgtcccccagcagcaggtcaaagacacgggccgtctcctcggcgtcgtccggcagtaccttcaccagcctccgggtctccggattcatggtggtcagccacatcatctccgggtcgttctcgcccagtcccttggagcgatccaccttgtacttcttgccctccagctggcgcaccacctccgccttctccttttcggagtaggcaaaccacgtcttttccttgcaggtgatctcgaacagcggcgtctcggcaatgtagacgtagccctccttgatgagggtggggcagagccggtagagcatggtgaggatcagggtacggatctggaagccgtccacgtcgccatcggtgcagatgaccaccttgctccagcggaggttgttcaaatcgaactgattcagctccttggcggcctttccctgcacctccacgccgcagcccagcaccttcatcagatccgtgatgacgtcgctcttaaaaatgcggggatagtccgccttcaggcagttgaggatcttgccccggacaggcatcagcccctgaaactctgcgtcacgggattgcttgcaggcgcccagagccgagtcgccctccacgatataaatttcccgccgggacacatccttggtacgacagtccacgaatttctgcacccggttggcgatgtcgatcttctccgtcagcttcttccgggtgttgagacgggtgcgctccgccgtctcccggctgcgcttattcaccagcacctgattggcgatcctctccgccgcctcccggttctcgatgaagtacacctgcagctgctcccgcaggaactccgacatggcgtcctgcacgaacttgttggtgatggccttcttggtctggttttcgtagctggtctgggtagagaagttgctgctcaccagcaccagacagtcctgcacatcggggaaggtgatcttgctctcccccttggtgtatttgttgttctccttgaggtacttgtcaatggcgtagacgaaggccagacgggtggccttatcggggctgccgccgtactccagaaagctggagttgtggtagtgctcgatgaggtggacccggttggagaagcaccatgcgatgttcagcttcaccttgtactccggcttgtccgcccggtcacggccccggcgctccgtctcccagcacaccggctccgtcaggggatcctcccctgccagctccgccagatagtcccggatgccgtgctcatagaggaaatcctccgtctcaaactttcccggcgctacctcgcaccgcaggcggaaggtgaccccggcgttgaccacggcctgccgccgcagcacctcccggtagtagtccgccgggatgtcgatgtcggtgaacacctccagatccggcagccagcggatggtggagccggtatggcggcgcttgagctccgtcacccgcatctccccggcgatctcgccccgttcaaagtgcaggcggtactccttgccgtcccggcagacagtgacgtccatatagcggctggcatactgggtggcacaggagcccagaccgttgagccccagcgagtactcgtagttgtcgctgttttcgttgtcgtacttgcctccggcgtacagctcgcagaacaccagctcccagttgtagcgtccctccttctcgttccagtccacgggacagccacggccctgatcctccacctgaatggagagatcggcaaagcgggtcacggtgatgagccggccatagcctgcacgggcctcgtcgatggcgttggagaggatctcgaacatggcgtgctcgcagccctccagcccgtcggagccgaagatgacgccgggccgcttgcggacccggtccgcccccttcagactggagatactgtcgttgtcataggttttcttcttggtcatatatgcctcctgccgggatagctcccggtatcgttccttgcaggcccacagaactttttcggtgggcaacagaaatattttatcgcatttttccctttctggcaagggtcagcgtcaccttttcccccaaagggcattttgccccctttcatgagaaagtcaacacagggcttgcattttgcggggaaagggtctaaacttattgtgtatgttctgcgtatcactcaggaggaaagaaccatgatccatatcaccgaggtcacgaccaaggcacagctgcgccagttcgtgaacttccccatcgacttatatagagacgttccccagtacatccccggtacatacagcgacgatctggcagactgggaccgtgagaaaaaccccgccttcagctactgcgaggcccgttgctggctggccagccgggatgacggcacgctggtgggccgcatcggtgccatcctcagccgtaagtccaacgacaagtggggtacccaccgcctgcgtttcacgcaggtggacttcatcgacgaccgggaggtatccgccgccctattccagacggtggaggactgggcccgtcagctgggctgcacggagatccacggccctctgggcttcaccgacatggaccgggaggggatgctggtggagggctttgaccgtaccagctgcttctttacctattataaccacccctactatattgaccacctgacggctctgggctacgtcaaggacgtggactggaccgagaatctcatctccgtccccacggaccagcggatcatccagcgctgggagaagatcgccgcctatgttctgaagcggcagcacctgcacatccatcaggtgcgcagccgtctggagtacccgcccctgatccggaaggtctttgagctggtgaacgtggcctatgcccccctgtacggcaccgtggagctgtcggacgaccagatccgcaagtacgccgggaagtttgcccccctcgtcaagcccgagctcacctgcttcgtcatggatgaaaatgacgatctggtggccttcggcgtggcggcccccagcatcgccgccgccctgaaaaagcacgacggccgcctgttccccaccggctgggcggatgtgctgaaggctttccaccgcaacgacaccatcgatctgctgctgatcgccgtgcgtcccgacctccagaaaaagggcgtcaacgccgtcatcatcagcaaggtcatgcacggctgcttcaagatcggcgtgaagcaggcggagaccggccccatgctggagaccaacgagaaggtccagacccagtggcaggacttcccactggagcagcacaagcgccgccgctgctttgtgaaggtgctgacccccgcaccgcaggagtctgtcgctgcagccaccgcccctgccggagcggcagagtaattgcttcctccaagcataacagcgctccaccgtcataaatgacggtggagcgctgtgcttttcagccttaatcgtcatccttgaccttctccttttcggatagctcgtcaaagggtaccagacagttgtggagcttccccagatcgttgcggctggccgggtccgtggagccgctgtaacagtagccctcggtccgcatataggcattccagcggcggtgttcgatgacacgcagcagctgcttttcctcctccgtccgctccgccggaggcttatctgcaccgggtacacccagccgcagcttcagccgatggtggatgaccgaggcgatggaggagcgatagttgaactcatagcgccagaacacatcctcgtctccccatttcaggtgccgggtcagcgcctctgcttccagccgggagtggaggatgttgctctcggagtacagcatatcccgtgcgcccagaaaatgaaggtcgtatggggtaccccggtagtcggtgacggaggtgagagccaccgtcttgaaggggtcctgcaccaccgccagaatatacgggtggagaccccggcgctggcacagctcccgcagccgcaccgccgcctcgatgttccgggtgtcgctgcccagcgccacaaacacatacgtcagctgcggcagcgtctgcaccagctccagaaattcccggctctccagccgcatcccggcgtggatgcggatatcgtactgggcctcgccggggatgcgctgtccgttgtgccggcggtccatcagctccggacagcgataggtgaacaactcccgtgcgttaggccgggcgtccacggcggtgagccgcaggtcgtagccgtccatctggccgaaccacgccagcgccttcagcatctccgtgccgtactggcccaagcccagcagcagcgccgagatctgatgcctgccctccggcagaggagccgccgtctcgaagagcttctccccctgctgatacagcagcagctgcaccagtgagcgcacctcgttgacccggcggatccgcatcccgcggggatcggcggactggaacagcagctcgctctcggcgccggtggcgaagagatagaggtgcatattggagcgggtcccccaccggcgggtcagcagcaccgcctgatggatgttctctgccttgtcccggcccatcaggaagaagtagaccgggcgggagcggtcagagcgccgcagccgcagcagggcgatgtctgccttgaagcaggcggcccccagccggtgggcggcagccatctgctccccgaactcctcgctctcgttttcgtagacgtccgtaaagacgataagccccttgggatgggccgccttgatgctgcccgccagatacagggagtcctcgttgagctcggaaaagacatacagctccgtgcagcggcggaaggcatagcgccacatggcggacagattcttgaaaaaggacagcaccacactgaaggtcagcagcgggctcaccagatacaccacaatggcagcgccgaaatagaggtcgctccacaccgccggctgggtcatggcgaactcatggataggatccagctcgccgtccagcacgaacatccgcagggtgtggtgtacggctcccagcagcgccttcagccacgacaggtgctccccggcgtaggcggcggcgtacatgggcaggtgcagcagaatgccgcagatgaaaaagcagaccagcagcaccttcagggtctcattgccgccggaggggcgggacctgcggtgcagggagcgcagcagcagccccagcgccgccagcagcagtgccagaacgcagcacaggaggatctgtggcatggcaggcagctcctttccgatcaaatcaatatcaggggtccatccccttgatggcatgagcgatatattgttattgtaccccgcctggggcaggtctgtcaatgcggaagggccgctgtttttgcccaccggggagacaaggccgttttcccttgcgccggggcggggattttgctataatgcagggagcaacaggccgctgcgggcggcaggggagggctgggatgttcaaacggatgtatctggagatcaccaacgtgtgcaatctgcggtgcgccttctgccccggcacccagcggccccggcggttcatgacgccggaggaattccggcagctggcgacccggctgcggccctacgggacgtatctcatgctccacgtcatgggggagccgctgctgcatccccaactggcggagctgctggatatcgccggggagctggactttcgggtgtgccttgtgaccaacggcacgctgcttccccggcagctgcccacactggaggcttccccggtcctgcacaagctcagcgtctccctccacagcttcgagggaaacggacggcaggatgccgcagccccgtatctggagggtgtctggcaggcggcgcagcggctcagccgccggggcgtcctgtgcgccctgcggctgtggaacggcggcggactggaccggcgcaacggagagatcctgtcctttctctcggaaaagctgggccgggacgtaacggccctgcctacggaccgtctgggcaaccggcggctgggggaggggctgtttctggagccgggggagcggtttgactggccggatccggcggcgccggacagcggcacggagttctgccacggcctgcggagtcagatcgccgtgctgtgcgacggcacggtggttccctgctgtctggacagcgaggggcggctggcactgggaaacctgcaccggcaggagctggcggagatactggcctccccacgggccacagccatggcgacgggcttttcccggcggcagccgtcggaggagctgtgccgccgctgcggctacgctgcacggttcagccgatgaggggcatcggacggatgataggagcgatatggaagaacagatactaaagcagctggcccaaccgctgctggcatggtatgatatccaccggcgcatcctgccgtggcgggaagaggtatccccctaccgaacatgggtgtcggagatcatgctccagcagacccgtgtggcggcggtgctgccgtattttcagcggttcatggaggccttccccacggtggggaccctggcccaggccgacacggagcggctcatgaagctgtgggaggggctgggctattacagccgggccagaaatctgcaaaaggcggcccgcatcctcacggagcagtacggcggccgcttcccggagacataccgggagctgacggcccttccgggcatcggagactatacggcgggggctatcctctccatcgccttcggacaggccgttccggcggtggacggcaacgtgctgcgtctggcggcacggatcaccggcagctgtctggatgtgctggatgccaaaaaccgcaaggccttccgcaactggatggcggcggccatgtctcaggagcggcccggcgcctacaatcaggcgctgatggatctgggggccacggtgtgcctgccgtcgggagcgcctctgtgcggggactgccccgccggggacttctgcatagcccggcaggagggctgtcaggcccggctgccggtgcgctcccccaagcgggagaagcggacggagcatctgacggtattcctgctgcggcggggagctgcggcggcgctgcggcagcgcccggatacgggactgctggcggggctgtgggagtacccccatgtaccgggtacgctgacggaggcggaagccgcccgccagctgcaaatgtggggggtaaaccccaccaagtggacaaaaaagctgtcagcccggcatatattcactcacgttcgctgggaaatgacgggctatgtggtggaggtgaacggccttggaccgggagactggctctgggcggaggcacagcagcgggagcggctggccatcccctccgccttcgagaaatttaccgcagagctgaaagagggagaatgacatggcacagctatacttcaaatacggggcgatgggctccagcaagaccgccaacgccctgatggcacggttcaactacgaggagcggggacaggccaccctgctggtgaagccccggctggatacacgggacggcgaccacatggtatcctcccgcatcggcctgacccacccctgcatctacttcgacgagatgcagcagatgacggatgagcagctgcagcagtatgcctgcatcatcgtggacgaggcccagttcctgcaaaaggccgatatctactatctggtgcatctggtggacgactgcaacatccccgtcatgtgctacggcctgcgggcggacttcaaaggggagctgttccccggcagctatcatctgctggtgatggcagacaagctggaggaggtcaagaccatctgctggtgcggcaagaaggccgccttcaacgcccgcttcgatcagcacggccatgtggtgaaggagggcgctcaggtggtgctgggagccaacgataagtacatcggcctctgccgccgccactggatggctggggatctggggccggacttcgacatcaaccgggtatgatctgtaacatctgtccccgtcggtgcggggcggagcgcaccgagacctacggcggcggcttctgccggatgcccgccgtgccggtcatcgcacgggccgggctgcacctgtgggaggagccggtgctctccggcacacgaggcagcggagcggtgttcttctccggctgctcgctgggctgcgtctactgccagaaccacaccatctccgccgagggggtgggcaaggccgtcaccacggagcggctgcgggagatcttccgtgagcttatcgctcagggcgcccacaacatcgacctcatcaccgccagccacttcgtccccttcctgctgccggcgctggatgagcctctgccggtgccggtggtgttcaactgcggcggctacgagcgggtggagacgctgcgtctgctggaagggaaagtgcagatctggctgccggacctgaaatacgggctggaggagccggcccggcgctattcccacgccccagactactttcccgtggccacggaggccatccgggagatgttccgtcaggtgggtccctgccgcatggaggatggcctgctgcggcagggggtggtcatccggcatctggtgctgccgggacagctggaaagcacccggcgggtcatcgactgggtggcccggaccttccgtccgggggaggtgctgttctccctcatgagccagtataccccccagcccggcgcagagggacccctgcgccgccatgtgacagcggcggagtaccgtgcggcggcggaatacatggaaaactgcggcatcgtggacggcttcgtgcaggagcgcacctccgcccgtgaggagtataccccggccttcgacctgaccggggtatagtgtcgtcgggtcgtatgaattgtttggtacatttagaatgacgaaaccggtgattttctgcaaatcaccggttttttcgtataaatagaatgtacttggtacaactttttgttgcaatttgcgtgggaatgtggtacggtagagacggaacaaaaagtgccgtcccggacggcaaaatcgaggacgtatgcaacataggaggtacctgtatgagctatcccaaaaccggccaggaggtctatgtcagcctgaatctctccaacaccatgctcaccggcatcggcaagggcaccatcacccgtgaggaggtctccgtggactatctgaagcggctgtttgccgagcatggcgtcatcgtctccgccaagccggagcagcaccgcctgctggagatcgtcaacgcgacctttgatcttggtctggagctgccggaggatctgaagctgttccagctgtcggagcagcaccgccgtctggtggtcatcaatgtgcagggtctgcgccgcaagggcggctccctgctgccggagtattccgaggaggagttcggagaggccaccttcacctttgtgaaatactatgtgcagagccgtcactatgacgagctggtggaggagaacaaaaagctgaagttcgagctggatcaggaggtcgagtggcgcaaccgcaccgacaactgatccgaacaggcagccaataaaggaagccggatatacggacaggagggccgcacccacagggcgcggccctcctgagcctgtcaaaagagcgggagcctttcgtcaacggggcggaagggtgtgtgcgggaaacccggaagggtgtcctgcacgatgatgatccccatttttcagagctttttgaagctctgaaaaatgcggtcagcgtggcgaaaagactttttcgccacgctgaggagggccgcacccatggggtgcgcccctctgtcccttattttgtcaaaacacgggttccggtgttctcataccacccggtagtcgccctcctgcgcccggcgcagacgctccagcttctcccggttcaggagctcctgcagctccccgatgatctggttggacaccagaaagccacggggcgtcaggcgccagccctgctccgtccgctgggccaagccgtggccggcgtaaacctccagccgtgcgcccaaggggtcgaagcgccggcggaagcggttttcaaactccctgatgttcatcccctccgtggtacgcagccgcagcatgatgtactccatctcccgctccgagacggggatatgctccgactccgccagcaccagctccccggcaatgtaccgatccaagtcccggatgtagccgtagcggacgccgccaaagtcggagtaggcaccggggccgaaccccgcatactcccccagtgtccagtatttcaggttgtggcgggaggcgtggccgggccgtgcaaaattggagatctcatactgctcatagccgttttgccgcagatactccacggcgtagagatacatatccgcctgtgcctcgtcgtccggcagggtcagactgtcccgctgccggtagaggggcgttccctcctccagcttcagcccgtagcaggacagatgctccggctggagggtcagggcgtcggagagggtcttttcccactgctccatggtctgccccggcaggccgtaaatcaggtccagactcacgtccgggaatttggccctccggcaggcggccacagcctcctgcacctgctgccatgtgtggatgcggcccaaggcccggagacaggcgtcgtccgtggactggacccccagggagatgcggttgaagcccgcccgccgcagcgtccggagggccttccagtccccggcgctgtcggggttggcctccagcgtgatctcggcgtggggatccacgtgatagtgcttctttacggctttcagcagcttcaccaaccgcttctcccccaaatagctgggggtgccgccgccaaagtacactgtgtccaccagatgctgcgccgcctgcggggccacctcgatcaggtggcgctccagtgccgccgtgtaggcgtccatgcgatcctcccgcccggagagggagtagaagtcgcagtaggcgcatttggacctgcagaaggggatgtgcagatacagccccagaggatgcgcttgcttggccatggtcatgcgtcctccttggggggcaggatgatgacggcctcgaagggacagttcaccttacaggaccggcatccgatgcagcggtcgagatccaccgtataaaagccgtccggctgcaaaagaatgcagtccatgacgcagaacatggtgcagtagccgcagccggtgcagctcaccgggtcgataatggcccggtcatagcgttttttcccgaagggatgtgcaggatcgtacatgataacacccgcctttccgtcccttcagtatagcttgttttgcgccgtttggcaagccaaagcgcatttttccggtgcagcgggtcatactacgggggaaaggatgtggtgcggatggacatgacgcccaaggagtatcaggcgtatgtgaagcggatgcagaagaagtccccgctgggaaaggatatggcgctggccttcgtcatcggcggactcatctgcgtggtgggacaggccatcggagacggcttccggggggcggggctgaatacggaggacgccgggaccgccacgtcggtgtcccttgtgttcctgtcggcgctgctgacaggactgggactttaccaccggctggcccggttcggcggggccgggacgctggtacccatcacgggctttgccaatgccgtggtatccccggcgctggatttcaaggcagagggctttgtcaccggcatggcggccaaaatgttcgtcattgccggcccggtgatcgtctacggcacactggccagcgtggtgtacggcgtagtgctgtgggcgctgggctgacgcccttggccaacaagctttcggttttccacgatgttgcagcgactgcctgcgccgctcccggcgggcagcaaaaagctccccggctcaggccggggagcttttcatggatcattttcatcaaggcagatagttcaggggatccaccatggtgccgttgcgctgaatacggaagtcgcagtgggaaccgctggagataccggtggagcccatggcggcgatggtctggcccttgtacacgtggtcgcccacagagacgtagaggtcgctgttgtggccgtaccatgtgataaagccgttgccgtgatcgatcttcacgcagtagcccagaccgccgttccatccggagtagatgacggttccgccgtcggcggcgtagatgggcgtaccgtaggagttggcgatatcgatggcctcatggtagctgctggcgccgctgatgccggtgttgcgcccaccgaagtaggaggtgatgacgccgtagcagggccagcggaaggaccctgtggggaaccacgtgggccgctccttggtgcctcgtgcctgccgctcggccaccggctccttcagcgtcacggaggacaccacctcacgggccgtctccgtgccattgatgacggtgacgttggcggtgatgtccgccttgccgtacacgcccttgctgaggacctcgtagtcgccctcatacatatccgggtcgtccacatattccacgctgtacgccacatcctgcaaataactctgccgctccacattcaccaccgtcagatacggcacggcacgggagatggtcagcacgtcgccggtatggaggacgctgatgtcatagccggggttcagggccagcagctcctcattggtcatgccgttgtcctcggcaatgagggaccacacatcgccgctcttaacggtataggtcacctcgcccgccttggtggcgttgagcttctcggctatatagcccagattcataataagggactgatccacgtactcctgctttacctccacgttttccacgaagtagcagtccacggtgctgtcggtgatgtagccctttttcagctgctccagcagctgctcgatggcgccggggaaggtggtggccgccaccggctccccctccacatacagcacataggcataatccaccagccccagctgccgggtgaggttctcctccagtgcgtcggtgctctccagctccttccgggccacgatgccggtgcggacctccagcttggcgctgtcgatgctgtaatcggtgtcggacagcgtctgccgggtgatctcctccagctgatccaccgccgccgaaacactgtgggcgctgtggaccgttcccagctccacgccgtcatagcgggcggtggcgccgatggtatacatggacaggcacaccgccacggccgtcaccgccacggcgccggccacaaacaccgccgggtgcagcttcatgtcctcgaagaaggcccgcatccgtccgccggagcgaatggcccccttgcggcggcgggtgagccgctcccggaggtcggagcccatacggggcagactgccccagaggaatagcagcagctggcccagcttccactccgtctccggcagctgccgctgccggttctggtgccgcagctcccgcagacgctgccaccggcggcgcaggggctggccgatatgggtcgatacccacgtctgcacatccagatccagccagtccggatgctccttacaaaaccagacccaatccttcagattctgcttccaccgctgccagatgctgcggcgctcctccgaatcgggacgcttattttccaattcctgtttcatatgatcgatccttgctaaaaagttacaaattcgttacaaagcctatcataccacattttccgggtacgtcaagacttttttgcatttccaccatagaaacggccgattttcaacaggaatttacacaattttcaaatattttcggaaaatatccccttatccacggggcagctccgccgtcagcccgccgcacagggcgttggcggcaaacacggagccggggcgcaggggatcgatggtcgtcccctccagcgtggtgacgcagcccccggcctcctgcaccagcaggctcccggcagcgaagtcccacgggctgagccgacactcgaagaatacctccgcccggcccgccgccacctgacacagatccagcgccgccgccccgaaccgacggtagtccagtccccggtcgtagagataccgcatgatggcgaagtgccgctccgtatagctgcggtcatagatggtggagccgcacaccaccagcgagtggccgggatcccgtccgctgacgtggatggcccggccgttgagggtggccccgccgccccggcgggcagcgtacagctccccggccagcggcgcatataccacggcgtactccacctgcccatccttggccagcgccacggagatgttggtgtaggcaaagccccggacgaagttggtggtgccgtcgatggggtccacgatgaaggtccacggcgacgtcagggtctcgtgctgcccctcctccccgaagaaatccgcctccggcagcagggccagcagctcctgccgcaaaaagcgctgcaccgccagatcgtactccgtcaccagatccgccgggccgttcttctcatgggtggccgccgtcacgtcgttggcgctgcggaccagctccccggcccggcgcacaatatcgatgatactctccagcatagctcttacctcctgatgatgcgtcccggacgagcgccggtgagcacactctgctccagcaccggcacgcccgccgccaagacggtgtccatccccgccgccatgcggcagggctcctgatacgttcccgtttcccggagcgcctccgggtcaaatacgcagagatcggcgtccatccccgccgccagcacgccctttcccgccagccgcagccgctgggcgggacggcctgtcatcttgtggatggcctgctcccacgtcagcacgcccttttcccggacaaagtgctgcaaaagccgggggaaggtaccgtacacccgtgggtggggcatcccctccgtgggatacgtggcatcggaaatcagatgggacaggggactttgcagaatggcggtgatgtcctcctccgaggccatgaagtcgatcatggtgatctccccctgctcccgcaccagcaggtcgcagcagcaggtcaggggatcctgtcccgtcatggcggcgatctccgccagactcttccccagataggggtgatcctccgggcagtggaggctggtcagatagatgccgtcccagcccgccagctttgcaatgtcgtcgaagccctccccgatctggatgcgctgcgccagctcccggcgggccgccgggtccgacagacggcgcaccaccgcctccatgcctcccgccagaaactccggcggcaggatgtgcagcagctgggtggagccggcggtataggggtacacgtcgcaccccacgtccaacccctcctgccgggcctcctccagcagagccaacacttgaggaattttcttcccccagctgtcccggcccatggccttcaggtgggagatctgcagaggaatacgcagggtacgggccaccgtcagcatctcccggacggaatccaccaccccggccccctcctgccgcatatgcaccgtcactggcacgtcgccgccgctgaggggccgcagggcctcgatcagctcctgggtggtatagaagcactccggggcatagcccagccccagcgacacgcccacggcgccgtccgaaagcgcccgctccatgctgcggtggatggcgtcgtaatggtgcttttccaatcgctggagggcgtagcccgccgcatctgcccgcagaacgccggcccccaccagcatccccgtgcggataggggccggtggctgggaggcaaaataccccgccagcgtcgccgtctccatctccggaggggccttcccggtgatgggagccagataggccaatatttcctcccggtgcgccgggccgaagggagcggcggacagaccgcagttgccgtttacaatggtggtcagcccctgccgcagctccagctctccgaagccgggacggaaggccgccgcatcggcatggcgatggatatcgatgaagcccggtgtcaccagcttcccggcggcatccatcacccgtcgggccggggtatccggcggcagcggctccacggcggcgatgacgccgccctctaccgccacgtcagcggaaaaaccgggggctccggtgccgtctatgacggtgccgccccggatcaacagatccagcatggtcactgcgcccccttctggcgtaaaataggcagcgtcacggagaagcggttcaagccctcctgactgcggcagatgatgtttcccctgtggttctggacgatggcccgtgcaatggccagtcccagcccgaagcccgtgccggtgcggctgctgtcggcccggtagaaccggtcgaacaggtgggccgccacctccggcgggatgggatcgccgccgttttccaccgccagacaggcggtgcggtcctgacgggtcagggtcaggcggatatccgtgccttggggcgcatacttcacggcgttatccagcaggatacccgtcagacgctccaaagcgtcccggtcgccggagacctgcagcccctcgtcgatggtgtacagcagccgccgtccagattcaaacatcaccggctcgaaccgcagggcagcgtccgtcaccacgtccgacagatccacctcggagaaggccgtctcccgccggacactctccgcccggaacagggtcagcatctcctccaccagcttcttcatccgccgggactccgcccggatgttctccacatacgtctgctcctccgccggggcggactccgccagcaggtcggcggaggacaggatcaccgtcaggggcgttttcagctcatggctggcgtcggacaggaagcgctgctgctcctgccacgcccgctccaccggccgggcagccacaccggagagcagatagctgcaccccagcagcaccaccagcgccgccagtgcgatcagcagcagattccccgccatggcccgcagcgccgactgctccagcgtgctgtcggtgaaggcgatgcggatggagagagcgccgtcatagcgcagatagcgcagatgatagtccgtcagcaggccgctctcctcctgctgggacaggcattcctgtaccagcgccagcaggtcctcctcactgatctgatagtagctgctgcccatgacccgcaccgtaccgctgggatagacctccgtcacgaagcagggttggccgttctgtccgtcgtagccctcgccccgcagggcctcctccagctgccgggtgctgctctgctccagactgctgtgggcggtgagcatcactccggtgaataccgccgccagcaccagcgtcacaaacagcatactgatgcccacgatcttccaccgaagcctgcggatcataccgctcatgcccccacctccaggcagtagcccaccatccggtgggtgcggatcttcacggcggagtgcagatgctccagcttccgccgcagaaaggagatgtagacctccacgttgttgtcctcggcatcggagtcatagccccacaccttcaggatcagctgttccttggtgacgatctggggatagctgcggatcagcagctccatcaggtcgtactccctccggctcagccgcacctcccgctggccgcagcgcagcaggaaggttcccggctccaaccgcagatcgccgcaggtaacggcgtcctcctgccggggctgaccgtcggtgcgccgcagcagcagccgcacgcaggccagcagctcctgcggctcaaagggcttggtgagatagtaatccgccccgctgtccagcccccgtaccctgtcctccacgccgctgcgggcggtgagcatcagcaccggcacggtgtgtccctcctgccgcagcctttgcagcagggtgaagccgtccatccccggcagcatggcgtccagcaccaccagatcgtaaatatccgaggcggcgttgtccagccccgacagaccgtcgccgctgatgtccgccgtatagccctgccggtgcagcagctccgccagcgtctgggccagccgggcctcatcctccaccaccagtatccgcatgggatcacttcctttccttgcgtccgtttctcctgtcaggcagcccctcccggcgggaggggctgaaataagcttatccgttcaaaccgttggccgccagtgccgccagcgcctccgccggggccgcaggcagcagataaatggtgtcgtcatcattcaccgtggcataataccctccgtcccgctgggcgcccacccgcagcgtcagctccgtctctccggcaatagcccggtaagtgaccgtcagcgtcaccgccggctccgtcagcccacacagctccgccaccccggtgctgggccgatagtcgatgcaccgcagcagcgtcagctgtcccagtgcctccgtcagcgttccgctccattgggtcacgtcctgcccgctccgcagccatacgccctccgacgccgtcagactcaggctcttgccgtctgcggcggtgacagtcagggcgctgacgttgtccgccgtcagctggggcagcttgggcagccgggccatgtcatagatgcccatgctcaacgtcccgtccaccccggcgggggagagatacacggcatccgtctcgccctccggctggatgtactgtccctcgtcggtctgcgtccccagccagtaggtgcgggtattgccctcggtgtccgtcaaactgatgtagcgcttggtgtccgaaagcccgaactgggacagatcatcggtatgggggagcggcgacagggcggcgtagccctgcaccgtggccagcagctccgtcacaatggactgctccagcgggaaatcccggtcgtcgccccagtaccacgtatcctcctcccgcacgaaccgcagcgtcaccgacccgttgtagcacaccagcttcgccggctgctgggcgggagtccggccgtccgcaccggcagcgggtgtatccgtgggggtgtcactctgctttttgccgcagcccaccgtcagcgcagcgatcattaccagcgccagcagcagtgcagctgctctccgtatatccatcataaaaagtctccttttgtgtttttagaagtccctgtaattattctattataccaaacttaaacacagatgaaaagccccgttctcacggagagaacggggcaaacggacggataggggggctgcggtcagtcccggtacaccggggcgtcgaaatcccggacgatctcattccgccgggtatcctgcacgtagacgtgattggtctcgtcgaaggccagccgcatggcgaagtccttggcctcgtcgatgctgtccgtctcgaagaacggccggtaggcctccggcggcagatgggtctttttccacatcacctgaaaacgcatggtggggttcctccttcatggggtgtatcgtttagtataccccgccgccgggaaaaaagcaacagcgtgttttaccaaaattccgccgcaaaaatcagaagaaatcctaaaagggaaatctccgaaaaggcttttcccggagggcgcagcggtgtataatgatatggttatgtaaaaaagggggatattatggtgaagatcggatttgacaacgaaaagtatctggccctgcaggccgagcacatccgccagcgcatgagccagttcggcggcaagctgtatctggagttcggcggcaagctctttgacgactaccacgcctcccgtgtgctgccgggcttccagccggacagcaagatccggatgctggagaccatccgggacgacgtggagatcgtcatcgccatctgtgccggagacatcgaaaagaacaagacccgtggcgatctgggcatcggctacgatcaggacgtgctgcggctcatcgacgtgttccgggggctggggttctatgtgggctccgtggtcatcacccagtacgccgggcagcctgcggcggatgccttcatccaccggctgacggcgctgggggtccgcagctgccgccactatcccatcgccgggtatccttcggacgtggcccacatcgtctccgacgagggcctgggcaaaaacgactacatcgagaccagccgctccatcgtggtggtgacggcccccggccccggcagcggcaagatggccacctgcctgagtcagctgtaccacgaccataagcggggcatccgggcgggctacgccaaatatgagaccttccccatctggaacctgccgctgaagcacccggtgaatctggcctacgaggccgccacggcagacctcaacgacgtgaatatgatcgaccccttccatttggaggcctatggcgagaccacggtgaactacaaccgggacgtggagatcttcccggtgctcaacgccatgttccagcgcatccagggttcctctccctaccgctcccccacggacatgggggtaaatatggcgggcttcgccatcgtggacgacgaggcgtgccgggaggccagccgcatggagatcttgcgccggtactatgccggcatggtggaccgggtccggggcaaggccgatgacagcgtggtgcggaagctggagatcgtcatgcagcaggcggacgtgacgccggacatctgcccggcggtggcggcgtctttgcaggtggcggagtccacggggatgcccgccggggccatggtgctgccggacggccgcatcgtcaccggcaagaacagctccctgctggggccgtcggcggcgctgctgatgaacgccattaaggcccttgccggcatcgacaaggatctggacctgctgccggcctccatcatcgcccccatcagcgacatgaagatctcccatctgggccaccacaacccccggctgcactccgacgaggtgctcatcgccctgtccatctccgccgtcaccaaccctctggcggagctggtgctgaagaagctggacgagctgcggggctgcgatgcccacttctccatcatcctgtcggaggaggacacgaagctgtataaccggctgggcatccacgtcagctgcgagcccaagtacgagatcaagaagctgtatcacaagtaagcagcgcaaaaccgggacggacctccgtcccggttttcgcccacgaaaggagcatatatgcagaccattgcagaaattctggcgcaggagctgggagcctctcctgtccatgtgcagaacgtcatcgacctgctggatgggggaaacaccattcccttcatcgcccgctaccgaaaggagcttcacggcagcatggacgacaccgccctgcggaagctggaggaccggctcacctatctgcggaatctggaccagcggcgacaggaggtgaagtccgccatcgagggacaggagaagctgacgccggagctggcggcggccatcgacagcacccggacgctggcggaggtggaggacctgtaccgcccctataagcaaaagcgccgcacccgtgccaccgtagcccgtgaaaaggggctggcgccgctggcggagctgctgctggcccagcggcgggactgccccgaccccatgcaggcggcgcagggcttcatcgacccggagaagggggtggagaccgtagccgacgccctgcagggggccaacgacatcgtggcggagcttctgtcggatgacgccgccatccgcaagaccctgcgggagctgctgcgccgtcaggggcggctgcggagtctggccaccggggaggaggactccgtctaccgactgtactacgactttgagcagcccctccccaagctggcgggacatcagatattagctatcaaccggggtgagaaggagggcttcctctccgttaccgtgctgctggagcgggagacaggactcaccgccctgcgccgggcggtggtcaagcccggctctgcggccatggagtttatcaagagcgcctgtgaggacgcctatgaccggctcatctatccctcgctggagcgggaggcccgcagcgacctgacggagcgggcctgcgagggggccatccagacctttgccctgaacctgaagcccctgctgatgcagccgccggtgaagggccacgtcaccatgggactggaccccggctatgcccacggctgcaaggtggcggtcatcgacgccaccggtaaggtgctggataccacggtggtgtatcccacctatggccagcggcagaagcaggaggccatcgcccggctgggggccatgatccggcggcaccatgtggagcacatcgccatcggcaacggcaccgccagccgggagacggagcagatggcggtggagctgatccataccttagggggcggcgtcagctatatgatggtcagcgaggccggggcctccgtgtactccgccagcaagctggcggcggaggagttcccggagtacgacgtaaacctccgcagcgccgtgtccatcgcccgccggatgcaggacccgctggcggagctggtgaagatcgaccccaaggccatcggcgtggggcagtaccagcacgatatgccccagaagcggctggatgagacgctgggcggcgtggtggaggattgcgtcaacgccgtgggggtggacgtgaataccgcctccgccagcctgctgggccgggtggcgggcctgaatggcaccaccgccaaaaacatcgtcaaataccgggaggagaacggagccttcaccacccggcggcagctgctgaaggtacccaaggtaggccccaaggcctttcagcagtgcgccggcttcctgcgagtgccggagagccgcaatgtgctggatcacaccggcgtccacccggagagctatccggcggcggagcatctgctgactctgtgcggctatacggcggcggacgtgggcgccgccgccatgagtcagctgccccagaaggtacgggccatgggggaggagaacgccgcccggcagatcggcgtaggcgtccccaccctacaagatgtggtgaaggagctggtgaagcccggacgggacgtgcgggacgacctgccggcccccatcctgcggaccgacgtgctggacatcaaggacttaaagcccggcatggagctgacagggacggtccgcaatgtggtggacttcggcgtattcgtggacatcggcgtccatcaggacggactggtgcatatttctcagatctgcgaccgcttcatcaagcacccctctcaggccgtggccgtgggagacgtggtgaaggtagtggtactggaggtagacgagaagaagcaccgcatcagcctctccatgcgtcaggccgccggtaagaagtgagctgcatcacccgacgataaaccgccgcactcaacggtaaaccgccgcacccagccataagcggctgcatccagcggtaaaccgccgcacttggcggtaagcggctgcatccagcggtaaaccgccgcacccaacggtaagctaccgcacccaacggtaagctaccgcacccagccgtaagctgctgcatccagcggtaagctgccgtacccaacggtaaaccaccgcacccaacggtaaaccgccgtacccagccgtaagctgctgcatccagcggtaaatcgccgcactcggcggtaagcggctgcatccaacggtaaaccgccgtacccagccataagctgccgcactcggcggtaagctgccgcacccagtcgtaagctgccgtcccggcagctgcgtcgaacggcctacagacatagaacaccgccggccctccggaagaaaattccgggggccggcggttctttcgactctcttgatccaaccggcgaccgtctgtcctgcacttggtacgtttggtggccgtctgtcctgtactcggtatgtttggcagacttctattcgcccttatacttccggcgggtggcgagacctccccggatatgccgctgggctttattctcctccagaacctgcttcacctgaagatacagcccccgattaaaggccgggagccgctccgacagatccttgtggacggtggatttgctgatgccgaactttttggcggcggaacggacggttccacggctctctatgacgtaaagggcgagatcgcacgcccgctgctccatgttgcctttgatagcgcaccactcctcagatgactttccgatatcatctctatgcggaaaaaggtgtgaaaagaaccgcagtacccaaaggacatcccttggccgctgcggttttgctcgtcaagatgaagatagaagaagtgctaaaaatccacacgatcggcagaaagcacacgaaataatgttccggaaatcacaaacaacatcgaaaagccatattgacgatgacaaggagcaccggaaatacgtaccggccatgacaaatcgtgccgaaaaggtgcgctggcgataacaaaatgtgccgaaaagcacactggcgataacaaaacgtgccgaaaagcacactggcgataacaaaacgtgccgaaaagcacactggcgatggaaacgccaaaaaccgtgttggcaatgacaaaaacgcccaatagatgcgttttccatggcaaaagcagcgggcagacacgccgaacggcgtgtctgcccgctgcttctttgatcgtatgccgattccagcctttgcgcttccttccggggatcacagtccgaagccaggaagattcagaccgccggtgaagctctgcatggagctgttcatggcctcgtccgcctggcgcagggcctcgttcaccgcagagatcaccagatcctgcagcatctccacatcctccgggtccacggcctccggcttgacggtcagggccgtcagctccttcttgccggacacggtggcctgcaccacaccgccgcccactgaggcggtaaagctggcgttttccaccgcttcctgtgccgccgccatatcctgctgcatcttcagcagcttctgctgcatctgctgctggcgcatggcgcttccgccgccggagaagcctccccgtgcgctgtatccttttgccatagctgtgtatcctccttattgatctgttttaggggtccgttttgtccgatccgggagcttccggcggactgtttttgtccggtatttgtccagcttttgtccaacccgatggactatttgatcttgaagtgctccagctggctgccggggccgatcagctcctccagccggtccttactgccgccctcccaaggcgggatgttctcctcctgcgccgagggctcctccggcagagggggacgttcctcctccgctttcggctccggggggcgggatggctccgcaggcaggggcggctcctccggcaggggagggcgctcctcctccggggtgggagtttgttccggagcggggcgggggggcttcggggcagagcgggtggaccggggggcagatggcgtttcgccgcccaccgtcagcatcactcggatggggcttcccacggcggcggaggtgacctcctccagcaccgccagcaccgtgcggttattcagggagtcccggacgaaatcgttgcggcagtggacggtgaggcagtcaccctccacggtgccggaggccatgttgagaaagacccggtggttcaccggcaggcggcccttgaactgatccagcagttgggtccacaggcggctgtcgccgacgggggccgagggggccgggtctgcgggggcagacctgcggggaactctatgagtgggctttggggcggaggagcgctgcggctcctccgggatgtcaaagacacgctcccggcccgccggttcgtcgggcagaggcggctcctcccacgggacctcctccggggcgggaggacgcttctccgccgcagcggggcgggactctgaatccactgaggggcgggactccggggcagtgggacgctctgccgccggttgagcggcggggcgctcccggcgggcggggacaccctttttcagcagctcctccacccggtccagccgggcgctgagggccgtcaggtcgccgcagaggctctcgtcacacagccgcagcaggcacagctccacgtccgtccgaggctggaagctgtccggcagggcggcacgggtcccttgcagcgtctccgtcaggtacagcagccgctgcatggagacgtttccggagaggcccgtcagggtcttggtatcgtacagcccggagagcagggcgctgcccccctccggcgcggctttgagaatggtcatctcccgtgccagatcgctgagctcccccagcagggcagagacgtccttgccgctgcggtacagctgatccagcagcagcagggcatccggcgtccgacggtccagaatacagcgcatcatttgctgggtctggacgctgccggcaaggcccagcacgtccagcacggcacggctggtgagctggccctccgccacacggcactgatccagcaggctcagggcatcccgcagggcgccccccgccatgcgggagaggatctccgctccgtcggcggtgaggtcgatcttctcggcctgagcgatgtgcagcagctggcgctccatatcacggggcaggatgcgcttgaaggagaagcgctggcaccgggagagaatggtggccggaaccttgtgcagctccgtggtggccagaatgaacatcagatgctccggcggctcctccagaatcttcagcagagcgttgaaggccggagtggagagcatatgcacctcgtcgatgatatacacccgctttttcagcacggcaggggtatacaccgcctcctcccgcagcgcacggacctgatccacgccgttgttgctggcggcgtccagctccgtgatatccagcgtggtgccggcatccacggcccggcaggcctcgcagcggccgcagggctcgccgtccaccggggacaggcagttcaccgccttggccagtatccgggcgcaggtggtcttgccggtaccccgtgtgccggtgaagagataggcgtgggcggtatggccctcgaccacctgacggcggagggtatccgtgatgtgctcctgtcccacgacctcggaaaacaccttgggccgccacttgcggtacagcgcctgatacatggatctcctcctcccgaaaaaacaaaaattctcctccgttggcagctgtggagccggcgccctcacggcacatggatggtccctcttaatgctgctcggttccccgcctgacatgattcgtgggtatccattgcgtgagaccggctccgcagctgtcagcggaggagaggtcgtggctactattttactacaacttttcccgcttggcaacaggaaaatttaccgggtgacatagctgccggaggaggcggcctccgccgccacctgcaccagccgggtcacagggtcaaagtccgccgggagcagcccttgcagggccgctgcgtccacggtgtctgtgtccacatagatgcggtcgaagtgctccgtcagcagggcgagggtgacgccgccgtcgttggcatccgtcgtcacctgatcccgcaccagcaccgacagggcggtggttttgggcagggcctcccgcaccccctccacgaacacgctgagggtgtcggtgaggttggtgacggagccgtagtcgatgcggtccagacggccgtggacagggtaggtgcagtagtccagcagaatttcgtcgaagcctaattcggcgcactccttacacagctgcaccagatactcccgtgcagcagcctttccggggtccagccagcaggcggcgtcatcgtcgtaccacagccagccgtcaccggtccgcagcagccccgcctggtcgggctgggcgttggcaaagtccatatcggcaaagcaggcgatgcgggccacagtccatgtgtcgccggagaggagggtcctgaggtttgtcagcgtctccgggccgccggtggtgacggtgtccctggcggcggtctgcgtgtcataggtgacggtgccgtcccgcagcttcaccgggatcaccaccgcctccgggtgctccgccagcacggcggagggatcctccgtcagcacggtgtccggcagctggcgggcgtgaagctccttcagcagagggcgctccggctcatcgatgatgaggttcacgtcatccggcgtggtgtcctccggctgctggggctgctccgtctgtccctttttcaggaagggcagctccagatgccggtggccctcgtcatcgtagaccatatactcctgcgccaccagatatcccacggcggccagcaggatcagcaccagcacaatgaccagcgccagtttcccgtggtttcggccacggtagctctgataacctctggttgccatgacgatacctcctttttctcaggttcagggtcggatggcatccagctgtgccacccggcgggcatggcgtccgccctcgaagtcggtgttcagaaagacctccaccatgcgcttggccagattggggccggtgatgccggcgcccagcgccagcacgttggcatcgttgtggcggcgggtcatctcggcggacagggggtcggtgcagtgggcgcagcggatgccagccaccttattggcggcgatggagatgccgatgccggtggtgcagatgacgatgcccttatcgcactggccggaggccaccatgcggcctaccttctcgccgtacatgggatagtctacgctctcggtagagtagcagcccacatcctcgaagtcgatgttgtgctcctccagccagatgagaatgtcctgcttcagcagatagccgccgtgatcgcagccgatggcaattttcatggtgtattctcctcttacaattctttgaactccggctttccgccggtaaaggtggtgaagtagcggaagccgcactcccgcagcagctcctgccgctggcggatgaagcagcccacatcctccgggcggtgggcgtcgctgcccaaggtgatgatctcgccccccagacggcggtagagccgcaggatatcggcgccgggcaatggctcgtttccacggttggtgttgcactcgatgcccagccccttggggatgatggtacggaagatctcctccacctgatccatgtggtgggcgaaggtcatgtgctcaccgtagttttcgttaatataccgcaggggcagggtcaagtggcccagcacctgaaactcaccccatcgggccagcgccagcacgtcctccagatagctgtcgatgacactatcataatacgcttcgtcggctttttcaatataataaagatctttgtggtgaaatttctttcccgccatgtggatggagccgatgacaaagtccagcggaggggcattctgcatcagatgctccgcccgctgaaaactcatggcggcctctcccagctccgctcccagccgcagggtaatgcggtggccccactgctcctgcgcctgacggaactggcggcggacggcgtcccagtcgaagtcccatcggggcttctgctccgggccccagtagacggtgtccacgtggtccgtcaggcacagttcatccattccggcggccacggcggcctgtgccgcctgtgccatggtctgccggccgtcctgcgagcaggtggaatgtacgtgataatctgccagatacataggcgttacttcttcttgaagaagctgcggtgcttctcatagttgccctcgttcaaggtctcgctgaatttccgcagggcgtccttctgctcccggttcagattccggggcgtctcgatgatgacggtgacgtactggtcgccacggccccggccgttgaggacagggatgcccttgcccttcaggcggaacacggtgccggtctgcgtcccctccgggatggtgtacttcaccttaccgtcgatggtggggatctccagttcggcgcccagcaccgcctgcgtgaaggtgatgggggcctcgcagaacacggcggtgccgtcccggcggaacacgtcgtggggctgcaccatcaccgtgaccagcaggtcgccggcggggccgccgttcttcccggcatggccctgtccccgcagggagatggtctggccgtggtcgatgccggcggggatggagaccttgatggtcttgcgcttgcgggtgaagccgccgccgtgacagtcggggcagggctggtggatgatgcggcccgtaccgccgcacttgcggcaggggttgctggaggcgaacacccccatgggcgtctgacggcgggtctgcaccacgccgctgccgtggcactcggggcagacctccggcgtggtgccgggggcgcagccgctgcccttacaggtggcgcactgctccatgcgctccaccgtcagctccttttcgcagccgaaggcggcctccgtaaagctcagggatacgctgacccggatgctctcgccccgctgagggccgttgcggcgctgctgttggccgccgaagccgccgccgaagaagctgccgaagatgtcccccagatcaccgaagtcgaagccgccgaagcc

SEQ ID NO: 12359 - DNA, 10132 bp, Unknown
  gut microbiota DNA sequence
gataccatatgagagacaggttgtcaaggactgggaagtgatacttttgtcatgcttcgggccggggagaggcggagaaaaaagttcaagatttgttcaagaactggaaggtgaaaaatggtcatgccgcattgacggcggggacggttcattgtataataaactgatttaatgtgcggaggtataccctattatgtggatcgcagatggctggaaggactatgagctgctggactgcggcggcggagagaagctggagcgctgggacaaacagatactggtgcggccggaccctcaggccatctgggagacggatcacagccatcccggctggcggagggccaacgggcggtacagccgttcctccagcggcggcggccactgggacaaggggaagctgccggagagctggcccatccactataaggagctgacctttcaggtcaagcccatgaatttcaagcatacgggattgttcccggagcaggcggccaactgggactttgccatggagcagatccgccgggcgggacggcctatccgggtgctgaacctgttcgcctacaccggtggggccacggtggcctgtgccaaggcgggggccagtgtgtgccacgtggatgccgccaagggaatggtggcgtgggccaaggagaacgcccggctgacgggtctgcaggaggcccccatccgctggatcgtggatgactgcgccaagttcgtggagcgggaaattcgccggggcaagacctatgacgccattattatggacccgcccagctatggccggggacccggcggcgaggtgtggaagctggaggagaacctgttcccctttgtgaagctctgcgcccgtgtgctgtcggataagcccctgttcgtgatcctcaactcctataccacggggctggctccgtcggtgctggggtacattctgcagatgctggtgggcaagcgcttcggcggcagggtgacgtgggacgagctgggcctgccgtgtacgcagtccggtatggcgctgccctgcggcgctaccggccggtggacggcggaataacaagacttataagaactaagagagaaacagccggttgcaagaggagagtgcaatgaagaaaaacaggctgggtagcgccgaggtgggcagctgcatctgctacggcctcatggcccttctgcaggtggggtggctggcggtgctgctgacggcacagctggtgccgccggtgtgggtgacgctgatggtgtactgtgtggcgctggcgctgttcctactgggacagacgctgcgggtggtgcagctgcggcgggacggacagccggtgggctggtccgtggtgctgggcgtggcggtggcctccgtctggctgtggcagatgctgaaggtcagccacgccatttgagaacgattgaaaagagaacgcagaatatgaccatgatcgaaacaaaggacctgaccttcgcctatccggcggaggagggcaagcggagcgagccggcgctgcggggcgtgagccttggcatcgagaagggcagcttcgtggtggtactggggcataacggctccgggaaatctactctggctaagcacatgaacgccgtgctgctgccatctggcggggcggtgtatgtagaggggatggatacccataaccaggcgatgctgctggagatccggcggcgggtgggcatggtgttccagaacccggataaccagatcgtcgccaacgtggtggaggaggatgtggcctttgccccggaaaatctgggcgttccgccgcaggaaattcgccggcgggtggacgatgccttggcggcggtgggcatgagtgattttgcccgccatgcgccgcatctgctctccggcggacagaagcagcgggtggctattgccggcgtcattgccatggagccggagtgcatcgtgctggacgaggccacggctatgctggacccccacggacggcgggaggtgctggacaccatccaccggctgaaccgggagcggggcatgacggtggtgctcatcacccaccacatggcggaggccgaggaggcggaccgtgtcattgtgatgaacgacggcgaggccgccatggacggtacgcccagagagatttttgcacaggtggagcggctccatgagctggggctggcggcgccggacacggtggagctgatgcagcggctgaaccggcagggggagcacctgccgctgacggccatcacggtggaggaatgtgcggatgcgctgtaccggcggttcggcgcagaagggaagtaacgaattggaaccaatcatacgaattgagcagctcacccatacttacagcgccgggacgccctttcagcgcagcgccgtggatggggtagagctggatatcatgccgggggaatttttaggggtcatcggtcacacgggctccgggaaatccacgctgatccagcatctcaacgggctgctgaagcccacgcaggggcatatctatctcaacggcaaggacatctgggcggaccccaagcagatccggcaggtgcgctttcaggtggggctggtgttccagtatccggagtaccagctgtttgaagagacagtgtataaggacattgccttcggccccggcaacatggggcttgataaagaggagatcgaccgccgggtgcgggaatcggcccggatggtgggccttgcggaggagctgctggagaagtcgcccttcgacctttccggcgggcagaagcgccgggtggccatcgccggggtcatggccatggaacccaaggtgctgatcctggacgagcccacggcggggctggatccccgtggccgggatgagatcctggcgcagatccgggcgtaccacgagacaaagcgggccacggtgatcttggtgagccacagcatggaggagatcgcccggaacgtggagcgcatcgtggtgatgcgggatgcccacgtctatatggacggcacgccccggcaggtatttgcacgggcggaggagctggagcaggcgggactggatgtgccgcaggtgacgaagatcgccatggcgctgcgcaggcggggcatggatatcgacccggcggtatataccatcgaggagctggagcaggcgctgctggcccggaggggaggcggcgagggatgctgaaggatatcacgctggggcagtttttccccggcaataccatcgtccaccggctggatccccggacgaagctgatggcggtgatcttgtacatcgtggcgctctttaatgccaagagccccttgacctacgcccttgtggcggcggtgctggcggtgtgcatcgtggcctcccgtgtacccatgaagtccctgacacggggcctcaagcccgtgtacgttatcgtggcgtttacggcggtgatgaacattttctttaccggcggcacggcggtgggcgaggggtggctgctgggccatatcacctatgagggcctgacggcggcgatctacatggtgctgcggatcgtgatgctcattatgggaacgtttctgctgacatataccaccagtcccatcgccctgacggacggactggagaatttgctggggccgctgaagaagctgcatctgccggtgcatgagctggccatgatgatgtccattgccctgcggtttatccccacactgatcgaagaaacggacaaaattatgtccgctcagaaggccagaggcgccgactttgagtccgggaacatcttccagcgggccaaggcactggtgcctattctggtgccgctgttcatcagcgccttccgccgggcggacgaactggccacggccatggagtgccggtgctaccacggcggcgaggggcggacggccctgcacgtgctgcggtatcaggcggcggattttgtggtgctggcagcctttgtggcgctggcggcgggacttatcgtgctgaagcatatgggtatctaaggaggtgcatcgtgcggaacatcgcactgatcctgatgtataacggaacggcctaccacgggtggcaggtgcagaaaacggaggtcacagtggctcagacgctggagcgaggcctctctatggtgtgcggcgaaccggtaaagtgtaccggctgcgggcgcaccgacgccggggtccacgccgagcactatgtggccaatttccggacctcctcccgaatcccggtagaccgcatcccctttgcggtgaacacccatatcccggaggatatcgtggtgaaggcggcctatgaggtggcggaggatttcaacgccatcggctcctgcatcaggaaggagtatacctatcgcatctacaattcacgcatcaagaatcccttctatgtggatcgggcatatttttatcccaagcggctggacgagcaggtgatggaccgggcggcacgggcctttgaaggaacccacgactttgccgccgtgcggagcgtcggcaccaatgtgcgcagcaccgtgcggaccatctactactgccatgtgacccggaacggggagctgctggaattgaaggtatgcgccaatggatttttgtataatatggtacgggccattaccgggacggtgctctatgcggcggagggaaagctgaagccggaggatatcccggtgatcctggattccggaaaccggacgctggcggggccaacggcaccgccgggaggattgtacctgacgagggtttggtatgaggatgagcgactcaatggataaacgggaatttgatgggggcaatccccagcaggacgctccccggcgggtggagaaaaagaaaatatggacccgtcggcggcttttgtggctggggatcgtggcggcggtgctgttggcggtggtggcggtgtccttgctgtggcagcggggtacctttgacggactgcgccgcagcgtcatctatgcccgtgcggagaaggacgagaacggctgcgcccagctataccagtatgcggcagaccgggagtatcggttcgtgtccctgtccgggtcgctggcggcggcctccaacagccgcatcctgctgatgggtgaggacggacaggtgcgatacagcgagagcatcctcttcaccaactgcactgtgaccggaaacggcaagtgggcggcggtctacgacgtcggaggcaaggagatctatgtactggacgctcagggcgaggtctaccggctgacactggacggcgacattttggcagcggctctgaaccccggcggctatctggccgtgatggtaaatacctccggctataaggcgtcggtggaggtgtacgaccccaagggagagaaggtatttgccttccactccggggatcagttcctcatgacggcggcggtatccgccgacagccaccagatggcggcggtgaccatggggcaggagaacggcagctttgtcagcagtctggctctgtaccggctgggccgggaggagcgttacgcagaatgtcttctgccggagaatgccgtggtatatgatctgggtacggtgggcggcagctactgcgctgtgacggaaacgggattgcggtttgtgaccaccggcggcaagctggcggggagttacagctatgacggcggatacctccaccggtgcagtctgggcggagacggctatgcggctctgctgctgggacggtacaagtccggcagtcagggcaggctggtgacggtggacagtcagggccgggagctggcatcgctggatatcgacgaggaggtcatgagcctctccgccgcaggaaagtatgtggcggtgctgtatcaggaccacctgaccatttatgataaggacttgcaggaatacgccgtgctgaaggatgtcagtgcggcggggacggtgctgatgcggagcgacggatcggcggtgctgacaggtgcgtcggcggccagcctgtacctgccgtaaggcggcctgacaaataggaggaaatgcgtatgacatgggccatagacgccgtgctggccgccgtactggtggggctggtgtggctgggtgccaagcggggcctgatgaagagccttgccggcgtgatcagcgtgggagcagcgtttttcggcgcctcatggtgcgccaaccgcttcgtgacgccggtgagccggtggctggagccgctgctgcgggagagcatccagcagaagctgtccggtcaggacggagcggatgccggagagctgctgtcggccttcgccttcgatgcccacagtctggagaaaattctggaggatgtggcgcagcgggtgaaggagaccggggagtcggtgttttccgctgtgacggagagcgtcagccactccatcgcctacggcatcgtgtacgccgccgcctttatcgccattttgctggtggtatggctgctgctcaagccattggatctggcggggaagctgccgctggtgcggacggtgaacgcactgggcggcgctttgctgggccttgtgtgggcggtgctgctgctgtttgcggcggtgtggctcatgcagcgatttaactgggtggtgacaccggagctgatccgggacagcatcctattgaaattctttgcggaaaacaatcccatcggtctcattgcagccctgtgacgccggtgaaatcaaccctgtaacggaggagaactatgcaacctacactttgctccaaatgcaagaagaacgtagccgtggtgtttatctcacggatgaatgaaaagggagagcctgtcaacgagggcctctgcctgaagtgtgccgcccagctgggcctgccgcaggtggaggacatgatgaagcgcatgggcattaccccggacgatctggagaatctcaacagcgagatgatgcaggccttcggcggcgccgaggagctgggggacgtggcgcaggccaacgaggacggcgacgaggatgaggagagcggaaagaccgccaccttccccttcctgaaccggctcttcggcggcaacaacaatcccccggcagagaagggagagaccccgcagcgggagaccggcaaggagtcccgcaagggcgagaagaagcacaaatatctggataactactgcatcaacctcagccgccgggccagagagggcaagctggacgccgtcatcggccgggaggaggagatccagcgggtggtgcagattctgaaccgccggcagaagaacaatccctgcctcatcggtgaacccggcgtgggcaagaccgccattgccgaaggactggcccagcgcatcgccgccggggaggtccccttcaagctgcgggacaaggaggtctatctgctggatctgacggctctggtggccggtacccagttccgtggacagttcgagagccgcatgaaggggctcatcgaggagatccgcaagctgggcaacgtgattctggtcatcgacgaggtacacaacatcgtaggggccggagatgccgagggcagcatgaacgccgccaacatcctcaagcccgccctgtcccgtggggagattcaggtcatcggagccaccaccttcaacgaataccgcaagtatatcgagaaggatacggcgttggagcggcgcttccagccggtgacggtggcggagcccagcatcgaggacacgctgaagatcctcaagggtatcgcccactactatgagacgtaccacggggtgtccatcccggagggcgtgctgcggcaggcggtgctgctgtcggagcggtatatcaccgaccggttcctgccggacaaggccatcgacctcatcgacgaggcctgctcggatctgaacctgaaggatcctaccatcaaccgccgcatggaggtgaagcgggatctggagaacgtgaccttcgagcgggagaccctcatgtctgccgaggccccggaaggggaggagctgacggaggagcagctggatcagcgctatgcccgcattgcagagctgcggagccaggagatgcgcctgcaggaggaattgacagagctggagaagaagggtgtgccgcaggtgaccatggagaacatcgcacgggtcatcgagatgtggaccaagatccccgccagcaagatcaaggaagaggagttcaagcgtctggcggagctggatgtgcggctgaagcagcatatcgtggggcaggacgaggctgtggatgcggtgtcggcggccatccggcgcagccgggtaggcatctcccccaagcacaagccggtgagcttcattttcgtgggcagtaccggcgtgggcaagacggagctggtgaagcagctggcagacgatctgttcaactcgccggattctctgatccggctggatatgtcggagtttatggagaagcactccgtgtctcggctggttggttcgcctccgggctatgtgggctatgacgaggcggggcagctgacggagaagatccggcgcaagccctactccgtggtgctgttcgacgagatcgaaaaggctcatccggacgtgctgaacatcctgctgcaaattctggatgacggcgaggtcacggatgcccacgggcggaaggtgaactttgagaataccgtcatcgtcatgacctccaatgccgggtccggcaaggcggcgggcgctgtgggcttcggccgcagcgcagacgatcaggataaggagcgggtgatgaaggccctgcaggagttcctgcgcccggagtttatcaaccgtgtggacgagatcgtatatttccaccagctgacggaggagaacttccggggcatcgccgggatcatgctggaggagctgaaggcggcgctggaggagaagggctatcacttcacctacgacgatgcgctggtggactatctggtgaagaaatcctattcggcggcctatggcgcacggaacctgcggcggtgcatccggaaggatgtggaggaccccatggcggcccgtatcatcgagagctatgagacgcccatcacgcagatcaaggcaaccgcagaggatggggctgtaaagctctacacactgtaatgaaggagggggcgtaccatgctgtttcgtaagaagatcgagccccggtgcagctactgcgccagaggtgggcgtgccaatgaccatgaggtcatctgcgccaagaagggcatcgtgccggcggagtcccactgcggtgcgttccgctacgatcccctgaagcgggtgccgccccgtccggcgaagctggagacggaggagctgcggcaggaggatttccaattataagagaaagcccggaggcgatgcttccgggctttctgcatgagagtcagacgatatcgtagagctggcgcaggtcagtgatgcggtagtcgatgtggagattctccggcagggcggtgccgtgggggtcgtaccagcagcaggggatgccggcgttgttggcgccccggatatcgctggagggggaatccccgatgagcaggcagttctctcgtgtgatgccggggatgcgggcgaaaacgtagtcgaagtaggttcggctgggcttgctggccccggcctcctcggagatgaaggcgtcggtgatatagggagccacggcgctgcggtgcagacgactgcgctggacagaggccacggcgttggtgacgatatagaggcggtgggtccgggacagggtgcggcagacctcctcggcatgggggagaagaagcgtactttcccccagagccttcaggtggatgcggttgcagagggcggggtcacgatccagcgccatggcctccaggaaacggcgaaagcgttctaccaccagaaaatccttggtacactcgcctcggtcgaaggcagcccacatggcgttgttacagcgctcgtagagagcaaaggtctcatcggtgtcggggatatcgcactgccggcagacggtgtggaaggcattgcggttagcggcatcgaaatcgaagagagtgttatcggcaccgaaaagcaggtaagaatagtgcggcataaaagggtacgctccagtctaacatattataaatagtatagcatagagggggaaggcttgtaaagcctgtgaaaaacgcacaacctataagcccagattttgacagggattacaaagcgttgaaaaaagttgaaaataaggaaaaaaggcgttgacaaggggaggggagtgtggtaaagtaaacaagctgttcgccgggaggtgagcggcgggggac

SEQ ID NO: 12360 - DNA, 808 bp, Unknown
  gut microbiota DNA sequence
aacctggtaatggaggtaaccaccatgatcaaagaacgcatctccatttccggcgatctcaaaagcaaggtcaagcagctgatggagtatgccggatggcaggaagggcgaaaagtggacatttccattgcggagaagtattacgccgatcatggcgtcccaatgatgaagaccacccagcggttttaccgcaagtatttcggcctgtgctgtgagtggtatctggagcagaaaaaactgagctgggcggctgacttccaattcgctttgttcccttacctggtcaacgggattaaaaaccatttggaagaagcctattttcgggatatgtccggctgtgaactggcagagatcgaacaggctgccggtgaaaaatgccagcctatcggtcatattggctactactacccggcggaggtctggatctccgagtacgggaaattgtatgcgaaatatgagtaccaggatgagattgagtgctttccggatgtgtttgccctgatcgaacgggaactgcggcagtgcaaatttgattccgctgccatgaaaacggttgaggcactggacggaaaactatgaaacaggactttacgatttggcgcaatcaaatattgcagaatccccagaacatttcaccgctgaaatttggtatgtcacaggatgaggtcatagaaatcttcggtaagcccgatgctgtttccaccatgagaagtgatgggaagcctttgatcctcaaatatcatgaaattgaactgcatttcgatagcaaggcccctcatgggctctacttaatttacagcgacgatga

SEQ ID NO: 12361 - DNA, 1856 bp, Unknown
  gut microbiota DNA sequence
ctgagagatcagatggccattgatgtcccccgtaaaagtcagattgttcagagcatcctgtttcacctgatccagatagatgcagtctcgtcccttcaaaacacctaagcaagtgttaacagcagtcgctttttccataggcaattctctttcatcagctttcattggtaatacagaaaatctcctggtttaagtcaaagtagattaccatcagctcgtcggtgatctccgggttgagggacagatccataatgaaaacttgttgatccatcttgtaatccaccaggctgccaaagcgatcaagcctcaaaaagtccaccatctcggcaaaggacagcttggccgggtcagttcccggaaaaagttccgccgcaatatccgggtctacatcgtcccggtagaactccatgaaaaatgtcacaacgccatggtagcgactgtcctcgtccgccagcgccgctttgatggcggttttggccttctccgccaatttctccgcctcatcgatcatttttcccaccgcatccatagcggcagaatcagcagtcagttcttcctctacatcgaaaagaaatggcagtcccgattcatcgggaaagctgaagatttcctcgccgggtgtatatgtaaaatcaatgcgtttacagttcagtttcatagatatacctccttattggttttccagatggggtaatggaattggtgaatagaccacggtatctccatcatgatccatcttgagaatgacagcaaattccgctacattgctctcctgtccctttgggagaggaaagatcattggggggcaacgcagggcagcatggttcgtggtattattccaatcttccatggcagcagataaaatgacatcaatgtgtgccaataccttctcaatggaacccgctgagatgttgtaaaaagtggggtttttatgatactgctctgtgatgaagtttttataggtttgcactggcataaagcaaaattcccaatcaaggggatacaacccaagccaatattcatacagtttcataggcgtctccttatccctcaatgttggcagttttgaggccctttttcaaggagccgtagacagtcaccgcatggtcggtgaacatctcgtcgcagtcaaaccaggcggtgaagctgccgccggaggtgacggatagactcgtcaggctgattcgccgggcaagttcgtcctctgtgatggggtcggtttccggattgcgggggttttccttatcttgggagagccagttgttggccagctcggtcaggttcttggctgcaagctcccgcatggccttatcccaggtgtcacagtcggccagcagctttttggcggcgctgcgggcgcgggtccaggagggcttgctttcggcattgacctccagagaaaggctcacatcctttccgcaccactggatttcgccctcgaaggtatcatagtccttgtccagtgtcagttctcccagcacctggtcctggatcaccactggcttgtggtactcgtccagaacggcctggagttccgggcagtcctcgtgggccttgaccacctgggagatacaccagggctgcaccaccagatcctttgcccattcttctttcatccggcgaatcttcaggcggcagatctgctcgttttgaaagcgtccccagcccttgtcactgtgacgctcctcgtcggtgaccggccaatccagtcgctcctctttggtgctgaccttgccggtgtcacaggacactatgcccagcgtcacaacggtcatttcccaaaagttacctttccagttaaatccgcctccgatgcagcgattgatcagagcgaccacttcctgctcctcggtctc

SEQ ID NO: 12362 - DNA, 53735 bp, Unknown
  gut microbiota DNA sequence
ttctctcgctgttttctctttgctcagaggttcgaatcaccccacatcacgaaaatggccttttgcatctccatctcgtctggtgctcgattttgtcctctgaaacggctgaaacccttgccgcagcaagggtttcaggggttgcatctttttcagcaaccttagttggtcggagtggggggacttgaacccccggcctcttggtcccgaaccaagcgcgctaccagctgcgctacaccccgtcagcctaactattatacggtgcagaaacgtttctgtcaagagggaaatttccctccgccccggaggttctgccctgcccgaagggcgcatacactgaacgcaaaaggaggggatggcatgaccgagacaaagcaccgccggcccgcccgccgcacactggcacacgggcagcctctgcgccgcccgatggcccgccacacaccgcggcgcaggcccaccgcaggccggaggccccgccccgccgtgggccgcctgtggcaactggtggtgtgcggagcgctgctgctgggggtggtggccataaagctgacggccccggacacgctggagccctaccgccagcggctcttgacgctgatgggcggcgacacagattttacggcggccttttcggccgtaggtcacgcctttgacggctctctgaccggagcactggacgacgcctacacggcggtgttcggcccccggcaggcgcagcccaccgcagccacctacacggcggagaacaccccagaggacgtgtgcctgacccagcaggtgctgggctttgcctacgccgccccggtgcaggggaccgtcaccgacggcttcggatggcgggagaacgccttccactacggcacggacatcgccgccgatgccgggaccgtcatctccagcttcgctgacggcaccgtcacggcggtgggggacagcagccaactgggcaactatgtgaccgtgtcccacgccggggcctttaccaccctgtatgcccattgcagccgcattactgcctcctccggccagcaggtggcgctgggcgatcccattgccgaggtgggggagaccggcaacgccactggcccgcacctgcacttcgcactccagaaggacaccgtctatctggatcccgcctactatggcattggctgagcgcctgcggatctcgccgggggtgccgctgctgctggcggccttcgtgtggctggcctccccactgctgctgggggctatcctgtcggcggcggtgtgccatgagctgggccactggttggtgctgcgaagggtaggaggccggatccaaagactgcatatcaccgtgttcggcgccgagatgcaggtggatgaccgccgcatctcctacggcggcgagctgctgaccgccgccgcaggcccggtaatcaatctgctgctggcggcggccatgggccttctgggccggtggtgggagccgctgtatctctttgccggggcgcagctggtgctgggggccttcaacctgctgcctgccctgccgctggatggcggccgtatcctgtggctggcgctggcgtggctgacagaaccctataccgcccagcgggtactgtcggcggtgagccttgcggtgtcgctggctctgctgttgggtggcggatggttcatctggcggctggggggcagcccctttttgctggtgggggccgtggggctgaccggatggaatctgcgggaaataaagcttgccaaagggggataaaacgggtaaaataagatgttaaaccaaagaatacaggagatatactgtggataaacgattggaacgtattctgccgcgagtgcagaagcctgcccgctatgtgggcggggaatataatgctgtgaaaaaggacccggcgcaggtggatacccgcatcgccttctgcttcccggatacctacgagatcgggatgtccaatctggggatgcggatcctctacggcgtcatgaacaacatggacggtgtatggtgccagcgggtctttgccccttggggggacatggaggaggagatgcgccgggccgggatgcctctgtttgccctggagtccggggagcctatcacggactttgatatcgtggccttttccgtgggctatgagatggcctttcctgccattctgaatatgctggatctggcgggcatccccatccatagcgcagagcgcaccggtctgacgccgctggtcatcgccggcggcaccgccatgtataacgccgaacccattgccgacttcatcgatctggtgagtctgggggagggagaggacatcaccgtggagttggtggagctgcaccgcaaggcccgccgggagggctggagcaagacgcagtttctccgtgcggcggcccagctgccgggcatctacgtccccagcctgtacgaggtgacgtatcatgatgacggcaccgtggcggagatcacgccgctggagggcgctccggcggtggtcaccaagcgtatcgtccacgatatggacaagtcctttttccctacccagaccatcgtcccctccacggagatcgtgcaggatcgggtgatgctggagctgttccggggctgcatccggggctgccggttctgtcaggcggggtatgtgtaccgtccggtccgcaaccgcagcgaggccctgtgcgcccagtacgccgtggagagctgcgacggctccgggtatcaggaggtgacgctgtccagcctctccaccagcgactacccgcccctgacccagctgtgcgaccagctggaggatttctgtcagcagcgccatgtgaatctgtccctgcccagtctgcgggcggacaacttctccatgaacctgatggagcggctggccaagggccgcaagagcggcctgaccttcgccccggaggccggtacccagcggctgcgggatgtcatcaacaaaaatgtcactcaggaggacctgcttcagtcctgccgcacggcctttgccgggggctacaatgccgtgaagctgtacttcatgctgggcctgcccacggagaccgacgaggacgtgctgggcattgccgatctggcggcccgtgtcatgcatacatggcgggagagcgccagcaataaaaaccggggcgtccgcatcaccgtctccacctcgtggttcgttcccaagccccatacggcctttcagtgggagccgcagatctccaaggaggagtatgagcggcgggtggccttgctgcgggaggccatcaagaccaaaaccgtcacctataactggcacgactccgacaccagctttctggaggctgtactggcccgtggcgaccgccggatgtgcaaggtgctggagacggcgtggcgcaagggctccaagctggatgcgtgggaggagtatttctcgctggaccgctggctggaggcctttgaggagtgcgggctggatccccacttctacgccaaccgcacccgttcgctggatgaaaagatgccctgggacatgatctccagcggcgtcaccacggcatacctccgccgggagcgggagcgtgcctttgccggggtcaccaccccggactgccgcacccactgcaacggctgcggcgccaatcgactggtaggggggaagtgcgatgtctaagctgcggcttctattcgtgaaggaggggacggcggcctatatctcccatctggatctgctgcggacggtgcagcgggccttcccccggacggagttggagatcaagcactctcagggcttccacccccatcccatcatctccattgtgctgcccctgccggtggcccagtccagcgactgcgagctgctggacttcgaggtgacgcaggataccgacggcagcggcatcgccgaaaagctcaatgagggcctgccggaggggctgcgggtgctggattgctacgaggccaagcgcccggtgcgggagctggcgtatttgcaggcggatatggagatggagtatgaccacggtgtaccggagggcgccgcagaggcgctgacggagctgtttcaccgcccggagctgctgatcgaaaagcgcaccaagcgcaagcagctggcggaggtggatatcgcccccatgatccggagcatcgcctttgcggaggagaaggatcttctccgggcggcggtaacggtccgggcgcagaaccccggcctgaaccctcagctgctggaaaaggctatcgcccgctaccggccggacctgtccccggactttgttcgggtccgccgccgggagctgctggacgaggcaggggaaattttccggtagaaaaaccgtaccacccggagggatgctttttccctccgggcgtgattttgcccgtaaaaatggacggattgcggacatataacggacgcatcagtggacgttttgatggacggctccggtactttttggtacaatggggacagaggaacaaaggaggatgccctgatgaagcgactgcccttagttttgctgcccctgacgacgttggccaccgttgtgttctgtctcctgtggcaaggagcacggcgggaccattcagaccttgtgacgctggcccgctccggagcggcggagacctgtacccgattttcggacaatcagtcccacggagatgacggcgatgattggggcggcgtggctgctttccgaaccttccagcaggcctgcgcccttttgccggagcaggggagcgatgccgtatgcagcgccgtttacgggcagctgctgcacccggatggagccaaggcccatctgccggagatcatcgccgtcatggaacctctggcccaagaccccacggacgcatccgcccggctgcggctgtatgagctgcgggatcttttgcaggaggatgcgtgattttcgaccgtaccatgctggcgtacatggatgaacaaggggaaatgggcttgttggagcctatttcgatactttttttgtcaaaacaggaaataatgcttgcatttggcgggcatctgtgatattctatcatggcatgaaaagggcggtcctctgtcgccggtgtccccaaaaagatgggacgccacggaaatgacggcatgaacgcctataatttaggaggaaaaatccatggatctcatcaaagcactgaatgaaaagcagctgcagaacgacgtgcctcaggtggaagtgggcgataccgtccgtgtccacgtgaaggtcaaggaaggcgcccgtgagcgtgttcaggtgttcgagggtaccgtcatcgccaagaagcacggcggcatcgaggagaccttcaccgtccgtcgtatctcctacggcgtgggcgtggagaaggtgttccccgttcactctccctctatcgtgaaggtggagaccgtgcgccacggctatgtccgtcgtgccaagctctactacctgcgtgaccgtgttggcaaggccgccaaggtccgggagaagctgtaagccattttgtgatccaaggccggggcatcccggcgtgaaaaagagacgcacctgcgggtgcgtctcttttttatgcagttacgtttttgcgccgacgcacttctatgccgtcatacttttatgcagtacgattttgtgccatttatacggccacattcttatgcggctgcgctttttatgcagccatgcttttacgctgtactggatggaaatggttctcaggggaacggacctgagggcggaagttgggagcctttggggatggccctgcccctgtgcggtgctatgggtcagtcgtcccagccagcccgttcctctcccggtaggccgaaggagatggaaccccggccgtattttccacggatggcgtccatggtgcgctccagcttctcctgcttttcctgctgccgggaaaccaccggtgcctccaacagatccagctgctggaaggagtcggcgctgtcggtgatatacagggcggtgacggtgagcatccgcaccggctccggggccttccacagccgccgggtcagctccgtggccgactgccagatgtccttcatcaggtgggtgggggccgggagccgcatctgccgggacacggtgcggaactgggcgttccgcagggacacggatacgccgccgcagtacagcccctgctgccgcagccgcatggccacactgtcggacagcaccgccagaccacgctgtacctcctcccagcgggtgaggtttttggggaaggtggtgccgtttcccacggatttcaccggctcttgctggcccgccgggcggacggggctgccgtccagcccgttggcgtactcatggagctgaagccccagcttgcccagcagcgtttccagcatctggggggagcaggccgccagctgaccgatggtctccacaccgtactggtgcagcacccgtccggctgcccggcccacgaacagcagatcccccaccggcaagggccagacgatatcctgccagttttcccggctgatgacggtagtggcatcgggctttttatagtcactgcccagcttggcgaacaccttgttgaaggacacgcccacagagatggtcagccccagctcctgccgcagccgccgacgcagagtatcggcaatggccttggggtcgccgccgaagaggtgcatactgccggtgatatccagccagctctcgtcgatgccgaagggctccaccagatcggtgtactgctcatagatggcgttgacccgccgggagtactcccggtacaggccgtggtggggcggcagcagcaccagaccgggacacttctttttggcctgccagatggtctccgccgtctggatgcccagccgcttggcaggctcgttcttggccagaatgatgccgtggcgggaggcggggtcgccgcagacagcggtggggatgtcccgcagatcgggatggctcagcagctccaccgaggcaaaaaagcagttcaggtcacagtgcaagatcacccgatcacccatgcggcacacctccttagactcaatcgtttgttctattatatcatggcctgcgccgctgcacaagagaaaaacgcagtcccctgagagaacggaggactgcgtttcgggcttacggatgttatttatgcagcaggggggacaggggcttgtagatgaggaggcagatgcccacattcagcagccccttgaacagggtaaagggaacgttgaacaccaccaggcagttcagcagcgcattgccggtagggacgtgggcgatggagcccatgatggcctcatacatcccgacgatgcccgtcatgggcagaccgtagaggacctcgtaggccggatacaccacaaaatagttggagggcaggctcaccagcgccatcagcacggcgcccagcagggagccccacagggccgatttgcggctcttatgccgccggtacacaaggcccgccaccagcacgaacacgctgcccagcaggaagttgctgagctcacctacgccggcgctggagccgaagggcaggtgcagcagattcttcaccaactggatcaccacgccgtacacaggtcccagcgagaaggtacccagcagggcaggcagatccgacaggtccagctttacgaaggaggggatcagggggatggagaactcgatgaactggaggacgaaggccacggcgcacagcatggcggccacggcaatgtgatgggtcttttgcttttgagtcataaaaaaatactcccttttgatgtagtaaacccccggaaaggcttgccttccaaggtgtacgcatcaaaaaagagcatcacgaaaatgccatacacgccttctctcatccagactatactgtcggtaccgggatcgcaccggttcatgcagcttgcaccgcttgcggactataccgccggtggggaatcacaccccgcctcgaagacagctattcggttgtttccgaaggatagtatacgacatcctgcggcaaaaagcaaccccctgatttgcaaattagataaacagaaaatatttatcgtaaaacaataaaaaatagttgacaaacagaaatgatgctgctatgataggtacaacaacgaaaggagtgagcctcatgaagaccaaaaccatgacgaacctgctgcgactggtgctgatagcggcagcggcgctgtgcggtgtatttttcttcttgtgtctgccttcttatgggcaggagatcgtgcaggcggatccggagtttgcgtgggcctactggccgtgcctagtgtgggcgtggctgtttgcgctgcccatcttcggggcgatgatccccggatggcgcatcttcggcagcatcagcgcccccggcggggcttttacccggaagaattcccgtgatatgcagaggatctctgtgctggcttttgctgatgcgctggtctttccggcggggatgcttaccataggcattatgggggcgggcagcgccccgctgaccattgtgattacgcccatggtggtgttctgctgtgcggcggtgggggtcgtgtgctatgtgctcagccgtctcatcggggacgccgccgctctccgtgaggagaacgacatgaccatttaaggagggcggagcatgatcgtattcaacattgacgtaatgctggcccggcggaaaatgagtctgacggagctgtcggagcgggtgggcatcaccatggccaacctctctatcctgaaaaccggcaaggccaaggcggtgcgggtggagacgctgaacaagctctgccatgcgctggactgtcagcccggcgatctgctggagtaccggccggacgaggaagcctgaagaaagtgaaaagggacaggcgctgcgtagcagcgcctgtcccttttttggcggaatgaggatcatttacccaacaaatgctgctccacgccgccatagagatattggtaattcctgtgcatcatattcttgaagaacggcaccagcagcaccagatccgccgccagccacgccagaggatcggcggcgcacagggcgtagaaggccagctcaggggactgggcgctgaccacgccgccggacagcagggccgggagggtcaggcagatggccacacgggcgatcagctcggatgctccggcccacagcacgaagggggctcgctggatgccctgcacgcagttgcggaccacgaacaggaagcacagcagcaggtacatggagaagtccacatacaggaagtggttgccgaagcggatggtgtcggcggtgaccttgtcggcgctgaggaagatgtggagatatgcgccgtcgatggtcaggagcagacccagccctacggagcagacgccgatgatggcggccatgaccagaccctgcaggatgcccttgcggatgcggtgggtgtacccggcacccagattctgggcggtgaagctggtcatggcggcgccaaggccgttcaccggagtcatgatgaggctattgagtttgttggcggcgccgaagccgttctgggcggcgtgggacaccatctggccgtcgatcatatcgaacttcaccaccacgctttgcatgacgatgatgccgatggccagcacggagaactggaggcccagcggcacgccctgaacgatgtgacgcttcaggtccagtccggtgatgtgccagtcctccttgtggagccgcaggtccggatacttggaaaaggcataggcgaagcaggccacggtgctgatgagctgggcggtgacggtggctccggcggctccggccacgccccagcgcagtaccagaatgaacagcagatccagcgccacattcagcaccgtggagcccagcaggaacagcagcggcgttacggagtcgcccatgctccgcaggaaggaacagatgaagttataaaacagctgggcgccgatgccggcaaagatgatgccgcagtaggtgtaggcggcccggtatacctccgggttctccggcgtcacgttgatccaggccagcatggggttcagcagcaccagcgccagagccgtcagcagcaccgtcagccccgccgacagcaccagctgggcggccatggagcggcgcacaccggcctgatcccggcagcccacgcagcaggaggtgatgacgcagaacccggcgctgacgccgaaggcgaattgcaggaagatgaacaccaacgaggtggtgtcgttgacgccggccacctcctgcgccgtcagggtttggcccacgatggcggcgtcgctgatggtatacacctgctgcagcaggtacgacaggatcaccggcagggagaactgcaaaatggtgcgccagcaggtgccgtgggtcaggtccaccgggtggaacaggtcacgaagggcctgaaaaggttttctattctgagatttttccatagtttacgctcttttctctcgctttttctacgacggcaaattatagcctgttgggcggcggaagtcaagtggagaagggattgcaaacttcacaaacttcgtcattttaacctaaaaagaggtatacaaattgacggaatgcacaaataagacgggcggcatacttgggtcgggacgagcatatagtggagcatcacagaggaaagggcgtggagcgtgtggacgaggcatacgccatccggcggtatcagcaggcggcggctctgctgccgctgcgatggcagcggctgtgccgtcaggtgccggaggagcagcaggcggaggcggaggagctgcggctgcgggccgggcagacgttgacgctgctgctgcggggaggggaggtgccggcggcacgggagcggccctacccggtggtgactcaaacggagctggagcagctgtgcgacggggtgacggactactcccggtatgcggcggcggataccctgagccgggggtatctcacggcacggggcggcttccgcatcggcgtgtgcggcacggcggtgctgcgggacggggtcaacaccaatctgcgggatatctcctccgtcaccattcgcatcgcacgggagcagccggggctttcgacggaggtgctgccccagctgttccgggagggcagcttttgcagcacccttcttctggccccgccggggctgggcaagaccaccctgctgcgggatctgatccggggactgtccgacggtgcagagggcgtcccacctcatcgggtggcggtggtggacgagcggggggagatcgccgtcatgtttcagggcatcccccagatggcgctgggcagccacaccgatgtgctggacgcctgtcccaaggcgctgggcatccccattctgctgcggtcggccaacccgcaggtcattgccgtggacgagatcactgttcgggaggatctgatggccatgtccgctgccgccaactgcggggtacggtttctggccaccatccatgctgctgaccggcgggagctggggcgaaggccgctgttttcccatctgctgaaggagaaggtctttgaaaagctggtgaccatccggcgagaggaggggcagcggcagtatctggtggaggagctgtggtaagggacgtgctggggagccttctgctgctgggaggcgccctgtggctgtggctgggactggtacaggcccagcggcggcagctgcggctgctggaggagctggcggcgtcgctggagcagatggcctccgccattcgcttccggcgggagacgctgctgcggctgctggcggctcagcggcagcgcccattggcgggaccgtactatggagcggtgctggcggcgctggaggagggcatctcttttccggcggcatggcggcagggctttgcggctctctccggggagggtggtcgtatcctgcggcggctggagccggagggggacgagcagaggatattgggtgagctgacatgggccgccggggagctgacggaactgcggagaggactggagcaggagagccgccagcgggaaaagctctggtttgcggggctgttttccggggcgggcctgctgctgatcctgctgatttgaggacgagcaatggatgtggacctgattttcaagatcgcagcggtggggatcctggtggcggtgctgaacctgctgttggtacgcagcggccgggaggagcaggctatgatgaccacgctggccggtctggtggtggtgctgatgatgctggtgcagcagatcagcgacctgttccagctggtcaagacgctgtttgggttataagagatggaggctgtatggcagatcgtggcgttgggactgctgggcgctgtgctggccgctttactgaaaaagcatacgccggagctggcgctgctgctggccgtggcggtatgcggggcggcggcgctggcagccgtccgtggtgtgcgggaggtatgggcctttctggaggacctgctggcggcggtggagatctcctccacgctgtttctccccctgctgaaaacggcgggcatcgccgtggtgacccgcatcggcgcagacctgtgccgggatgccggggagagcgctgtggcctcggcggtggagatggccggggccatgggggcgctgctggcggtgctgcccctgatgcaggcagcgtgggaggtgctgcggtcgctgctgtaagggcggtgtggctggcgtgcctgctgcttctggcgatggtacctgcgtgggcggcggacctgccgcaggaggtgacggacgccgctcccccggcggcggaggagctggagggaaaggacttctccggcggcgtcaccgctctgctggagcaggggacgactcttctgggggaggctctgcgggggaacctgcggggagcggtgctgatcttaggggtggtgctgctgtgcggggcggcggatgccgtgcttcgcaccccggagagccccatgcgccgttttttgcccatggccggggcggcggccattgcggtgctgtcgctgggcagcatgaagagcctgctggggctggggacccagaccatcgaggaattggacgtgttctccaaggcgctgctgccgacgctggccgccgctgtggccgccggagggggcgccgttaccgccggaacgggacaggtcatcgccgtgtgctttgccgatgccctcattaccctcatccggggactactgctgcctatgacgtactttttggcggcggcggccacggcggatgccatgctgccccggcacgggctggggaccgtcgccaaggcggccagccgggtggtgacgtggcttttgacgggctcactggtgctgtttaccggctacctgaccctgtccggggccgtcagtacctcggcggacgcactgacggtgcaggtgacccgctccgccgtaggggccatgccagtggtggggcgcatcctctccgatgcggcgggcagtgtgctggccggggcgggcgtggtgaaaaacgccatcggcgtattcggcctgctgggggtgctggcggcgtgtctgggaccctttgtacgtctgggggtgcagtatcttttgtacaagctgacggcgtttctggcggggatgaccgccgctccggagctggcgaagctcatcgatgcgctgggtggcgtgttcggcctgatgctgggtatgaccggcagctgcgccctgctgctgctcatctccatctcctcggccattctggtggtgacgccatgatggaaacgctgcgagggtggctgctgggcctgaccgctgcggcgctggcggtgtctctgctgacggcgatgctgcccaagggggagaccatccgccgcatcgccgggctggcgggaggactgatcctgctgctggcggtggtgcagccgctgctgcgggtgcggtgggaggagctgacgtggcggtacgagacgtatcagcgggagatggaccggcagacggaggcgtatcaggcggcctacgccgacagtctgtccggggacatagccgaccgcaccgccgcatatatatcggaaaaagcggcgtcgctgggcatcgactgccgggtgcaggtggaggttcgcacggaggatggcctgcccctgccctatggggcgtcgctggacgtggaaagggatcaggtgctgtcggactacatggcgcaggagctgggtatcccggcctcccgccagagctggcagccggaggagtgagggatggacagggaaaagctaagggatatcttccggaaataccgggccgtggggctggtgctgctggcgggccttttgctgctgcttctgcccacgggcaagagcagcggacaggagcggcagacgagcgacgatacccagctctactcgctggaggagacagagcagcgcatggcccagctgctgggcagaatgagcggcgtgggccgggtgcaggtgatgctgaccttaaagaccggcccaaccctccagctggcccaggacatggatctggagcaggaggagggcagcctgcggcagcggagccagccggtgacggtgaaccggggcagcggctggcaagaggcgctggtgacccggcaggactacccggtgtatcagggagcggtggtggtgtgtcagggggccggcagcagtgccgtgcgtctggcggtgacggaggccgtggcggcgctgacggggctgtccacggagaagatcacagtggtgcaatgggaacaataacaggagggacggacatgaaaacggtgtggaaacggcgaggtgtggcggcggcggtactgctgctggtgtgcggtgcggtgtacatgaactggcggtacagcgacagcgtcaaggacaacaaggtgctgggccagtcggagttggtcaacgccaatgaggagacggcaggggatccggccccggcggaggacgattatttcgccacggcacggctcagccgcaagcaggcacgggacaacgccatccatatgctgcaggaggcggagaacgacgaaaacgccgaggagagtgttctcaacgaggcatcccggaccttgcaggtgctggcgtcgtacacggtggccgagtcccagatcgagagtctggtgacggccaagggctacgccgactgcgtggtgttcatgggggaggacagcgtcagcgtggtggtggcggctccggagacgggactgaacacggcggacgtggctcgcatcaaggacattgtggtcaacgagacggactacaccccggagcagatcaagatcatggaggcaaattagtggttgtattttcccgctgccgatggtataataccaatgattcgaatataccaaaagaacgggagtaagattgctatggctgaaaataaagagtatatcacccgtcaggagagcatgggtaccatccagatctccgaggatgtggtggcgtccatctccagctctgtggcgctggagacggagggcgtgggcggcctgctcaacgccaatatggcggatctggtgggcggcaagaagatgaccgccaagggcgtccgggtggagatggccgaggacggcgtggtggtgaacctgtttctcatgatccgctacggttttgccatcgctgaggtggctcagaaggtccagaacgccgtctattcggcgctggagggcatgaccggcttcccggtgaaggcggtcaacgtccatgtgggcggcatcagcttcgactgagcaggcataggatacgagagaaaaggacgaaacgggtatgacacgcaacacggcacgggagatcgccgcccatctggcgtatgaatggaattttacggacctcccggtgggggagtttctggaccggcggctggcgccggagtgctttgcggagctggcgccggagtgcgggctgtacgccgatgcccccaacgccaagcaggcgcagtatatccgccgtctggtggcgggcgtggcggaccatgcggcggagctggacgactacatcgcccggtacgcacagggctggcgcttcgaacgcatcccgctgatggcctctgccgtcatgcgggtggccatgtatgagatcctgtatatgccggatattccccacggtgtggccatcagtcaggcggtgcagatcgccggcaagtacgagtccgccgaggcggtgaagttcatcaacggcattctggccagcttcctgcgggaagaggtcaaggactgacacatcacaggcagagcaggtgcgcttgctctgcctgcactgcattttcaggaaggaggaagcgatggaaggccagatctataccgtatcggaggtcaacggcttcatcaaaaacgtcatcgacggcatccctcagctctccggcatctacatccggggggagctgtccaactataagatatacccctccgggcatcactacttcaccctgaaggacggggagggcgctctgcggtgcgtcatgttcaagggcagcgccatgaagctgcggttccggccggagaacgggatgcaggtcatcgcctatggccgcatcagcgtgtttccacgggacggggcctatcagctctactgctcccagctgtcgccggacggcgtgggggatctgtatgtggcctttgaacagctgaaggacaagctgtaccgggagggactgttcgacgagggacacaagaagcctctgccccgatacccccagcgcatcgccatcgtcaccagctctgccggggcggcgatccacgacatgatccgcatcctgcggcggcgctaccccattgccagggtgctgctgctgccggtgcgggtacagggcgtggaggctccgccggagatcgtgggggccatccgctacgccaaccgctggaagctggcggacgtactcatcaccggccggggcggcggctccatggaggatctgtgggctttcaacgacgagcgggtggcacgggccatctatgcctcggagatcccggtgatctccgccgtgggacatgagccggatgtgaccattgccgacttcgtggcggaccgccgggcctccacccccagcaatgccgccgagatcgccgtgccggacatggcggagctgctgcagcggctggacagcttccgcagtcgtatggcgcaggggacgctgaacgggctggagcggcaggagcggcggctgaaggcactggcggagaagcgggtgctgacagacccgctggcctttgtgcaggataagcggctgcagctggactatgtgcagcagaagctgctgacggcggccaatacccagtggcaggaggagcagcggcgctttgcggcactggcggccaagctggatgccctgagccccctgaaggtgctgggccggggctacgccatggcccggacggaggacggcgcagtgctgcggacggcggcacaggtgcagtccggagataccattcatttgcggctggcgcagggcggcctgcgctgcacggtaacggaaaaggaggaagcgtgatggcagacaagacctttgaagagaatatgacccggctggaggagatcgtcacccggctggaaaagggggacgtgcctctgagccagtccctgtccctgttcgaggaggggacccgactggcggcagcctgccgcgcggagctggatcaggcggagcagcaggtggtgcggctgatgaagggccccgacggcgctccggtggaaacggaatttgcaagcgaggaatgaccatggattttcacacccgatatgccgcctatcaggcggccattgaacagtatctggagggacttttctccacggataagccctatggaagattgcaggaggccatgcggtacagccttctgagcggcggcaagcgcattcggccggtgctgacgctggagctggcccgtctgggtgggatagactggcacctggccctgccttatgcctgtgcgctggagctggtccacacctactccctcattcacgacgacctgccctgtatggatgacgacgatctgcggcggggaaagcctacctgccataaggcctacggcgagacgctggcggtgctggcaggggatgccctccagccggaggccttccggcttattgccgaggccccctgtatgtcggcggagagccgggtggaggccatccgggtgctgtcccacgccgccggcgccgacggtatggtggccggtcaggtgatcgataccctgtgcggtgtatccacccaacaggagctgacggggatgtaccggctgaaaaccggggtcatgatctcggcggcggcggaattgggctgcgtggcgtcggggatgccggcggccatgcggcagcaggccatcgcttttgccgatgaattgggcttggccttccagatccgggacgatatgctggacgtggtgggcgacgaggctgtgttcggcaagcccatcggttccgatcgagaggaggggaaggtcacctttgtggacgtgctggggctggaaggctgccgcacggccgtggaggagtgtacccgccgggccgaggaggccatcctcccgtggccggatcacgacttcctactgacgctggctcactcgctggaggagagaaagaagtaagggatagataaaaaggatcggtaaataaaataccccgccagtcaggcggggtattttgctgccgatgggaggagcggaaactcatggcggcggctcccgtggcgcagaagcagcgcaccaccagcgcaagggccgccttccccggcggccacggcaaaggtcaggccctccgccgtcccggccagcagggcgctcagcagggcggagatggcggacatcatggcgatgttggccgccagcgcacaccatagagcggcgggattcgcaaataaaatctcctttggggtgaaggaggtcgggatacggggcgtttggcggcgggacttgacagcggagagagggtgtggtacatttgaaacaaatgttctggacaagaggaacggatgcaggcagggggcggagagatgtatttcggctatggtgagacggagcttcagtatctgcggagcagagacaagcggatgggggaggtcatcgaccgggtggggatgatccggcgggaggtggacccggatctattcgccgccgtggtacaccacatcgtggggcagcagatctccaccaaggcgcaggccaccgtctggcggcggatgcaggaggcgctggggaccgtggacgccgggagcgtactggcggcgggaccggagggcttgcaggcgctgggcatcagcgggcgcaaggcggcctacatcacggactttgccctccgggttcagagcggagccttcgacccggagacggtgcgggagagcagcgatgcggaggccatccggcagctgtgtaccctgaagggcgtgggggtgtggacggcggagatgatcctgctgttctgcctgcaaagaccggatattttcagctatgacgatctggctatccagcggggactgcggatggtgtatcaccaccggcaggtgggccgggagctgtttgagaagtatcggcggcggtacagcccctacggcagcgtggccagtctctatttgtgggcggtggccggaggtgctgtgccggagctgcgggactatgggccgcagggaaagaaaggggcgaagtgatatgacagcgtggcagagctatgcttccccggtgggggagctgctgctggcggcggacgaggagggcctgacgggcctgtggttggcgggggagaagtatttcccgggcgcaccggagggcgctccgcaggagacgccggtgctggaggagaccaagcggtggctggatatctattttgcgggcagggagccggacttcctgccgccgcttcatctggcaggctcccccttccggcaggaggtgtgggcgctgctgcgacagatcccctacggcgagaccaccacctatagggcgctggcggaggccgtggcccggaagcgggggctacggcggatgtcggcccaagcggtgggtggggctgtgggacacaaccccatctccatcatcgtcccctgtcatcgggtggtgggcagcgacggtagtctcaccggctatgccgggggactggagcgcaaggtgcagctgctgaggctggagggtgtggacatgagccgcctgtatgtccccaagaaggggacggccctgtaaggaggagcgatatggagatcaagaagctggatcccgcccagtggcgggggtatggcttcacggcacggtatcagaccggaggctgctgggatatcgtgccggtggaggatggattccggatggagcaccattccttcggaaaggtggaggagcggtccttcaacgacaccctgttcggggagtggctggaggctccggtggtgtacggcgcttttcaggatggggagctgctgggcattgcggagggctctccggagtcgtggaaccaccgatggcgcatcagcaatctgtgcatttttcaggagaagcaccggcgctgcggcgtggccaccgcgctgatggagaagatgctggaggaggcggcccccatgcggatggcggtgctggagacacagacctgcaacgagcgggccattgccttttatcggaagtgcgggtttgagatcatcggcttcgacctgtatgcctacaccaatcacgacccggaggcccacgaggtgcggctggagatgggaaagaagctcatatgaagaagagacgccgtatgccagtggcatacggcgtctctttttcatgtatgggggattacagggcggcgaagatgcagctgccggtctttttcacccaaagggacagcacggcggagagaatcagcaccagcgccgtgacgacggagagatagagcagcgggtccaagctgccgatgcctgtcagcagatagagggcaccggggatcatggccacggcccaaccgctgaagagggagagggccacgcaggcactctgcttgatggggaccacctcgttggtccagctgaggttgggcattttcaggcccaggaacaggcccagcagagccatcagcagggcataggacagggcggtgacggcgatgaacagcagttccagaggggaaccggggtacaccgccagcaagcacacaaggcacagcagcataggtggtatagtaatcagaagctggagccgcagcttggcccgcagcacctgccacggggataccggcagagactgggccagccagagctgcttgccctccagcgagacggagggggcggtggtgtcgttcatggcgctgagcaggcacaggacgaaggccagcagcaccggcatggcaccggatctttcagggaaggactgcgacaccagctccagcagctcccggccctgccacaggaggaagccggaggccagcaccagaaacagtgtgccgaagccgcagttgagcatatagttggcgctggaggtgaagcggcgcagctcccggtccagcagggcggaggaaatgctccggcaccggacggccttggcccggtagaccttgcggcccacatggccggaggccgtggcgatggagaggaagctgcgggagagcagcagccacgtcaggccgaacagcacggcgatggctgccgtcagaagcagcatggacaggggatcgccggctcccgcctgaccgaagaggtacacggggtaggcggaggagcggaccttatcgccgtagagggcgatgttctgcagcagctccgttagcagggagttggctttgaaggagaagaagtagtagtacaggccgaagaacaccagcgacagcaccacggtgacgaagcttttgttcttcagcttcaggctgaccttggccaccacccagcccagcaggcaggagatggccatgacgaacagggagatcagcagcaggaacagaacgcccgccagcaggtgcagaggagcggcggagacggttacccaatagacgatgatggccggcagcaccaccacaccggagtacatgagacccatgaggtacacccccagcagccgggcggcgatgagggtattcaccggaatgggaagggagagcagctggtcattgtccttgggcaggtagaggctggaataggtggtgaacacgctgccgaaggcacccagcaggatggccataaggcccatgatggcgaaatagaaccagctcatgccgaccttcgccatatcctgacacatggcgagggacagaagggtgaacatcccgccgatgacgcctaccatcagaaggatgaagaagatgaggtagcccacggtggccgctttggagcgggcccggttcttcttggcatcgtagaggtaggcacggaagatctccgtcagctgctttttgacaagaagcttcagcatgactcgccctccagctccagaaagacctcctccagagagtcgtcgcccttgacctcctccatggtgccggagcggatcagcttgccgccacggatgatggctaccttgtcgcagagcttttccgctacctccagcacatgggtggagaagaagatggcgccgcctgcgtcgcagaactcccgcatcatgcccttgagcagatgggaggccttggggtccagacccacaaagggttcatccatgatgatgagacggggctggtggagccatgcggagatgatggccagcttctgcttcatgccgtgggagtaggcggcgatgggctgagccagatcgtccgtcagctcgaagcgggcggcgtagtcgtggatgcgctgcccgcgcacctccgagctgacgccgaagatgtcagcgatgaagttgagataccgaatgccggtcatgtagtcgtacaggtcggggttatcggggatataagccagctcccgcttgcaggcgatggggtcggtgcggatggacttgccgccgatggtgatctccccggcgtcgaattgcaggatgcccaccacggagcggagggtggtggtcttaccggcgccgttgtggccgatgaagccgtaaatttcgccgggggcgatgtgcagggacagatcgtccacggctttcttttcaccatagaccttggtcagatgttggatgttcagcataataatgatcctcatagtccgtagagatgggtaggaatgatggacatacgatgcagtgtatgatggatattataactgacatgacggaaaatgtcaatatgcggcggcgggagaggggaaaagggacgcccggaggatatcctccgggcgtcccttttttacttgcgggggggcatcagtcgatgtccagataattcttcaccagagcctgcagcagctcgtcccgatccaccttgcagatgagggtgcgggcggagttgtggttggtgatgtaggtggggtcctcggacaggatgtagcccacgatctggttgatggggtcgtagcccttctccttcagcgcctcgtaaacggtggtcaaaacgtgatgaatttgcacggatttgtcctgtgcggcgttgaatttgcgggtgaaatcttccatggggacacacctccttccgtactctgttactcattatacggcttttttcccgttctgtaaagagggaaagcggcaaatgacggttcttttattttccccgcagctcggcgcccacgtgctttgccagccgcttcacggcggaggcggcgcaggcctcgatctcctgagaggtcagggtcttttccgcagaaccgatggtcagacgcagggtcacggacttcttgccctccggcacctgcttgccccggtactcgtccacaaaggatacgccgtggagcagctcgtggcgcttttccagaatagcgtcccgcatagcatcccaccgggtctcgccgtctaccagcaccgacacgtcgtagtccgtcatggggtactccggcaggtgggtgaaggtgttggtgcgggagcggaaggggatcaatgcgtccatgtccagctccagcagcatcaccgccagattcttgatgccgcactccatggataccttcttgctcagcagggccagatcaccgatgtgctcctcgcccagatacaggttcagccacaccacggtgtcggcccacacgggcttttccacctgacggagggtataggcctccatatgggtgtagcggggcatggcctccaccacgcccttggcccggcggaacagggtggtgatgtccttgtcgctgcccacgaaggcggcacccagatgcttgcgctgggagggcagcttctcccgctcatcgtagggagtggtgtagttctcgtcccggaatacctgcgccgtctcaaagagggagaagtcggtgaagtagcgctcgttctttaccactgccttgcagagattgggcagcagggaggagcggatcatcttctccgtgggggaggggggcgtggacagggacaggatgccggtggtatcctgcaggatggcgtttacatactgctcgtccatccacgggtaggtgaagatctcctgtagcccgcagcggatggccagatactccttgatgcgccgctccagatccttatccagctggttgatggccccgtcgaaggaggtggtgatgggggcggcctcgaagttctcgtagccgtacatccgggctacctcctccataatgtccgcctgaatagacacgtcgccggtggagcgccaggagggaacggtgacgtgcatggtgtcgccgctgaaggaggtggtaaagcccagcaggcccagcttatgggatacatcctcctgcgtcagaggtttgccgagacggcgctccagccagctgagagccacgtccagctccttgcaggccatgggggcggggtagtggtccacaaggcccgtgaactgcacctccggatacagatggcggaacagctccgccgccagctccagcgcctgatcgcagcgctgggggtcgatggccttttcatagcgggaggaggcctcggtgcggttatcgtaacgcagggccgtccggcgaacgccggcggcgttgaagttggctacctccagaatgaccttgtgggtggtgggcaggatggaatccttggcgccgcccatgacgcccgccagcgccaccacaccggcatcgtcggcaatgaccagatcgtcggcggagagggagagatccttgccgttgagcagcagcagcttttcgccctcctgcgcccggcggacgatgatatggccctgaatgttgtcggagtcgaaggcgtgggtgggctgaccggtggccagcatcacatagttggtgatatccaccagcgcattgatgggccgcatccccgcacgccacaggcggctctgcatccagaagggggaggacttgacgcacacgccggtgagctcagccccgatgtaccgggggcagcgctccgggtcttccaccgtcaccgtcaggtcgccggcaggcagatcacgggggaagggccggaaccgggacaggggcagcccgtacagggcggcgatctcacgggccagaccgtagtggccccacaggtcggggcggttggtcatagacttgttgtcgatctccagaatgatgtcgtggagatccagcgcatcggcaatggaggtgccggcgggtacgtcaaaggcgctgagatccagaatgtgggcctcctcgtcggtggggaacagatcccccagaccgatctcggaggcggcgcagatcatgccgtagctcttgacgccccgcagcttggattccttaatttccaccggctcaccctcgccgtgccagcggcacagggcgccggggcaggccacggccacccgcatcccggcggtgaggttggtgccgccgcagacgatctcccggatatcgccgccgccgatgtccgttttgcagatccgcagcttgtcggcgttgggatgggggcaaacctccgtcaccacgcccaccagcatatgctcgaagcgcttggccaggtcctcggcgccctccacctccacggtggacatggtcaggtcataggccagacgagtcaggtccatatcctccgggagctttacataatccttgatccaattcagtgaaactttcatgtgtcgtatcctcccttaatggaactgacgcaggaaccggagatcggcgctgtggaacaggcgaacatcgtccacgccgtagcgcatcatcaccagccggtccagaccgatgttgacatagaagccggtgtattcatccggatccagccctgccgcacgcaggacattggggtggggcgtgccgccgggcatgatctcgatccagcccacgtgcttgcacacgctgcagcccttgccgccgcagaccagacagcccatgtcgatctcgaagccgggctccacgaaggggaagaagcccgcccgcatccgcaccgggacgtcccggccgaacaccttggagaggatgctcttgatcatcaccttgccggaggcgaaggtgaagtccttgtccacgatgagggcctcatactggaagaaggcacgctcgtggcgggcatcggtggtctcgttgcggtacacccggccggggtacacgaagcggtaggggggcttgtgggtctgcatataccgcacggagccgccggtgaggtgggggcgcaggcagagcttatcccagcactcgcccttgtcgtggccctccagccagtaggtgtccatgctctcacgggcggggtggttgggggggaagttcagattgtcgaagccgtacagctcactggtaatgtcggactcctcgaaaatctcgaagcccatggagcggaaggcgtcgttgaggtcgtagcacatctgggtgatggggtgcagaccgccggacggaggcaggatgccggggacggagatatcgaagtccggcgatacctcggaggccttcagcttcagctcctcccgccgctgatccagcagcgccgtcagctgggccttggcctgattcaccgccttgcccatctccggccgcagggcggcgtccagcttgggaagctccttcagcagccccgtcaggctgccctgcttgcccagcagcagggccttgacctcctgcagctccgcttcactgcggacggcggcgatgcggtccttgccctcctgcagcagttgtgtcagtttttctttcatgtgggtcctcctccgtatcggatcagatttttgggacgaaaaaagcccttcctcccaaataacttgggacgaaaggcatagaacttccgtggtaccacccagcttcgcagcagcagctgcgcactcgtttccccataacggaggatgacccgtccgtgcatttcctcacggctgctcccgggcgaacaccacagcgcctgacgaaccggcttccagccgatggccggtcctctcttggaaaggcgtttcctgcggaacttcccgttcaacgcatttacctaccatacttataccacagccgggagaaacttgcaagggggaatttgtccgccgccgggagaaaacggcgaaaaaccggaggagggacggctgtccctcctccgacggggtcggtatggcgctcagccccagagggccttcatcagttccgggtaggcatcgtcacagatgttgatgcaccgggagacatactccagacagatatcccccacatcgtggctgcggaaggccacgtcggcctccgcctgcacggtgtggtcattggtatcgatgacgaacttcacgaagcggaacctggcgttctgctgattgatggcagccagcatggtgggcagcttgctctccgggaatttcaccagatcgaacatccggatggccaccgcctcgcagtcctcatcgaagaagaagcgcagcgtcagggtggagatgttctcgcaggtatagcccagcacgacaatgtctttgccggagtcggtagtacccttgtactcatatttgatgcccttgttgtccatggcatcggtgaactgtctggtggaagaaagcataggtcgtacctcctgaagatttcgtttatccaagtataggggatacggcggcggatgtcaatacggccccggccaaaatggggagggggtgtgttttttggagaaagtgtggtatactcgcctcagaatttacgatgcgggagggcggatcatggcgtatgagaggaaggccgagcccatcggccgggagcttgtgaggcggctgttgcctcgccgggacccggagggccacaagggtaccttcggtaaggtgctgtgtctgtgcggcagcgtgggctataccggagcgccggtatttgccagccgtggggcggtgcgttccggggcgggactggtgtttctgggggtgccggagagtatctggccggtggcggcggtgaaaagcgacgaggccatgccctttcccctgccggaggcggagggaaggctgtccctgctggcggaggagactatccggcggcgtgcggcgggctgcgacgccgtgctgctgggctgcggtctgggccggggccggcagacggatgcgctggtgcggcggctgatggatctgccccagccgctggtgctggatgccgacggcataaatgcgctggcggggcatatggatgaatgggagcgacggcgtggccgggtgacggtgctgacaccccatgagggagagttcctccgggtaggcggcaatctgtcccaagggcggactgcggcggcggaggactttgcccgccggtccgaggccgtggtggtgctgaaggggccggggaccgtggtggccgggccggacggccggtgccgggtgaacaccaccggcaactgcggcatggccaagggcggcagcggcgacgtactgtccggggtggtgctggctctgctgggactgggcatggacgccttcgatgcctgctgctgcgccgtatggctccacggccgggccggggatctggcggcgcaggagaaggggcagtggggcatgacacccacggatcttctggagcgtctgccacaggccctgcgggaagtgacggaatagagagacggcgggaaacggagagccttccggaagggaggagacgttgagacgaggaatgtatctggcggcggcgctgtgcctgctgctgtgcggctgcgggaagaagaatgcggctgaggcgcaggcggtgcagcagcggtatgcggccctgacgggggccgtggcagaggcggagatcgtgagccatccggagggggagactcgcagctttacggtgcgctgcacctgtgaccggacaaaagacacggccaccaccacggtgatggccccggaggagctggcggggctgtccgccaccgtcaccggggagaagctgctgatccagtatgacggtccggcgctggcggcgggagtgggggacaccgtgtccccggccaactgcatcccctatctgctgcgggcgctggcggaggggtatgtgctggaggtgggggaggagacgctggaggataccccctgcctgcggctggcgctggacaccacagacgccgacggcgagaaggtggtgtgtaccgtgtggctggcagaggaggagccggtgtatgcagagctttcacgggaagggaagctgctgctgtcggtgcgcttcacggcgtttcagcagaccaaaagcgacggtggagaataaaggcaagccttgaccgtcctgtgagcctatcaaaaaagggagagcccttcgtcaacggggcggaagggtgtgtgcgggaaacccgggaagggtgtcctgcacgatgatgatccccatttttcagaactttttgaagttctgaaaaatgcctcagcgtgtcgaaaaggctttttcgacacgctgacaggccggaagtacttgacttccggcctgtttcttacatttatttcttccgcacggcatagatgaccaccagtagacccactgtggcgcagatggtgcagaacagcagcatcccatttacgccggttcgatccagcagctggccgctgacgaagttgccgaaggcggagccaacgccggtagtggccatgcccatgagggactggcccttcacctgattggccgggtcgatgtgttcggccacatagtataccgtggcggggatgaaaatgccgtactcgaagaagtccagcgccgccgccagatacagcaccggcaccgaccgggctgcccagaacagcccggcccggatgacgaagaagacggcgcagaagatcagcagccacgccaacggtaccttccgccgcacccggctgaacaggcccatggcgggcagctccagaaacgccgctaccgccagcgccgagcccatcatgctctcgctgccgcccaccttgcccacgatatggatcatgtaggtacaggtggcgctgtggcaggccatcagcagcgcacagcccaccagaagccatgtgtaggcggggtagcaccgcaatagctgtcccacggacagcaccgggccgcttcctgcggcggccgccgccgtgggggaggcccggaagcgccacgtcagcagcaggagcagcagcatttccccggcaaataccggcagcaccgccgtgggggcgtaccgctccaccaccacgcccagcaccagcaccgatgcggcgtagcaggcggaaccgagaccccggctcaggccgtagttcagggccacgccatgctgctgcagctccatggccatggcgctgtggaagggggccgtggccgtcagagagatgcccaccagcacatacagggccgccgtcaccaccatgctcccggcggagcaccacagccccacggcgcacagcagcagaagtcccgtcagggccatggccagacggcggctggtgaagcgtcggtcccggtccgccagcgacgccagcaccggctgcaccgccaagggcatcagcagcgccagcgcagacaccgtaccgatctggctgttgctgaagccacggtatagaagcagcaccgacaaaaaggcccatatggcggcaaagcccgcccagtaaaggctctggatcccggcgtagcacaggttcagctttcgcagctgtccgctctccatgaacatccctccctatggttcaaaagtgtagtatcaaaagcgggccatgtcaagaaacgatttttcttgacattttttgtcctgctattatacttaaatgcgatcgattccattgtccgggaggaacacgccatgtctgtcattatccgggacgcctgtatctccgatgcgccccgtctgctggaaatttacagctactatgttcagcataccgccatcagcttcgaatacaccacccccacgcaggaggagttttgccgacggatgcggcacatcatgagccgctacccctatctggtggcggaggtggacggcacggtgcagggctacgcctacgccggggcttttgtgggtcgggccgcttatgactggagctgtgagctgaccatctatctggcccgcgacgcccggaaaatggggctggggcggcagctgtatacggcgctggaacagcggttggcgcagatgggggtgctgaacctctacgcctgcatcggctggccggaggcggaggacgagtatctcacctgcaacagcgcccagttccatgagcatctgggcttcacgctggccgggaccttccgccgctgcggctataagttcggccgctggtacgacatggtctggatggagaagctccttgcgccccaccggccccagcagccagccattattccctatccggacctgccccacggcgaaaacgtgtgagggagagaaataaaaaacctgcggtacacggtaccgcaggtttttgttgattttttcggttttccgcaggaaaaacgggacagagagcctactccaccgtgacgctcttggccagattccggggcttgtcgatgtcgcagccacgctccagcgcaatgtagtagctcagcagctgcagcggcaccacgcccagctggggcagcagcatctcctcggtgtcgggaatggtcatcagcatggggacacgcttgcccatctccccggcatggctctcggtggtcagggccagtacctgtgcgccacgggcctgcacctccaccacgttgctcatggccttgtcaaacagcggggtatatgtccccagcgcaatgaccagcgtgccatcctcaatgagggagatggtgccatgcttcagctcgccggaggcgtaggcctcggagtggatatagctgatctccttgagcttcaggctcccctccagcgacagggcgtagtccagattccgaccgatgaagaacacatcctcccggtcggcgcagcgcttggcgatgtcgtggatgtgctccgcctgctccagaatacgctccatctgctccggcagcttttcgatgcctcgaaccatagcgctgtacaccgcatgatccagcgtccccatgacctgactgaaatacagccccagcagattcagcactgccatctgggtgctgtatgccttggtagtggccacggcgatctccggcccggcccacgtatagagcaccgtatgggattcccgtgcgatagaggagcctaccacgttaacgatgctcaggatgtgggcgccccggcgcttggcctcccgcagggccgccatggtgtccagcgtctcgccggactgactgatgacgatgaccagatcgcccttgcccacgatgggatcgctgtaccggaactcggaggccagacacacctccacgctgcgccgcagcatccgctccagattgtacttgcccaccatccccacgtggtacgacgatccgcaggccacaatgaagatcttgttgatgtcccggatctgctgatccgtcatgttcaggtcccgcagcaccacctgaccaccttggatgcgggcggcagtggcctctcggatggcacggggctgctcatggatctccttgagcatgaagtgctcgtacccgcccttctcggcggcggccacgtcccagtccacatggcgatgctccttctcgatgggccgcatctggctgtcatatacccgaatgcccttagcgctgagaatggccagctcgccgtcatccagataggcgatgtcccgtgtgtggcggatgatggctgtcacgtcggaggcgatcatgttctccccctcaccgaagcccagcagcagcggcgcatccttccgggcgcacagcagacggtccgggtagtcggcgcagatgatgcccagagcataggccccgtccacggcgtggagcatccggatcatggcctcaaagatgtcgccgcagtcggcatagtagtagtccagcagctgggttaccacctccgtgtccgtctcggaccggaagctgtagcccttgtggagcagctgctccttcagctcggcatagttttcgatgatgccattgtgtaccacggcgatgcggccactctggctcacatgggggtgggcattgatgtcgttgggctccccgtgggtggcccagcgggtgtgaccgatgcccagatggcccggcagatccgccccgtcgtgggtcagatcgctgagcacctgcagtcggccacgggacttcttcacccgcagctgcccatcgccgcacacggcgatgcccgccgagtcgtagccccggtactccagacggcgcagaccgtccaacaggatgggagccgcttcctgctggcccacatatcctacaattccgcacatatcttaaaattcctcctgaaatcgcttgattcatcggcccatgcggatacgcagtccatccgcatgagccactccggtcacagcctctctgttttgcggtcacccgcatatttaccggctgcgtcacgcacccgaagcggcacgggagagcttccgccgaaacgctcgatcctctctcctcctcgttgtcctgccggagggcaggcactggcgcttgtgatgggatattcccatggcctcctttctctgctgcgtctttataaaaacagccctggctgcttctatcgtggataattttccctcctgcggcaaatactgccggaaaaggagggcgcttattcatggcaacggcatttttccgcaccgtcattctttatctcctgctgattgcaggacttcgcatcaccggcaagcgtcagatcggagaactggagcccatcgagctggtgctgaccatgcttctcagcgatctggcctccgtccccatgcaggatttcggcatccctctggttaacggcatcgtccccatcgtcacgctgctgtcgctgtccatgctcctcagctatggaagtctccgcagcgtccgcttccgcacgcttctgtgcggggagccgacgctcatcatccgcagcggccacatcctgcaggatgccatgcgccgcaaccgcctgacagtggatgaactgctggaggctctgcggggacagggcatctccgatctgcaggaggtgaagtacgctgtgctggagaccagcggtcagttgtccgtcctgccacgggcggactgccagccggtgacgccacggcagctgtctctccagccggaggatccacagaccctgcccaccgtggtcatcagcgacggccgcctgctgcgccgcagcatggagcggctggggctggacgatgggtggcttcaggcccggcttcgggacgccggggtccggtcaccccgtgaggtgttcctgctgtcggtggatgaggcgggcagcgtggtatgcctgcccaaggaggggaaggcatgagacgtgcgctgatcctgccgacggtgacgatccttctgctgctgggactgtgcatcgccaacgggcttttgctgcggcagcacacggaccggtggtccggcatggctgccgagaccgcccgatacgcccggtcggagcgctggccggaggcccgccgggaactggacgctctggcggcagactgggacgaagcccagatctatctgcacatcgtggtgcaccatagcaccctcgatgaggtgcagacgctgctgacccgctgccgtaccctgtgcgataccggggacccgcaggccctgctgccggagctggcagagctgcaatgtcagctggatgcgctggatgcgctggagcgcatcagcattcggaatatcctgtgatcatttttcgctgaggagcttgttcagctcactcatgaaggtgttgatgtccttgaactgacgatacaccgaggcaaagcgcacataggccacctcgtcggcctttttcagtttctccatgaccttctcgccgatgatctcggtgctgacctcccgctccagagagttctgcacctcctgctcgatctcgctggccatgcgttccatgtccgccaccggcaccggccgcttctcgcaggagcgctggatgccccgaaggatcttgctgcggtcaaagctctggcggctgccgtccttcttgatgaccaccatgggcaggctctccaccgtctcgtaggtggtgaaacgcttctcgcaggacaggcactcccgcctgcggcgaatgctgctgccctcgtcggcgggccgtgaatccacgaccttactctcccggaatccgcaatagggacatctcatatgcttccgcctcccgtttttcggcggatagtccgccagtttgggagtagtataccacattcctacaagatatggtagcataaatgtaaatttttttatgtctcccggtcctccagtgcaaaaatggcccactcccggccccggagggttcggacactggccagacagaacagccccgtcagcgggaaggggccgtcctcccggaagggcagggccagataccgccgccgtccggcccggcggcacagagcaccctccggcagtgccagtccgggaaactctccggcccatacgggacgccaatcctccggggcggataccggctccgctgccccgcccagcagcgctcccagcccctccgtcagctgccgggagaatcgccgctggaggataccctgcccgccctcggcgcagcccagcagcagccggttctgacggcccacagcgtagagccgccacaggccctccgtcagccggtattctgcccggaagcaggtgtctgctccctccggcgccgccgtcaggcggcccacctcctgtgcgccccagcgcagggtggttcgattttccatggtgacctcctttcagtggagcattttgcataaggaacgtgcctccggcggcctacttttcccagcagctggaaaagtgggcaaaagagccgccagacaccgatggtttctggacttcctttgccttcaagagtttcattcgataggggacgtaaggggaattgactcagcaacagacccgctgccgctcccactctgatgacgggacctgtgcgtctaccgctaagaaatgcggattcccacgaccagtttggactggtttcggaatgacaggatgagaggtattttccggcgggcgaaagctgatctcccccacaacaaataaaaagggagggccagcgcattctatgcactggccctcccttttatgctccgtccggtatgtagcgtcataccagacggctgctggacagtccgaagctcacggcaatggcggcgtctacccgctgcatcaccgttccgtccaccttacccatccgctcccgcagccgccgcttatccagcgtacggatctgctccaacaggatcaccgaatccttgggcaggccgcagcactgggccgccacctcgatatgggtgggcagcttggccttccccgtctgggaggtgatggccgctgcgatgacggtggggctgtggcggttgccggtgtcgttctgcacgatgagcaccggacgcacgccgccctgctcactgcccaccacagggctgagatcggcatagtagatctctccacgtctgacattggtatccacaaagtccacactccgccggaagaagtacccgccgcagcgggtcaacttcattctcccacgcagccgccggatttatacgccgccggggaaaatccctgaccggcgctgcccccgcatcatcctatgcctgagctgtaccggcggttcgcaccttggcggagcggcggagcagacgcatcagcagcgagacgcagcactccaccacggcggccagcagcagggagataaggatggtgccgcccaccgccagggggaagtagttcagctgatccgtcaccgaggggacggtagatttcagcatggtgtacaggtagttgtccggtatccacgacaccagataagcaccgagggtcagcttggagagatagccggtaaagcgtgtaatggaagtagggggggtggaatatcggatggagttcagcagaagaaataccagcaccgtgtccaccacgttttgcaggctcccccagtcgcaccagctgccccagacgaaggggatgccctgattgcgccagacgttgtagccgccgaagcacagcaccgccagcagcagaagggccgccagccgcccggtccgcaggcgcttgatgtccacatgggcccggagatagcctcctaaaaagtaataggtgatgggatagagccgctgccaccagtccggcaccagctggtcataggaggtgctgagccacggatgcagcagggtctcggcactatgcagattgtagatattgaccataccgggcagcacggtcagtaccagcagcaccgccagcagggcccgccgggcggcgggggtggcgagactctgccacagggcgttgagaaacggcgtcagaagcagcagcccgaagtacatattcatgtaccacgaatactgctggaagctcagcagattcttcacggcgctgcggatggtctgctcctctcccagccatagcatccggtacagcaggatgaccccggtggagagggcgtaggtgagaaaaatggggagaagctttttgtaataccccagcagaccggagcgggtcagagggatgtgctttcccgcagagaggtagccggagagcagcatatacagggggacgcagaccataaaggcggtacgcatgacggtcatcagcgccatgcgggggccgacgatggccgtgtcatagtaggtggaattcagaaagaaatggacagacgggacggccagaaaggccaggatcctggtcagatccaggccaatatcccgctgtgtgccgttagcagcagacatgatgttctccttacggttgaaaatgtgagattccgggtgaaggatctatcggatgggggagaagggctggctgatctccacgctgcccaaggaggaggctacctcgccgtccagcagaagctgtatctgccggacaccacgggcagagcacagggaattcaccaagccctgcaccatgcgctgctgctccgtctcgtcctccggcatcaggtactgatcccccttggggaggttcaggtagcagatgccgccctcggtgcgtaccgtcagcaccgcaaagccggtgggcagcaggggagacaggctctcactctccggcccggccttcagggccgacaggatcacctccgcctgactttcgccctcgtagaccgtcagcaggcgctcctccgccgtcagctctccagtctcccgatccgggaagtagagccgcagggagaggttctgcaccacgtcatcctgactggtcatcagcacgtccccggccagaaagatgttgctatcccggtagataagctccgtgccgttgacggtgatgcggacggagtagatgcccacgatctgggacagggacagagttacgcagtagtcggcaatggtgagctccatgccggacagctggccgtaggcgctggagaaatccacccacgcagcgccggcggagacctgacaagccagtagccgggtgctggcagggatgggactttccagactgccgtcggcgctgtcctccagcagaagggataccacccggcgcacctgctgctcggtggggagagcactgttggcggcccaatcgacactgcggctgacgatggcatcgccgccgggggagccgccggagggggcgggataatacagcagtaggtgaggaccgtcagaggaggagccgccgcagccggtgagggccagcagcgcaaaaaatgtcagcagagctgcgagaagccgcttcatgtgctccctccttcctctgtgacctggggcagacggacggtgaagagggtaccctgtcctgcggggcggtgggccacggacaccgtgccgccccggcggcgcaccgtatcgctgacgatgctcaggcccagaccggtgccgcccacctcacgggagcgggccttgtccacccggtaaaagcgctcgaaaatgtggggcatatcctcgtcggagatcccgacgccgttgtcctccacccggatcaccacgtctccgccctccaccgtcagagcggtgtggacaaagcccatgtggccggaatatttgatgccgttttccataaggttatatagaatttggtgcagatcgtcctcggtggccagcaccacggcggactcgtccgcctcgtaggagagagtggtctcctgctcccgtgccaccaccgccagcatccgtaccacccggcgcagcaccggggccaccgccaccggcgcaggctcggcggctgcgccgctgtccagccgggtcagccgcagcagatcctcggtgatgcgggtcagacgctgagcctcctcgccgatgtccgccacaaattcccgtgtggtctcggcgttcatgtcgtcggtctggaggatggagtccgtcagcaggcggatacccgccagcggcgttttcagctcgtggctggcatcggagacgaactggcggcgggcgctctccgtgcgctggagacggtcggtgaggctgttgaactccgctgccagctgggcgatctcgtcggagcccgtcaccttggcccggtgactgtaagccccctcccgcacctgacggatggcctgcagcaggtcgctgatgcggcgggtgaacatccgggagagcagggcgctgaggaacagcacaaacagggccaccagaagagagatgcgcatgatattggtctggaagctccgcagcagctccgcctgtacggtgtcgtactcgtaggcgtagaccgctcccacgatctggttgtggtacaccaccggggaggcgccccggctcagaaatgcctcgccgtcgtagcggcagtaaaaggtgtcgttgccccgcagggcctgtgcgatctccgtataaaaggcgtagagtccacgggcgttgtccccctcacgggtgtcatagaggatgcgcccggcggtgtccgtgaccagcacacgggagacgccggtctcctccacggcggacatagcctgggccacgttgtcctccgtcaggtcggccagacctgacagggccgcctcggcaatcttgacgctgccgaccatggcggtttgcttggtgcggaataccagattctgggacaccagaagggggtaggtattcagcagcagcagcaccgccagaattaccagaatatagctcaggccgaacttaaattgtaggctgatcttccccggcaaaatagtaacccactccccacttggtgatgatataggcgggctccgccggaacacgctccagcttctcccgcaggcggcggatgtggacatccaccgtgcgatagtccccggcgtaggagtagccccacaccagatccatcaggctctcccggctgtatacccgccggggatttttcatcagcagctccaccagatcgtactccttggcggtgaggtcgatggccttaccgtcccggatggccacccgctggcgggtgtccagcgtcaggtcacccaccgtcagcagctccggatccggctgggctgccggacggctctggccggaggagcgccgcagcagcgcccggatgcgggccttcagctccagaatgttgaagggcttggtgacatagtcgtcggccccgcaggcaaagcccatgatcttgtcggcgtcctcgctgcgggcggtgagcatgatgatgggaacgtcggaaaattcccgtatcttcatgcaggcctcgctgccggagaggccgggcatcatcaggtccagaatgatgaggtccagcgtctcctgacgggccagctccacggcggttgcgccgtcgtaggcggtgaggacctgatagccctcgttctccagattgaatttgatgcccttgaccaagagcttttcgtcgtctactaccagtattttcatgtatcgtcctccacggtgatctgctgccggatggtttcaaaaatgccctcgccgatgccgttgacatccatgatggactcgatatcggcaaaggggccgtgctcctcccgataggccacgatgcgctgggccagtgtgggcccgatgccgtccagtgcttccagttgggcggcgtcggcggtgttgatgttcaccttgccggggacggcgggaggatcgggagcctccggctcctgcgctgtatactggggcgtgacggtgtagtccccgccgccggcgctgcggtggtcggtgaaatacagcagcgccagacacagaaggaagatggccgtcagaagcagcagatatttttctgtttttgtgatctttcccatttttccgcagttgactcccggtcgatttttgttataataagaggaaagcgaccctgcggccgggaggggggctgccccgctgacggccgctgataccggcggagagcatgagggccggctcctgcttacggatggtagataggttcattatagcatagatggagaaaaattactatgaaaattcgccgtattctatctgtttttttgctgaccgtgctgatggtcagtctgatgctgaccccgcaggcctacgccctgcctgcgctggagatcaaggccaaggcggccgtactggtggacgccgatgaggggcggatcatctttgggcagaatgagcaggagagggaataccccgccagcatcaccaaggtgatgacggccctgctgacgctggaggccgtggacgccgggaagctgtctctggaccagcccatcaccgcatcggcggtggtgaacgatcaggacccggagggcagctccgccggcatcgaggagggcgaggtgctgacggtggaacagctgctgtactgcctgctgctggtgtccgccaacgaggcggcggacattctggcggagacggtatccggctcccgtgaggcctttgtggagctgatgaaccagcgggcgcaggagctgggctgcaccggcacccactttgccaacaccaacggcctgcacgatgtgaaccactataccaccgcctacgatatctatctgttcttccgggaggccatgaagcatgagaccttcatgaccatcaccggctccgtggcctatgaggtgccggccaccaacaagtccgaggcacgggagctgcacaccaccaactcgctgctctccaactggcgtattctggattatctctatgacggggtggactgcggcaagaccggctccacgccggaggcggggtactgtctggtgtccagctgcctgcgggacggcaagcggctggtggcggtggtgctgggcgccgagggcgaggggactcatatcgagagcttttccgagagcgcacggctctatgactacggctatgacaacttcagcaagcagctggtggtctccacggaggacgtgttccgccagccggtggccctgtccaaggagacggactgcgtgatgctctatccggcggagaacgccgaggcgttcctgccctccgacgtgacgaaggatcagctggagcagacggtgacgctgaaaaatgaggtggcggatgctcccatcacccgggggcaggagatggggaccctgaccatctcctacaacgggcaggtgtgcgtcacggtgccgctgctggcgcaggcggacgtcagcgcctcccggtttttggtggccaaggcggcggtggaggagttcctctcccgcaccattgtgaaggtggcgctggtggtactggtgctgctggtgatcctgctggtgctttgggcgaaggtgttccgccgcaaccggcgctacggcagccgcagcggcagacggtatcggagcagctcctaccggggcggcagaagaggacgctgaaaaacgatagacgggcgggtctgccctaagggcagacccgctttttataagcggaggtgtatggtatggcggaggagctgcggatcctctatgaggatccctatctggtggtgtgcgtgaagccggtgggggtgctgtcggaagacagcgagagcgggcgatccctgccacggatgctggcggagcactaccggcaggcgggaaagcccgactatatcgccacggtgcatcggctggacaagatcgtgggaggagtgatggtgctgtcccggcgacgggaggtcacgggcaggctgacgacggccatagccgctcatgagatcaccaaggagtatctggcggtgctgcgggggcatccccaggagccggccgccacgctgacggatctgctgttccgggacgcctcccacaacaagagctatgtggtgaagcggatgcgtaagggcgtccgggaggcccggctctcctatgaggaggtggggcgcacggaggagctgtcgctggtgcgggtgcagctctatacggggcgcacccatcagatccgggtgcagttcgcctcccgtgggctgccgctgctgggggatatccgctacggcagcaaggctcccggatgtacggcggcgctgtggtcgtatcatctgggcttccggcatcctgccaccgggaagccggtggatgtgacgtgtccgccgccgcaggtgtatccgtgggatttgtttggcggggtaaaatgatagagagcaccggcggtctgtggggccgtcggtgcttttgcgtggttgccaatcggagacggatgtggtagaatccggggagaaggatcactgcgagagggggagcgccatgcaggagctgataagcgcactgacggcccatgaggaggaatgctcacgggagtttgaggcagatctgtccgccttctgcacccggcatatggacgcccagctggtgcagcagctgcggcagctggtggcggagggggaggaggatctggcctaccgggccttctatgccctgaccatcatctaccgcaatcggaaggactatcagcagctgcaggcgctgttcgaggagaatccacgctttgcgggacacccctcctatcaccatctgctgattttgttccagctggaggcggagaccttcttcgatgcgctggagctgctggagctggcccgtgaggacgcacggcagcaccgggacaatgcagggtatctgcatctgttcgcccatctgttcgtctacacctgcgaaaagagccggggagagatgcgggaacaggtacgcagagagtactacgacgacgtggagcgagcggtggaggatgccatccggctggacccggcctatgccaagttctactgcaccaaggcccgtgtggtggcccagcgggggcgttacggtgaggcgtatagtctcattaacaaggccgttgccacggagagctccgcccggaaggactacgccctgcggctgctggactatcgccactgcgagacggtgatcctgctgcaggagcagagggagtactttcagggagagatggagaagctgcgcagatctgtgccgtccttgcctaagctcaagacctttgtgccggggcgggggccgaaggcctatgagggtgcagagccttactgcttcgtcagctatgcccacatcaacagcgaccgggtgtaccccatagtggagcagctgatgcagcggggcatccggctgtggtacgacgacggcatcgaggccggcagcgattttcgggagttcatcgcagagaagatacgggattcgtggcaggtactgctgtttgcctcccatgagtctatccagccgggctttgtccgcaatgagatcaactatgccctgcactgcggcaagcctatcctgcgggtgaatctggatgatgtggaactgacgccgggcatggagctgagcctgggcgggatgcagtatgtagatgctacggagccggggggcgactatctggagcgcatcgtccggacactgctggcggaacggaaggagaaggcatgaacatcacacagcaactctgctgccccggcgcagcggagaatcaggactatatccggctgggagagaacatcgccatggtggtggacggctccacaccgctggtgaaggatccccgtgtgccggaggtgcgggaatacgtccgcctgttggcggatgccgtggtcggtgcagagggggaggatctgccccacatggtggcggcgggcattgagacccttcggcggcgatgcggtgttctgccggagacggagggtgtctcggcggcgctggcgatcctccgggagaagggggagcaggtggaggtattcgtgctgggggactgcgccgccggtgtacgcttccgggacgggcgtgggccagagctggtgtcccaggaggcggtgagccgtctggacggcgctgtggtggcggagatgtgccgtctgcaccgggagcgaggtatcgacgtcatcgaggcacggcagctgccggaggtgcgagagatgctgctgcggcaccggcggatgatgaaccggccgggaggctactggatcgcaggcttcgccccggaggcggcccggcacggcagtcatcgggtgtaccggagggaagaactctaccgagtggtgctgttctccgacggcttttccggccagcgggaggctctgctgggagcggaggagccgtgcttgcaggagctgtatcagcagctgcggcagcgggaggcggcggacagccgctgcaaccgctatccccggctgaagcccggcgacgatgtcagcggcatcgtggcggtgttttgatgggctgggagctttgaactgaaaaatgagaaaaggcagcgggcttttgcccactgcctttgtgtgtggagtaccatcgatggatcagggcaaacacgcctgccggcgatggtactgcggatacatgaaagacagccctccggctttcgccggagggctgatcttatggcagatgatactgcggagacttaggggttagccctcgtacttctccttgcggctgcgcaggaccagtacggcggcgccggccagagccatcacagcggacatggtccacatggtcatggtgctgttgtcgccggtgttgacgccgggctgcttatcgccgcagcgagtgcaggtgccgtccttgtagtcgtggcccagagccttgatgacctcgcccttagccaggaccttaccgcaggcggcgcagaccgtatcaccggtgtagccgtcctcggtacaggtggcgggcttggcgttcacgaccttggtgtcctgatggaggtcagcggtgagatcctcggtgacgtccacagtctgatcgttgatctccgtctggtggacggtgacggcggtggaggcgtccacagcggtgggatcactgacggtgaaggtcagggtcgccacagcggtaccggccttcagcccgtccacatccacatagcccagcgtgaccttgccgtcggcatccttgtgagaggagtactgagaggcgaaggtgacgtcggccagagtcaggacgctggcgtcatagtccacggtgaagaggccgttggtggtgatatcgtcgttcttgggaaccacggtgacggtaacggtcttttcatcctcggagacagcgatggaggaaacgggggtcgtggtctcggcatcggcgggcttgacggcgccggtacccgcatcgttggcagtgttcaggctgccggtgacggaggcgggagtcagagcctcaatggtctgggactgtgcctcaatagaactgcttacattcagctcggtgccgggcagagaattgttatcggcatcgccgtcctcggcgtggttgtcagaaacagccagcagagagcagggccagactgcattgccgatgttgcccatcaggctggactcataagagtcggtggtctcattatacttcaggatgtaaatttcgttggtctcacccgtgaagtagctcagatacagattgccatcatcgcccagtaccatggaacaatacaggctgccgtcatagccggggaaggacagcttcagatcagtatcgacccagtccatactggctctgccggtctcgaagtccggcatcatgatccaaatcgtgccgctgtcggtcaggcagtagaacacatccacggtgtggccggccttgttggtggtgtagccagcccaagccacagcggtgaattcgctggcatttgcataagtgctcaggtaagaggacatatcccaaccatcggagaaatcattggccatgacagggtcggaatacaggaaataggcaccatcgacacccaccagaatgttcttctgagactgaatggcggcgatagcggcatattccatatcctgcatcggagcaccgtacttagtggcggcagcagatgcgctcacagtggcaccagtctccgggttcacctcatagaggagaccggaggtgttcatctgatacatggaaccatcatcgtgagcgaagtcaatggtggcactgttgatatcctgttccagatcagcgtacttggtccaagtcttatcattttccatatcccaagtgaacaggatcggatgaccttccttgtcccgcagagcgcccaccaatgtcacatcaatggtatccacggtgaccacgcaggtggcgctgacggagggatccttcacggaggtggcagtgatgttggcagtacccttgcccacagcggtgacgagaccattgtcgctgacggtggccacgtcggtgttgtcggaggaccaggtcacggtgtcgggctgtacgccgaagggctccacgctggcggtgagcttggcgacgttgcccttgaagagggtcagggcctcggtgttgagcttcacggtgacatcaccggccagctcgtcggggttcaggttcagcttgtaggtgacatagttctcggcgtagtcatatacctgcaacaggaggtgagtggccttggaatcgttcagagacagggtgaagttctggctggcacccttggcagcgccctcgggagaaccggccgctttgctgacgacgctgcccttgtcgtagtccagcagggccacggcggacatatactggtcgtcgccggcggtgaaggtcaggaccttgttgccctcggcgtcggtacccagattcacgttggagacggtgggagccgtcttatccacgaccatgccatagtgcatggtagcgccgtcggacagagcatcccaatccacggtggcgttgccgtccttgtcgtagctggcgtagtactcaggggccagagtcaggtccacattcaggtaggtgccgtcagctgtgttgggggtattgcccatgttcagggtgtaccgggtcatgctccaagtggcgtcgctgctggagtagaaggcggaggagacctctcccagatcgctgctggagagaaccttgccgttgctgtcggtgatggtcaggcgggaagcggcggcgttgcggatggcggtgaaggtcatcttgtagaagttgttgatctccggattgatggcatcacgggcggcatcatagaactcgtccagaccgaaggggttgccgccgaagtagtagcctttcgtttcgcctacggccttgatggtcagggcctgattgtttacggaattgtcaccattataggcatacatatagggggcgcgggtctccagaccgttggcataggcgatatagctgccgatatcgaacatggaggagtcggtccagctgccatagtagcccaacacggggatggagtggctgtcgccctgctcaccctcggcggtggcggcctcgttggcgaacacatagccctccacataggtgccggtgttgtcgctggccttatcgtaggcatccagacccagcagagtcacatcggcggtgacgtgcaggctgccgccggcggggatcaccacgggagcagtacccaattccttgaagaacaggtaagcatcgtaggtgtcgatgccgttgtcgttgtcgaagtcagcggcgtccttatgctcgatgtcggcacgcacgccggtgacatagtccagcagagcctgaccgtcatcggcatcgaccttaccgtcgccgttaaagtcacaatctttcagtgtatcgttcaggaaagcagcgtattcgccgtccacggtccacttgacgttggaggccacggggtcggtccaggtgtcctcgaagttcacaccatcggaggacatcagactctgcgtgaagaagtcggcgctcaggtcgaagtaagcagcctcgtcctccagattgtggatggtgaagccgaaggagtacttgccggtgcgggcgggatcgtcgcccagctctaccttgaccttgccgtcggcagcgccggcgttggcgccctcatccatcaggatgtaggtgccggaggtaacggcattggccacgttggccagaccggcaccctgacgcagcacgggatagtagccgtcgccgtccttaccgtaatcctccaccatgggctcggcggtggacatcagcagggactgagccagctgacgggcggtgagaccggtctgctcggtgagatcattctcacggatgtactgagccaccagagcggccataccggtgatctgaggagcggccatggaagtaccggacatattctgataggtaccgccgtccttcagggagtagatgttgccgccaggggcggtgatctcgggcttcatctccagagaaccgggaacgccccagctggagaagctgctcatagtgtagtagtcggcggaggcgtggttgacagcggcggaagcgcccacggtcatggtgccggtgtagtacacaagaccggaatcggtggtgtgcttctcggagctggccttgatgtactcgccgtcggcctgcagcatggagacatagggggccgtgtagttatagccatcggtagccatgctgatggtgccggcctcgttgttggccacgatcagggcaatggcaccgttggagatggcgttgttgcccttatcggtaaaggcgatggagccacggttgcagatggcgatcttaccggtgaggatatcctttacggcggcaaaatcctcggcattaccggcggtgtccacatacacgaactgctgctcaccggccagagtcgtcagagcctggatgggagcgctggtgctgtcggtgtagaaaagcttcttgccggccacttccacgtaatcaccggtgccgcccacgttatctacggaggcaacgcccagagagttggtgtaggagccgggggagccggtggtggtccagctgttgctctcggcatagggatactggttggcagtgttctcgaaccagttgccggagttaccggcggagatggacaccacggtgccactattggtgatgttctccatgatggcctgataggcagcataggagttgcgggaggtaccggggttgctgctgcccagagacaggttcacggaatcagcacccagcaggatggcgtcctcgatggcgaccatatagtcggagtcacgagcgccgccgttggtgccgaataccttcataacgaacacctgagcatccggagccacgccctgcgtcagagcggtatccagagcgggggagaaggagccgtcctcgttcttgatatagcggttgccggcggcaatgccggtgacgtgggagccgtggtcgccttgcttgtcgttggcgtgggtgatatccagatcgtcatccacgtagttgaagccgtaggggatcttggcgttgacgtacagctgatcggcggtgacgccgggcatcttcttggaggcgttcagctgctccagaacggtatccgtcagatcagcagcagtcatcagcgtggcgccgctgtccttcacggcataggtgaaggcatcgggatccagagagggatggtcggtgtcagcaccggtatcgatgatggccaccttggagccggcgccggtataaccgtccgcccaagccacatgggagccgatcatgctgccggaggtagccatgttgggatcggtggtctcattgtccttcaccacgcagggctcgtagcgggtctcaatgagcacagcctcgacgccggagatcttttcgatcttttcgatctggccgtattccacattggcggagatgatgttggccgccagagtcaggttccagaccacgtccagagcctcgccgcccagagcctttctggagatggtcttagccatcttctcctgcttggtctccagcttctggcggtacttcatggccgcagaattggtaacgatatcctcgctggagtaacccttcgccagcgtggaggcatctttcagaacgatggagacacggactacgtcggtgtctgcatattccggagtttcttgcgccaccttctcggcgttgttcttgtccaaacgcagatcggtggaacggttgtcgatcttttcccaggtgaggccgttgccggtgccgctggaaggcgtcttggcggcggcccaagtgggcgtgaccagactcaggctcagaaccagagccagcagcacggacaatgcccgcttcatgggcttggcgtgtttcataagcgcactctctctttctccggcgtcagccggttagaattgaccatacggtgtgccggaagcggctgccctgctgcataccgagcaagtatggttttgccaatcatagcacgatttggaagagattgcaattcttgagaaatatattctggcgaaattttcgttgaaaattttctcttgtgcaggaatatttttgccgaatttaacagttttttcaaaaatggaataccgaatcgattcaccgaatgacttactgcacaaagaggaatgtacgtgacaggaggacaaagctgagaaatgtccgggaaatgggctatataaagggttagcgagggctaaccaagggcgtatggaggcgggggcgtctgccggagacggacaggggtagtaaaagctccagccaacttggcagaaataccgttgatgctctttccgcttgccggaaattgaagggctataacggcgatgtgtattttcaaaatgctgacacattctttctgatacgcattactctgcaaaacgaaataacaggctaaagcatggtaatgatgattagtcaaagccgatagaacattttgatttttctcattagggggtgcaagagcggcttgaggaaagaagttctccgaataaagaaaaatccagaccggccgggcttttgcacccccttgtctggatttttcccgtatcacggcgtttttttaataggaaaataaaaaagtacggtagcccattgtatcatggactaccgcacttcgtggcaaatgactctaattttgatagaaacccgttagggggttgcaattacggtttggaggggggcatttttgattttaggggggtgcagttctttgccaaaggaagaggagcgccttcatgaaataatgtgttaagggaaaataattttttgttaaaatgcgtatgcttttctccacaccccttgcaaagcagaaaaaacacggtataatatgaccagaagaaccaaaatggtcatttggatggtgaacgagcttggcttttaccgactatgaaacagaacaacttcacaaggcgctgctgaaggaaacaagacgctgcgccgtcacgctagggatgaagaaaacctcagtggatcaactgacaaaggcgatcggtatcgcaaaaggctcgttttataaattctacgaatccaaggagatggccttcttcgcggttctggaaagtatccactccgaactttacggggtggctgaccatgcactgagcgaagcaaacggcttgccaccgtcggagcgtgcggcaaaggcggttcttgccgtctgccggcggctgtccgataccggcgacatggttttcattgaaaacgatgcaaagctgcttttgcagagactgccggatgacatcaaaaacatccattaccacgatgacgaagcgcacatccgtcagcttctggaaaaatatgaccttgtgccgagtcgcggcatctctttggctgccgccacggtgcggggactgatcctcaccgtttctcacaaggagcagattggagaactgtacccacaggtgctggaaacgttggtgtacggcgcatgcagggagttatttaaataagcggaaggccgcagagatgcggcttttccaaggcgcaacggttagcagcatctaaccgcccggatgcatgcgtcggttaggttaatctaacattgaaaggaatgatagcgatgcgagatcataagaatttctgggacagaaatgccggtcgttacgaccgctttatgcgaaaggatcgggcggcgtatgacgagatgtatgagctgatccggccggtcgtgcggcacaagacggtgctggagcttgctgccggcacgggattgatcgcaaagcacatcgtgaacgcggcggcacacatcgaggcgacggacgcctctgcggagatggtcgcagaagcgaaacgggacaatcactcggcaaagctgcacttttccgtgcaggatatgttccgcctgccctatgcgaaccagtcctttgatgtggtgatcgtgtccaacgcgctgcatatcgtgccgcagccggagaaagcccttgccgagatccgtcgggtgctgaaggacgatggcgagttgattgcgccgacctttacccacgcagggaactcgtttaccggcaaggtcagggtatttttcatgaagctggcaggtttccctctccacagcaggtggacgagcgaggaatacctgcgcttcctacggcaaaacggctgggcggtgcggaaaagcgctgttctgaaggcatccttcccgctgacctatgcagaatgtgtgaaatcggaggtgtgataagatgtcattttttgagaacaccagaaagcctgtggggcttggcgggaaaatcatggtcgccatgatgaacgtcgggcacag

SEQ ID NO: 12363 - DNA, 592 bp, Unknown
  gut microbiota DNA sequence
catctgcccacacttctggttcagcagatccgcctgcaatggtataaagactgccggggcggaaatgcggccgcacagcggaaccagtatcccagagccatgcgtctgccgaaagacttcttctcctattatccttttggtctgcctactcactttgcatctatcatacagaggcccgatggatttcagatcgatagggactgtcgtaggctgatggaatggaagccgaatggcacaatgcggcttcaccctttcgaactgattcagcaggagcccggaatccatgtgcgttaccgcaatgattggcacatcggggcgataccggagcgatatacctacgataagaccgggcagaaacagcctctcaatgagctggcactggatttgattcctggtgattatggtcgagctgtctgcaatgggcggttccgagactgggacactggggtctggtattatgtactggatattttgaatgtgatgccgcttgcagaacccaccgacgcattgaccagttttacggacagagaaccgaataagatatatacccagatcgatcggctgtggtgacgaaaaacaggaggatactacc

SEQ ID NO: 12364 - DNA, 5565 bp, Unknown
  gut microbiota DNA sequence
cgaagtgcgtctggccgccccggcgataggtgaagtaccgggcggacagatcctcggcgtaaaacacagaccgcccctgcatccgtatggccagctcctcccggctcagccgtatcccctcgccgctggggcagggcagggggaagtccatcatcagccgctccagatccagcgccagccgctgagcgccgtaggcggcgcaggcctcctccagacgaccctgcaggctgccgccggagagggcggtacacagcagcaccaccgtctccggcgaggcagcggcgtagatctccggcacatagaggcggcggccgtaggccgtcagcagcggcgccagctgccggatcagggccgcccgatcctccgcccaccggccctccggcagctcctccagatccagcactatcccggaaaagccccgccgcaggcacacccgcaccagctgacgggccagcggctccggctgctccactgccggggcctgccggtcagataccaccatcaggccgccccgcagcgccgccgggaggggcgctgccagcagatgggagcccggcccgatgcggtaggccgcatgggccagctgggccgtggcggctctggcctgcgccagccggttcggtgcggcggtgagatacagcgtcatgttcagtcccccttgtcatccggcggatttcatggtatgatagcgctgacaggcagagagaagggccggcatgattgcggagagattctctttgcccgtggataccataggcagactatgtaggcaggagcggatgtatgcgagtatcattggtgccggaccggctgtttgaaacctatgaggagatcaccccggagtatctgcggcagcggggcatccggctgctgctgagcgatctggactatacgctggcgcccaagtatgtccctcacccggatgaccgggtaagggagtggctgcgccgcatggaggaaggcggggtgcaggtgatgatcctgtccaacaaccgctcctcccaccgggtggagaccttttgccgggagctgggcatcccctatgtgggtcatgcacagaagccccgcaccacgggcttccgccgggctatggagcgggccggagtcaccgccgccgagacggccatgctgggggataagctgctgacggatatgctgggggccaatctggcgggggtactggccctgatggtggagcctgccggagggccaaagggtgcatggaactgggtgctccacgccttgcaggcaccctttaaggccgtctgccgccgccggcacacataatttccccggaaagcgggaaaaaatatggcaaagcccttgccaaaacgggacatatcatgtaaaatataaccgctgtgctaattcatgaatccgaggaaatgctcccacagaaggagattttctcataatatgggaggatacaactatggcaactattaccgccggtgatttcagaaacggcaagaccttcgagtacgagggcaagatcatgacggtcgtggagttccagcacgtcaagcccggcaagggcgctgccttcgtccgcaccaagatgaagaacgtggtgaccggcgccgtcaccgagacttccttcaaccccaccgctaagttcgaggaggccttcgtggagcgcaaggacatggcttacagctacaacgacggcgacctgtactatttcatggatcaggagacctatgacatggtccccctgaacaaggatattctgggcgacgccttccgcttcgtcaccgagaacaccgtctgcaaggtgctgagctacaagggcagcgtctttggtctggagtgtcccaacttcatggatctggaggtcaccgagaccgagcccggtctggctggcaacaccgccaccaacaccctcaagcccgccaccgtggagaccggcgctgaggtgaaggtgcctctgttcatcaacatcggtgataagatcagtatcgacacccgtaccggcgagtacatcggccgggccaagtaaggaaaggaccaccgtacttagaaaggagaacaaacatggagatttctgagaaggtagcgtatctgaagggtctggccgaggggctggctctggacactgagtccaaggagggcaagctcattgccgccatcatcgacgtgttggacgatatgtccgagaagttcgaggatctggaggacgagctgtgtgacgtggaggacggtctggacgccgtcagcgacgacctgtgcgaggtggaggaggccctctacgagctggaggacgatgacgacgagtatgacgaggacgaggatgatgacgaggagtacttcgagaccacctgccccgtctgcgaggaggagatcgtgttcgacgaggacacgctggagagcggcgagatccgctgccccaactgcggcgagaagctggagttcgacctgagcgatctggcggacgccgaagatgaggatcaggagtaagcagctgacttgcggcaaaaatagcgatgaaaaggcccggcgcatcatgcgccgggcctttttgcgtgctgtatggggggagtgctggggccgcaaggcggtggatggcgtacaggtcacgggcggtctgccgtccaatggtatgccagccggggcgttccgtcccgcacatggatcgtgccgcaggggaggaagccgttctcctccagcaaatgctgcatggtgcggttgtcggcgtgggtatccgctcggacattccgggaaatggccttgcagtagtccgcagcacagcggaagagaccgtgtgtccggccgtccccggccagacggtggatggtgaggtagggggcgtcgttccgccaggcaccctctatccgggaataggtgggttcgggggtatccagcagcgcaaacaccccatgtatcccggcttcatcgctaaggacccggcagatgccctgagcgatatcggagcggatcagctccggcgacggataggagcggccccactgggtgggatttccggtttgcagcatatattcctgcgccgtgcgatagatggccataagctgcggctgatcggcggcagcggctctgcggatggtcagcatggagggctcctttcatggtggagatgtacatcggtgataaggagagtatagcatatccgggcggccgccgcaagaacgcatcggatggttggaagggactttcataagctgcggaaaaggctgaaaaaagcgcacgggatagcccgtgcgctttttcgttgtgggattcgtagaaatggtgtcttgacggccaccggcgcttgacggggggaggggattggagtaaaataagcccacaaaggtggggtgggggagtttgcgcctgccccagagacggaggggagagcatggaaggcggtctgaaacggtttttcgagggcagctggcaggaggcgcagtctctgctgggcgcacaccgcacggcggagggctggtgcttccgggtctatgcccccaatgcccggagcgtccgggtggcgggggacttcagcgactggcagggccttgccatgaaccgctggccggagggcatctgggagaccacggtgccgcaggcccaagtggggcagtcctataaatatgtggtggagggcgccgacgggcgcacccgctggaaggcggacccctacgccgtttacagccagctgcgtccggagaatgccagccgtctgtgggagatggcaccctatccgtggcgggatgcggcatggcggaaaaagcgccgccgggagcctctgtgggaggggccactcaacatctacgaggtgcatcccggctcctggcagcggcaggaggacggcggctttctcacctatcggcagctggcggaccggctggccccctatgttcgggacatgggctatcacgccgtggagctgctgccggtgacagagtatccgctggacgactcgtggggatatcaatgcgtgggatattttgcacccaccgcccgctacggcaccccggaggacctgaaatatttcgtggatcggatgcatcgggccgggatcgccgtgattctggactgggtgccggcccacttctgcaaggatgagcacgggctcatcgatttcgacggcacctgcctgtacgagtacggagaccccctgaagcgggagcacgccggatgggggacacgggtctttgacttcggccggggcgaggtgcggagcttcctgctgtcctcggcggcgtggtggctgcgggagtaccacatggacggcctgcgggtggatgccgtggcgtctatgctgtatctggactatgaccggcaggagtggcggcccaatgtctacggcggccatgagaatctggaggccatctcctttttgcaggatctgaatcggatggccgccgccatggatccgccggccctgacggcggcggaggagtccacggcgtggcccaaggtcacatggcccgtagaggagggaggtctgggcttcgacctcaagtggaacatggggtggatgaacgacatctgccactatctgaaaatggatccgtggttccgccagtaccaccacaaggatgtgaccttctccatggtgtacgccttctcggagcggttcgtgctgccggtgtcccacgacgaggtggttcacatgaagggctccctccgggggaagatgcccggcgacgactggcggcagctggcgggggtgcggggcttttacctgtacctgctggcacaccccggcaagaagctgaccttcatggggacggaactggcccaatggcacgagtgggatttcgccggacagctggactggtatctgctggagcaggaggactgccgccggactcatgaatgtatccgggagctgaaccgcttttatcggaaaaaccggcccctgtgggagaacgacagcgactggaatggcttcgagtggctggtggccgatgacaaccgcagcaacgtcatcgtgttcctgcggcgggatcgggcgggccatgagctggtctgtgcggtgaatttctccccggaggcgtgggaggactaccgcttcggcgtgccggggggcaagcggtattatgaagaggtgttcaacaccgacagcctccagtggggcggctccggtgtgtgcaatgaggggctgctgaccgtggaggacgttccctcccacgggcgggaaaggtccctgaggatcaggatcccgccgctgggcggggtgatcctcaagggccggtccaggcggcccgcagaatcgaaaaacggaacggagggacggacatgaaaaaagaatgtgtcgccatgcttctggccggcggacaggggagccggctgtatgtgcttaccggcgacatggcaaagcctgcggtaccctttggcgggaagttccgcatcattgattttcccctgtccaactgcgccaactccggtatcgacactgtgggcgtgctgacccagtaccggccgctggagctcaacagctacatcggcaacggtcagccgtgggagctggaccggctggacggcggcgttcacattctgccgccctaccagagcgccaccggcgccagctggtacaaggggacggccaacgccatctatcag

SEQ ID NO: 12365 - DNA, 1254 bp, Unknown
  gut microbiota DNA sequence
ggcctctggaaacagaggccccctatcttttggacggaggaggcaccatttgtctatccggcgacatattccgctggagtaccggggacacgcaaaaagcgctccctccaccgatgtggaggtagcgcttttgcttatcacttaatacagcttcacgatgctcagggccatagccacatgaccgatcatggagttgaagtcgaacacgggaatgtccagttcctcccggatgcggtgggcgaaggggggcaggtcggtgcattccagtacgatggcaccgatctccgggtgatccttgacgccctgacgggccacattcaggatctcctcggtgacaaggtccatatcgaagctgtcgtcgggatggtcgaagatcttgctccactccggggcgttctccagccccatgacgatggggtgcatctcatcggtgatgccgcaggcccgcaagtgcttttcggacaggctggaggcgctggcggtgataacgcccacggctcggtcacggcccaccagtgcctgtgcaaagggtacctgcagcaaagaggaggtgaacaccgggatatccacggcgttggccagtgcctcctggaagatggcattgaagccgcagctggtggtaatggcccgaacaccctccttctccagctccttggccagctggatcatatcctccagcagcttctggctggggtgcaggatcacggtgtcggtgttggcgcccttcacctccaccagcttcaccgggaaggggtaggatgccagattggtgctgttgccgggcagttgttccagctgcatgaggccctgaggcacatggccggattcccagcggagaattgcaatcttttccataatattcctcctgttggcctgtgaccgactcccaccggcaggccatccgagtatgtcaccgcagacgatccacggtttatccatatagtacagcaaagcagggaaaaaagcaatattaaatcttactattgtatacaacgtctaaatttaatgatgaatttcagtcaagtttacaaaatgttcaaaatccacatttttaatgttgacttcgggtttaaagatgtatacaatcttaacaacagctatcgcattgtttgcgcttacttagctgttatcgatttcgtcgctttatttttgaaagtgaggtaacaaaaaatggtcatcggagtactgaaggaaatcaagggcaatgaataccgtgtggcggccgtacccgccaccgtgcatgagatcgtgcgt

SEQ ID NO: 12366 - DNA, 5257 bp, Unknown
  gut microbiota DNA sequence
gatcatgttcatcgcagaacatattgtcgtagccatgccgtccaccgtcaaagatgacgaactcctcgtcgctctccgggtcacgggctaccaccagtccgggagccggagagccatctacaatataggattggggctctcctttcaccgtgagcagatctccgtaataccaaacttccagcagttcattgccggtggtggaacagagtgtcacggtaggcaaacgcttctccgcccactctttcacatggccggtgagccaggtgggataacggggagaggacggggatgtgacttttttcgaagatacgccgtgtgtgcgcttccacggctccacatctaaactgaccgtccagtcgccgtctatatatttcattttggaattggccttgatgtagtcctctccccagagggctacatccgccttgctgtaccaggtcttcatggtgataccgtcgcctcttaggatctcgcagcaaatatgctcctccggctttgcattccgcagtttgagaatacgcaaaatttccgtatcttccggggtaatctcccggaatgtaaatttgaatgacattttgttgtcccctttacagtacccaagacatgatgctggtcacaatcagcacgattcccagtaggaagaagatcacccgtctggagccgcggccatagcggtgagagtctggcttgccggtggggtcacagagccagttccagttcatgattgccccaatcagcaggacagcgccgatgaccagggtcacccagttccaatgctcctgtaaaaaagccgtgatctgctcgctgttcatttaggtttcctcctctgcttatccctgtatatcagcgtcaacggggccttttttcagcgttctatccacagtgatcacatggccccagaacatatcgtcatcttcataccaggcggtaaaacgcccaccgggagatactgtaaactcggtgaggaggatgcgccgggcaaactcatcctcggtgatggggtctttttccgggtcacggtcggtctggtcattgtccgccagccattcgttggcctgagtggtgagcttttgggcaggcatcgctcgcagggacttgtcccaagcctcctgttctgccagcagcttcttcatcacattggtgacgcgggtccaggaggcttttctttcgatctccacatccaacgagatccggacttcttttcccatccatttgcaggttccatcgaatgtgcccatctcccgatccagcgtgagggttcccagcacttcgtcctccagaagaatgggctttgtgtattccgcccaaatctcctccagtgccggacagggtacgccttcctccagtacctccgtgacataccactgaggttcgtatagggcatcacctttccagccgcgggctttgatccggtagatctggcccttggtaaaccgcttggaatagtcgccggcatcccgttccttgtccgtcagcggccagctcaggtagcatcgaccggagatcgcctgtccggtctggacatccgccatggcgagggcatgggtatgcgccgcccagtaggtatccagaaaggttttgtccgcgctgacaccgtcctgaatcagtaccagtttttcctcatcttctggggcgtacagggcaataaagtccttgaccgttctctttttcatggcgttctccttacgcaaatacctgctggtatttctctttcagttccttgggcgctgtcttgatgaccttgctgccgccgttttcagaggctgtgccccagatggcccagagcacatcacgccacaggtaggccagcgcccttttgtcattgccggattcttccggcaggtaatattccagatgccctttgatctccagcagagcatccaggctctcctcattggcgatcagggcgcggaactcctttgcgggcttcagattctgcatggactggacaccgtggaccaacaccggcagggactgagcagtaaacccgtacttcttaaaaaaggtgtgaataaacttttcttgcaaagaggagtgctcgtcatcacagcgatccaggtaatcgcacaccagccgccaccacttcggcccttccagtcccagggcaaacacggcaaaggtgccaggcatggcgcaggactcatcagagaggttgttgtaccactcgtcctcctgcatggccagccgagcataattctccatccggacatggagacggggataccgcaccgcacaggcaaaaagctgatggacacccttcttgggcaggccggggatgggcaggtagatcttctccggtccgcgaaactcgatggagtagctgcgggggaactccggctgctccaaaatctcaatcagatagctgagagcctcctcacaggccccctcgccgcagtccctggcggtaatgcggatggtggcgaaagcgtcgttggccgaggcggtcaggtgctttgttttccgcttctggatattaggcggcaatttgccgctgccattggctttcagttcctttaccatgtcagggcgaatctgggaaaccaggccgaggatgtgttcggtggtaagggattcaaaactctgcccgtacacggtatggcagatagccacatagcaggcaaagcgcagcaggttttcgtccacattctccgggcgcaattccggccacaccgtgcaggggggaaaaggcgaaaagtaatcctctttctctccgacctcaaaataccgctcctgcacctgcttttctatatacttctccaatgtatagcggatctcctgccagcccaccagccgccgcatggcgtcgcagagagagacagcatcctcacagggaaatcctttcaacggcagctcggtcagataccgctccagcagctgatcagggagaaatggcgtcccgttgtggtttcgcaccacggtcgggtaggcggagtgattttcacgggcggtgccgttcagcacatcctgaatgcagagatccgcctccgccagtacctccggtgaagtgtccggcttgtggatcagatagtaacggtcatgtacgccgtcacgctttggcaaactcatggcaaggtctcctctcaggtctgctgatgctgcatggatacgatatggcagtccgggcagaactccacatagagcgtgccctctgcgcagtcaaacaacgtatcccactgaatctggaccagatatttcataggtttcccgcagtgggggcaggtcgtatattccgcgtcctgtacccagtcggcaaagccacccaccgtgttcacatcctggcaggccgcaccgtaaaacaggggcacaggcgcttcgcccagcacaaagggattttccgtgagggccttgtagtcctcgggactgacatagcaatccgtcttctccgccccgtcaaagagctcggagggaaagacttccactccgccatccagggtaaaactgttaaaggctggacctttcaaaaatcccacacagctggggcagcaggtggcagtcagaataccatccaaccccagaaatttcagacgctcatcccggccatccagcaccaacatatccaccatacgcccgccgcagtgagggcaggtgtcctcccgtgctcggccaatgcggacgggagatttctcgccagcggttcccttgaccataggataacaggtgtcgaagttgagctggattttctggccctccttgtcgaaggtccagcctccgatctgcgcatagctggatgggtctacatagaggcccttgcgccagggccggggatttcgctccagctccagcagagtttccattgccttgtcatctccttgcatagcaaggcaactcatcaggttggaggccgcgctggaatattccgcagacaacagcgcatggatcagaccatcccgcacatcggcgggagcgtgatcatagatctcacagggccagaacacctctgcggccagtgccactcgctgaatctccggggtgatggcatcatggtagccaagcagctgccagaagtcggcgaactccgggtcctccatatcagccagcctctggatgttctgaatcaggtttctctgcttctcggcaatctgttccggcgtccaggcaagagcagccttccgctcctgttcagatttgcatttccagcacaatccctcatagcccaagggtgtcccacagccggggcaggtatatttcagactcatattctttgactcctttccagcgatagaaaaaagccccacgccgcactgtcataaagacaggctgacgcagggcgcgaaaaggccgtaagggagactccacatccaccagcggatgtggtttcttcttcagccaaaatcaatttttcatatttgaacagaacagccgtggactgtcccagtttttcttccatagcaagacctcgggttacaaatttctaaataggtatactttactattttattatatcacatcatctgttttctgtggaagagagatttgctcctcagccaaatttgtgatgtggatttttccctttctctttcctgtcccggcatactccagcagttctctggcattgctggccggatgccgcacataggcgatgagaaaatcgctgcgctccaccatataccggtttgcgcggacgatggcaagccgtttggggaccgtttccagatccggcggatagaacagagcgtcgaacgcctctggcagatccacatttctgttgactgggtaatatggggtcatcagcatcagcgtaatatccgggtgcgctcgcttggcctgcgacagtgcccggatcaccagacggtcgaagttgccatactgccccaccacaaattcagatacgccatattccgtgatatggcgctctatggtttcaagcagggttgggtacacccgatctggtgtctccctatgccctataaagaagcagcttcccatctgacagccctcatacacagtcgcagtcatattttattgattgtgattcataatagaactataaagccaacgcctattttaataattatatcaccaattattcgttgtgtgaagcaaaagttgatgatttaagtgcgaacccgcgacgctcccttatattaaaataataagtagagattggagggagaggatcatggacgataaccgccgctatgaagcgtttgtgcggaaccgcatcacagagctgcgggaacagaaaggcgtttctgagcatcggatgagcctggagcttggaaagagcggctcctacatcagaagcatcaccaatgga

SEQ ID NO: 12367 - DNA, 187 bp, Unknown
  gut microbiota DNA sequence
atgccatcaccccggagattcagcgagtggcactggccgcagaggtgttctggccctgtgagatctatgatcacgctcccgccgatgtgcgggatggtctgatccatgcgctgttgtctgcggaatattccagcgcggcctccaacctgatgagttgccttgctatgcaaggagatgacaaggcaat

SEQ ID NO: 12368 - DNA, 26638 bp, Unknown
  gut microbiota DNA sequence
ggggaaaatgtgcgctggacagcggggggaagatgtgctataatatacgcctaataatattgcatgatggatgcagggaagcggcggaagagcgccgcagcgaaaggagccaccggttatgagagtcattgatctggagaacatcaactacgccatgcgaagcgagacgcaattcgtgctgcggtgtgaggaggtgttccacgataagatcagtgcggcggcgaccaccattctctccaacaagggcgaaaagccgctggtggcgctgacgggtccctccggcagcggtaagactactaccgccatgcgtttgcaggagtatttgcagaatctgggagtccatgtgtgtctgctgagcatggataacttcttcctgccgctggatcagcgtcccccggaggccaccgactgggagtccccttactgcgtcaacgtggagcagttggtgtcctgcatctcccagctggccgacggcaaggaggcggatatcccctggtacgactttaaggagggcaagaccggtggatatcgcaagatgcagggcgacaaggacggcatcatcattgcagagggcatccatatgctcaacccgctgatcttcgagaagatccggggcattgccaacggcatctacgtggcgccccgtacccgtatcatcacctatgacgacaagatcgtccggccggagcagctgcgggtggcccgccggctcatccgggactacaacaccagaggccactctctgcgggagaccgtggagcgggcggccagcgtcaatcggggcgaggagaactacatcaagccctataagtccaacgccgccatccagatcgacagcttccacgactatgagccgtgtattctggccaagtatctgctggagatcccccagttccggcaggagctgacggacgaattcatggcggagaacgatctgacggatctgatgaaggtggtgcgggaggtgccgccgctgcacacgccgtatgtgccgctgaactccatcgtgcgggaattcgtgggcggtagctgctacgagtattaaatggtaagaagcagccctacgggctgtgagatatgttgttatccgtgcctttttagagaggagaaatgaagtatgcacaagatcgttaccatcagccgtgagtttggttccggtggccgtgagctgggcaagcgcctggcggaggagctgggcatcccctgctacgaccaccagatcatcgagatgatcgccaaggagaacggctttgacgagcggtatgtggccaatgtgtccgagaagagcatcgaggccgcctatcccatgaccatcggccatcggttcgccatgccctccatggagatcatggagcagcccatccgggtggcggcggcccagcgccagatcatcgagaatttcgccaagcagggggactgcgtcatcatcggccgctgcgccgatgtgatcctgaaggactatcaccccctgaacctgtttatctacgccgacatggaggccaaggtggagcgctgcatccgccgggctccggagggggagcatctgacccgcaacgagatcgagcggatgatcaagcaggtggataagaaccgtgcccagtaccgccagatgtacagcgataccaagtggggcgccaaggagtcctatcacctgtgcgtcaacaccacggagaagtacatgaaggagatcgttccggggctggccgcctatgtgcggtgctggttcagcgaggaataagcaggacagcggagactgccgggagggagagcccgccggcagtctccctttgcgtcaacggaaaggagcaggcaatatgaagcgtattgcagttatcaccggggcctccagcggtatgggacgccggttcgctgagaccgtggacaccttcggtcgctttgatgagatatgggtcatcgcccgccatgaggcggcgctggaggggctgcgggagcgggtgccgtttcccgtgcggcctttggcgctggatctgacggaccgcagcagcttcggaacctacgtcaaggcactggcggaggagccggtggaggtgggcctgctggtgaacgccagcggcttcggaaagttccgggcggtggtggatacgccgctggaggtgaacctgaacatggtggatctgaactgtcaggcggtgatggccctgtgtcagctgacgatcccctatatgccggagggcgggcagatcatcaacatcgcctcggtggcggccttccagcccattccgtatatcgacgtgtacggggccagcaaggcctttgtgctgagcttcagccgggcgctgaaccgggagctgcgaggccggggtatccgggtcatggctctttgccccttctggacccggacggccttctttgcccgtgccaccgtcaacggcggtgaatcggtggtgaagaagtatgtggccatgtatgagccggagcagatggtgcagcgggcatggcgggatgccaagcgggggaaggatgtgagccagttcggctttgtggcccggttccagacggggctgacgaagctcctgccccacagtctggtgatggatgtatggatgcatcagcagaagttgaagtgaggcagcggggatgaggtatctgtttcccacggggaagggctatcagcggaagtggctggggcaggacgtgctgtccggcgtggtcattgccgccgtgtccatccccatttccatgggctatgcccagatcgccgggcttccggcggtatatggtttgtacggatcactgctgccggtgatcctgtttgcgctgctgtctacgtcgccgcagttcatcttcggcgtggatgccgccccggcggccatgatcggcggtgtgctgggaggtatgggcatcgccatgggctccgccgaggcggagcgggtggtgccggttctgaccttctacgtggggatatggctgctgctgtttgccctgctgcgggcggggcgggtgctgcggttcgtatctacctctgtgatggggggattcatcagcggcatctgctgcaccatcattctgatgcagctgcccaagctcatgggcggcaccgccggtaccggagagctgccggagctggtgcggcatctggccggggtacaggtccatcccctgtctctggggctgggggcggcggcgctggtgatcctgctggcagccaagcggctgagacccaaattccccatggccatcgtggtgatgggactgggggcgctggccacggtgctgtttgatctgccggggcgtggcgtagcgtgtctgggcgcagtggagccgggacttccggcgctgcacctaccggactggagcgccgtcagcctgacggaggggctgggcagcagcctgccggtggcggtggtcatcatggcggagacgctgctggccgagagcagcttcgccatgcgggacggctatgaaattcgggacagtcaggagctgctggcctttgcggcggccaatctgggagccggcatggtgggctgctgcccggtaaacggcagcgtgtcccgctcctccatgaatgtgcagtaccggggcaagacccaggcggtgtcgctggtggcggcagcggggatggcggcggtgctgctgtggggcagcgggctgatccggctgctgccggtgccggtgctgacggccatcgtcatttcggccctgctgggggcggtggagttcgacatggcccaccggctgctgcgggcggatcggaaggagctggccatttttctggcggcctttctgggcgtgctggtgctggggaccatctatggggtggtcatcggcgtgctgctgtccttcgtggatgtgatccggcgggcctcacagcccagccgggagctgctgggggtcatctccgggcagccgggcttctacccgctggggcgcatgagtcaggcgcatccgctggagggagtggctctgtaccggttcagcggtgggctgttcttcgccaacatcgaccggttccagaaggatgtggagaactgcgtgaagcccggtatccgggcggtgatcgtggatgccagcggcatcgtcagcgtggatctgacctcggcggagcggttggtgctgctgtaccggcggctgaaggagcagggggtgcggctgtacctgacggagcatatcggacaggtcaacgacgagctgcggcgcttcggggccggggaactcatcgaggagggcgctgtgcgccggaccttgtatgcggcgctggaggactgcggcgccgcagagggcgaggtgaagcagtggatcccggaggagatgcgccatgcggtgccggagctgctgcggcagacgcaggagctggagtgggcctacggcgaggaagcccagagcaagctggatgccatgacgggacaggttttgcagacgctggaggagacgaagccggagcagcgggagcaggagctggagttcctgctggagcggggccggtggcagggcgtgatcgaccgggacgctattttacagcatctggaggagcatctggcagagctttcccggctgctggagcggtcggaggatgcggtgctgctggagctggagcaggagcgggaacgggtgacggaggcgctgcggcgtcaacacccggagatcgcttcgtatctggcggcccatcgagaggagctggagcagcggttccagcggaagtatccggaggcggcccggcacatccacgagctgcgccagcggctgcatcagccgccggaggaggaaaccaaggagcagaggtgacggacatggcgtgctatattttcggagcaggagattttgacgggctggaggaacggcccggtgcggaggactatgtgatcgccgccgatggcggatacaccgcctgccggagggcgggggtggagccgcagctgctgctgggggatttcgattcgctggcggaggtaccggcgctgccccatgtggagcgggtgccggtggagaaggacgatacggacatgatgctggccgtcaagcgggggttggagcgaggcgagacactgttccatctctacggcggcatgggaggacagcggacggatcacaccgtggccaattttcaggcgcttttgtatctggcggatcacggtgccagaggctggctccacggacggggcgagcgatggaccgccatccgggacggcagcatcgtgtttccggcccgtccggagggcattttgtcggttttctgcgtggggccggacgctgagggcgtcaccatccggggggcgcagtacccgctggagggggcgaccttgacggcctcggtgccgctgggtgtaagcaatcactttattgggcaagatattatggtagaggtgacacacggcagtttgctgctggggttacatgattaaaatttggaggtaacgaacatgaaaaagatggtgaccggcgtgctggcactggtaatggtgctggtgatggtgggctgcggccagaaggacaatggcgtggtaaacggcgtggccaaggacggcgccaccatcggtgagggtgccaagtccttcaccatggaggtggtggacaaggacggcggcaaggtgacgttcaccgtcaagaccgatgccgacaccgtgggcaaggccctgctggatcagggtgtcatcgccggagagaacagcagctatgggctgtacgtcaagaccgtcaacggcatcacgctggactatgacaccgacgggatgtactgggctttctatatcaatggcgaatatgcccagactggcgtggatgccaccggtgtagagaacggcgcagtatacgccttccgggccgagaaataacaagcggccgggataccggccagtgtggaaagacaaaacaccccggagcgctcttatgggagtgcttcgggggattttttaatttggggaaaaggcccgccgcagatacttctgcggcgggccttttgggcggttgtgggggtcagagggccttggtatacatctcctccacggaaccgaaggagggacgctttctgccgctggcggtgaagccgagggatcgatagaagcggatggcaggcagattggcatcgaatacccaaagcaggatggaggggtatccggcgcttttcacgtcccgcaggaccttctccagcagcagcttgccatagccctgatgccagtgtgccgacagggaatggatgcagatcagctcggcggtcccggccatgtcgggctctctggcggcgtcccaccatgcgataccgtggggcgcaccgtccaactccagaatgtatccatgggcgctgccatgggtcagcagatgctcatacattcgggtcacaggctccgggtccgtatattcggagaggatgtcagcggggatgatctcccgaaaggcggctttccagctttcggtctggatgtgggcaagctgcggggcatccccgggtcttacgcttcggatgtcagcggtgtggttcatgagagggcctcctttgcatttgctgagggggaaaatttcgggtcagagggccagaacggcgtcgagacacagggtgagggcgtattcataggcgctgccgccccagtgccgctggtcgtagcgctggacgtcagcaaggctgtccgctgtataaagaagcatcccccaagtggcgctgcggaaggcggcacaggccgcaagggcagagccctccctctccaccacggagcagccctcgcttttgcggtaggcgaccttctccttcgtctcacggaagaagccgtcggtgtgacgacctcctgatagcgcatatggtgggcgaggatggtttgctcgatggcccgccgggcgggttcgctgatctccatatagcgggagggcggggcgtagtggtaggaggccccctcgtcccgcagcgccttgcaggggacaaggaaggtaccctcgtcaaagggcgtcagcacgccgcagctgccggcggagatgatctcacggaccccgtagctgatgagccagtccagcagctgggccgctgcggcggcccccaccggggcctgacagagggcgacctcctgcccgtggtaggtggtgacatagatggggtagagcctggtggcgctgttgaaggtggcgacctgtctggctcccgcagcgtgggcgcagcggtcgatataggcgccgagaaaggcgaacacgcatttccggggcagatgcaggtccagctgctcatagtccgggccgatgacggcggtctgctccggatcgaattccagaagcggtatctcgcaggggatgatgcccatggcgtggcctcctgaatgggaaatcaaagcggggggatggagactatgataccacacggggagggggactgcaagagggggctgggagggggctttccggtgatttggagcgggatggtggcgatggagggagaaaattttgcaggcagcggaggagagcgggcgaaaaatggaggtgtgagacgggagagggcaacagcgggtgcaacaaaggccggtgatcggggagagataggaggggtgaggagatgcggaagcgatttgatcgggatcgggccgcggcggagtgcgggctgtgcggacgggagatctggccggaggaggggttttatcaggtgaacggggagatcttctgccgggattgtctggagaggtatgcggagcaattttttgcggggtttttcagagaagggactgtgtgatggggaaggaaagaaatgtgccgtgggaggagatcctgcggcggagaaaagagggggagacggcccgtgcgctggcggaggagttcggcgtgtcggtggagagcgtctataagcgagggcagcgggagcggctggagcagaggggcagcttgcagcaggcggcccgaaagctgtgccgcagtgcagggagcatggtggcgcagatggaggatatggacgccaaggagcttaaggaactgacggcgctgctgcgggagctggtgacgctggaggagcggacggacaagggaccggagacggtgaaggtggtgctggcgaaggaagcggaggagtggagcagatgagcgtgcaggtggtgaagctggagcggcccaacccccggcaggaggagtttttgaagtgtgaaaagaagtatgtggccttcggcggggccagaggtggcgggaagagctgggcagtgcggaccaaggcagtgctgatggccctgaagtaccccggcatccgcattttgctggtgcggcggaccatgccggaactggagagcaatcatctgcgttttttgcgcaggcagctggcgggggtggcggaatacaaggcggcctcccggcagctggtgttccccggcggcagtgtgctggaactggggtactgcgcctgtgacggggatatggaccggtatcagggggcggagttcgacgtgatctgtatcgatgaggccacccagctgaaggaggagtggctgcggcagtttgcggcgtgtctgcgaggggtgaatgagttccccaagaggatgtactacacctgcaaccccggcgggccggggcatgggtacatcaagcggctgttcatcgaccggcggtaccgggcgggagagcgggcggaggaatacgccttcatccccgccagggtcacggacaatcaggcgctgctgcgagcgcagccggactatctgcggcagctggaggccctgcccctgcggctgcggcaggcgtggctggagggcaagtgggatgtatttcaggggcaattctttcaggagtttgtggacgacccggcccactatcgggacaggcgattcacccatgtcatcgagcccttcgacatccccagagagtggagcatctggcgcagctacgacttcggctatgccaagcctttttcctgcggctggtgggcggtggatcacgacgggtgcgtatatcggatcctggagctgtatggctgtaccggggagccggatgagggggtaaagtggacgccggagaagcagtttgcagagattcggcgtatcgaggacacccacccgtggctgaagggacgggatgttttaggggtggcggacccggccatttgggacagcagtcggggagagagcatctatgagacggcgctgaagcaccgcatcttctttatgaagggggacaaccggcggataccgggatggatgcagatgcactatcggatggccttcgacgaggaggggtatccgcagctgtatgtgttcaccgggtgtcgggcttttcgcaggaccgtgccggggctgctgttctccgagacggagccggaggatctggacacccggatggaggatcatgtggccgatgagagccggtatctgtgcatggcccggcctatcccgccccggcgggtggagacggcactgccggtgcaggacgatccgctgaatatgctggtgagacggtgaaagcgggaaaaatttccggtgttgcacgggaacgtgcaacaggagaggaaacttccagcggaggagggcgaagaagtgaggacaggaaagctgttttggacaaacggaaggggagaaatgccatgagcaagacgcagaagacggcgggggagaagccccgcatcggagagcaggaggtgcgccgggcggcggagcttctgaaaaagtaccggcaggggaaggtgaatctggagcggcgtatcatcgacaatgagcagttctggaagctgcggcactggccgcagatggagaagaagggggagggcggcaatcccggcgacccgcagcccaccagcggttggttggtgaactgcatcctctccaagcacgcagacgccatggactgctacccggagccaacggtgctgcccagagaaccgggggaccgggcagaggcggccaagctgacccgtattctgccggccatcctgaagaagaatcagttcaagcggacgtattccagcgcatggtggtacaagctgaaaagcgggtgcgccgtatatggcgtgttctgggatgcgggcaagctcaacggactgggggatgtgtctatccggcggatggatctgctgaacctgttctgggagccgggggtgacggatattcaggactcggccaacttcttctccacggagctggtgagccatgaggtgctggaggagcagtatccccagctgaagggaaagctgggcggtggagggtttaccgtgagccggttcctgtatgacgatcaggtggatacctccgacaaggcgctggtggtggactggtactaccacacccgtgagaaggggcgcagggtgctgcaatattgcaagttcgtgggggagacggtgctgtatgccacggagaacgacccggagctgcgggagcgggggtggtacgaccacgggaagtatccctttgtgttcgacgtgctgttcccagaggaggggacgccctgcgggtacggatatgtggatctgtgcaaatccccgcagaagcagatcgacctgatgaatcaggccattctcaagaatacgctggcggcggccacgccacggtttttcattcggtcggacggagcggtgaacgaaaacgagtatgccgactggacccggcccttcgtacacaccaacggcaatctgggggcggactccattgcacctattcacacggcgggactggacagcgtgtatgtggccatcatgcagagcaagatcgccgagatgaaggagacggcggggaaccgggacgtggccaacggcggaacggcctccggtgtgacggcggccacggccatcgccgccttgcaggaggcgggcgggaagctgtcccggaacatgatcgacgacgggtatgaggcgttttccgatgtggtgacactggtcatcgagctgatccggcaattttaccagctgccccggcagttccggctgctgggggccatgggccgggaggagttcgtcagctacgacgggcagggcctgcgggagcaggtgatggacgacgggacggggatttgctaccgggtgccggagttcgatctggaggtgtcggcgcaggatgagaatccctacaagaccatggagtataaccagctggctttgcagctgtttcagatgggctttttccgggaggatatggcggatcaggcgctgcggtgtctggagctgatggacttcaagaataaggatcagctgacggcggctattttgcagggcaagcagcaggctgccatggcgcagacagcggagggagcggcctccggcggtgggacggcggtgaagcaaacggccatggagcggatgcgtcagcagacccatgaggcggtgaggccccgatgatccgggcggtattcggacgggaccgggtgacggtgacgggtcatgccggatatgcccccaaggggcaggacatcgtgtgtgcggcggcatcggcgctggtatttgccctgatcggcagcctgcggcaggaggagaacctacgggaggtagtgatccgaccggggtatgtgacggcggcggccaaggggccgtgccgggaggaactggagctggtgcggtgcggactggcgcagctggcggcgcagtatccccaatgcgtagaggtggaggggaattgcagatagggtcgtgacctaccacggaaaggaggtatctccgtgagagaggtacagtggatgcagtggtttgcagaggagggggcggccgatgaggcggcccggacgggcgatacggctcccgacgccggggagcaggaggattttgcggcgctgatccggggcaggtacaaggcggacttcgacgccagagtgcagaagatcctggatggacggctgcggggcctgcggcaggagaatgcacggctccggcaggaacgggagcagcggcaggagaaggcccgtcaggcgatagagtccatggcggcacaggaggagcaggtgcggcaggtctatccggagttccggtggcagcgggagatggagaacccggccttcggacggctggtgtgcgccggagtggagccgatggcggcctatgaggtggtgcatcgggaggacatcctgcggcgggccatggcctactccgccaagcgggccacccggcaggcggcacgttctatcgccagcgtgggcagacgtccggcagagaacggcgggcggtgtgtaggcgtgacgggcagcgatcccagaggactgacctcccgtgagctggcggatatccgcaggcgggtcatggagggggagaaaatctccttctgatgggagcggccacggatggagccgcaggaagaacacaacgaagcggagaaaggaaagaggaatatggagaaactgttcgatctgcaggtgtttgcacaggagaacacccagaccaccggcggactgtccgccgagatgaaaacctattacggcatggagctgctggataacgccaagccccagctggtacacaaccagttcgccgccaccaagcccctgcctaccggcggcggcaagacggtggaatggcgcaagttcggctccttcgacaaggcgctgaccccgctgacggagggcgtgaccccggacggcagcggcatctccgtcagctacatcaccaaggagctggcccagtacggcgactacaccacggtgtcggatatgctggatctgacagccatcgacgatgtggtgctggagatcaccgaccgccatggggccaacatggggctgacgctggataccgtgacccgcaatgagatccagcagggtaagcaggtgctgtatgctccggccatcggcgcagacggcagcaagacggaggtcactgcccgtggcgctctgacggcggcgtgccgcctgaccagcgagatggtggccaaggccgctacccagctgaagaagatgaacgcccccaccttcgacggcaagtatgtgtgcatcctgcaccccagcgtggccttcgatctgcggcaggacgaggcgtggatcgccgcacatcagtatgccgccgccacggagctgttctccggcgagatcggtgagctgcacggagtgcgttttgtggagaccacggaggcaaaaatcttccggggtggcgatctggctcagaacggccgcaccttgctggtcaacggtaaggtggagaataacgccgtggtggcctttgacggcggcaccgtggcggcgggcgctctggcgggccggtatgtgctgctgggcggtgagcgccgccgtgtggtcagcaacaccggcagcagcatgacgctggacagcgccgtgaccgccgccgacaacgccgtcatctatcccggcgagggcggcgccgagggctgtgccgtatacggctgcctgttcgtaggcaagggcgcttacggcgtggtggatctcaacgatggcacggaggtcatcgtgaagccccgtggctcctccggcactgccgacccgctggatcagcgctccagcgtgggctggaagggcgttcacgccgctgcgatcctgtacgacgagtacatcgtgcgagtggagtgcggctcctcctactccgggcaggacaaggccaactaaagagaagcggaaaacagagggtgcgggcggtatcgcccgcacccggcggacggaaaggagcaggcagatgcaggagaagatgaaaacggtactcatccccaaaggacggaagaacgaggagaatttcgtgctggtatcggtgaatggacggaacttcaagatcatgaagggcgtggaggtacaggtgccggagtttgtggcgcaggtgctggagaacgcccggatgatggaggacgatgcccgcagctatgtagaccgcatggccaactgaacggaagggggagagagaatggcgacggtcaagcaggtgctggagcaggtggacgccatgctccccaaccagtacaccacggcggagaagcggcggtggcttctgcaggcggagggcttcgtggtgcgggaggtgcatcagccacacgcaggcggagaggagacagaggtgccgccggaggacaccggggaggacacggtgctgctggtgcagccgccctatgacgagctgtaccgccactatgtggaggcgcagatccactacgccaacggggagatggagcggtacaacaatgcctgtgccgcttggaacaacgccctgctgacataccgggacttctggtgccgcagtcatatgccccggcagggggtgaaggcgctgcggctgatgtgagggggatgggatgttttttcagaaaatgagcgtgccggtgcagagcacggtaacgatcagcagctttttagggctggatcggcgggcaagaggagagttgggctccttccgggagatggagaatctcacctccgacggctatcccaccctgacggtgcggccccggcgtggtcttgcagggcaggtggagtcccccggcggcatagccgccaaggatgctttgatctgggtggacgggcacaccctgtatatcggcggcgtggccacggagttggtgctgacggagggaagtaagcagctcattggcatgggcaactggctcatcgtgtggccggacaagaagtacatcaacaccggcgacctcagccagcacggcagtctggagaaccgggtgcagacacagggacaggtgacactgtctctctgcggggccaagggggcggcgctgggggactatctggtctcggaggagccgccggcggacccggcgggaggatgcctgtggctggacaccaccggggagataccggtgctgcggcaatacggcgagagcggctggagcatccgggaggatacctatgtaaaaatagcggcaggcggcatcggcgtgggcttcaccgccggggacggcgtggtcatcgagggatgccgtgaggagagcatcaacggcagccatgtgctggaggcggcggaggacggctctctggtggtgccggggatgatcgccagtcaggtgacccagacggaggagatgacggtgcggcgcagcgtgccggagatggacttcgttatcgagagcggcaaccggctgtgggggtgcaagtacggtgtggtggacggaaaggccgtcaatgagatctatgccagtaagctgggggatttcaagaactggaactgctacgccgggcgcagcaccgacagctatgtcgccacccgtggctccgacggccccttcaccggggcggcggactatctgggcagtcccctgtttttcaaggaggactgcgtcgagcgggtgtatcccagtgcggcgggagcgcaccagatcgtgacggtgcggtgtcccggcgtcaggaagggcagcggacggagtcttcagacggtggagggcgtgctgtactaccacggctgcggcggcgtatacgcctttgacggcagtatgccacaacgagtatcccaagcgctgggggaggatgagtatcacggcgccgtggccggaggcgcagacgggaagtactatctctcggtgctggacaccgagaatcagccgcagctgctggtatatgatgtgcggcaggggctgtggcaccgggaggacgacctgcgggcggtgggcttcgccgtcaacggcggcgtgctgtacgccatgaccggggcgggggacattctcgccttaaagggcggcggcacagtgcaggaagagcctgttgtatggcgggcggagaccggcgaactgggactggactccagcgagggaaagtatctggtgcgattatctctgcggctgcggccagaggagggtagtaccgtccgagcggcagtgagctatgacgaagggcagacgtggcaggagcagggcggcgtcaccggcagcgggtggctgcgggactgcgtgctccatgtgcagccccgaaggtgccggagactgcggctgcggctctatggtgcgggcggctgccgggtatacagcctgacggcggtgtatgagaagggaagtgacggcccgtgagcacactgatgatgccgcccagccctcaggggacggtgcaggagcagctggtgcggcagtattcgtacctgtttcagatggcccagcagctgaatgtggcgctgggacagctggagagcggcgggactgccgcaccctccggcggcactgcggccccggcggcagagcgggagcagcagtatcagaccctgaagagtatgatcgtcaagacggcggatacggtgcagcggcgtatggatcagctttcggccaagctgacgggggagtatgtggcggcgtcggagttcggcacctatgtggagcggctcaatgcgtatctggaggcgaatccggaggcgctgacccagtattacagcttttttgccgacctgcaggccagcacggagacggtgtccgccgcctttgagcagtaccgggtggagacagaaggatacatccggacgggcatcgtgtgctacgacggggcggtgccgcagtatggcgtggcggtggggcagaacctcacctgccgggaggtggacggagagacggtggtggagcagaacgacttccgggccaccttcactgccagcaagctgtccttctggcaggatgccggcgaggtggcgtatgtgtccaacaaccggctgtatatcaccaacatcacggtgctggagggtatgagcatcggggagtgggagatctcgtcggagaacggactggtgatccggtggatgggaggttaaggaaatggccagtatttacggaggggcctccggcaacggctggaagctgaggctggactatacggtgacgcaggaccgggcggccaactcgtccagtctgaggctgaggctgtatctgtacgccaacaccacggggtcatataacctggaaaaggattcggcgtattacgttttgcaggggcagaaggtctatcagacgtatcagtacacgtcgccgggatggtatctgctgggagagcggacggtgacggtgcgccatggggcggacggaaacggctcggtgcagctgggcggtcagtgggtgtcggatgtggaatccagctggaccccggccagcctgtcggtgtcggcggcggtagcgctgccccgtatcctgcggccctcggtgctgcgggcggcggaactgacgctggggcaggcgtgtgtgctgtccattcgtgcagaggaggagcggtacacccaccgggtgacgtatgcgctgggcggcgccagcggcacggtggtgcaggagacggcgcagcgggagctgacgtggactccgccgctggagctggcccggcagctgcctcaatctgtggcggggaccatgcgtctgacggtgaccacctatgacggcgacaccaccatgggaagcagcgtcacggagtgcagggtctatgtgccggatacggtgcggcccacggcggcgctgacggtgacgccggtgaacgacaatgccgtgctggagcagtggggcgtatttgttaaggggatgacccggctgaggtggcaggtgacggcgcagggggcctatgggtcctccatcgacgggtgcagcgtcagctgcggcggcgtgggcggcagcgggttgagcggtatgtccgccggggcggtgtcggtgagcggcgaggtaacggctgcggccatggtgaaggacagccgggggcgcagtgtctccgtggaggcggggccggtgacggtatatgagtacagcggccccaccatgactcgaccggcggtatgtcgatgtgacgccgacggcacggcgtgcagcgacggcggctatgtgaaagtaaagtgcggggcgcagtgctccgacgtgggcgggcggaatcaggtgagcctgcgggtgcgctcccggcgtcccggcggggagttcggcggctatacggcgctggagagcggcgtggagaaggtgctgccgggattttctccgctgctgtcgtatgaactggagctctcggcggaggatctgccggggagccggagaacggtggtgtgcgccattcccacggcggcggctgcggtgcatctggcctccggcggcacggcggtaggcgtggggaagtatgccgagcacgaccgggcggtggaggtgaatccggagtgggaggtctatgtgaagggtaaggccctgtgggagctgatctatcctgtggggagcctgtatctgtcggcggcggacaccgatccgggggtactgtttggcggaacgtgggagcgcatccgggacaggttcctgctggcggcaggcactgcgtatggtgcagggaccaccggcggtgaggcggtccacacgctgacggagaatgaactgcccgcccacgctcacaacccggccaacgaggcggggtattacggctttatcaccaacagccagaaggcgttcaccgtgggggatatgggcgttcagagcggcagcggtcggtactatccctatgccccggcggcctttgatatcagccgcaataccaaaacgggcagcgtgggcggcgggaaggcccacaacaatatgccgccgtatctggcggtgtacgtctggaaacggacggcatgaaaaggaggaagaaagatggcatccaattatcctaccgtctactacggctcctacggagagacggtgaagcagctgcagcaggcattgaaccaggtgggctattcgctggacgtggacggcggctttggggaaaagacccgtgcggcggtgctggactatcagcgcaagaatggtctgcgggtggacggcgtggcgggcagcgagaccatggggagcctgttggcccggctgaccccggctacctcaggccccagcaccagcggtcaggtgctctccggcgtgtcggatgagactatgagccggatgcggcagctggagaagggatataccccatccgatgaggtgacggcggcccgtgctctgtgggagagcctgcaggggcagaagccgggggagtatgagtcccggttccagcagcagctggcggcgctgtacgaccaaatcagctcccgcaagccctatgcctacgacccggagcaggacgccgactatcagcgctatgcacggctctatcagaggcaggggcaggcggccatggaggataccatggggcaggcggcggctctgtccggcgggtatggctccagctatgcccagcagacggggcagcaggcgtacagccagtatctgtcggagctgtcggccctgatcccggagctggagaagcaggctcgcagccgctatgagcagcagggacaggccctgatggaccggtacggcctgctgcagcaggctgaacaggtggattacagccgctggcaggatcagctgaaggcgtggcagtccgacagcgaccgggcgtatgagtactataacagcgtggggaaggaggaccgggatctgtacagcaccatgctgaagtactatgccggcaaggcggcggacgaacagaaggccgccggaggcgtgcggtatggcagcggccggacggtggagggggagaagccccagtccctcagctccactgccagcgacagtctggagcgggccatgggtaactatctcaaggccggggatacccgcagcgcacagaaccttattaccctgtacaaggagcggatgacgcccacccagaagaagcgcttttcggcgctgtttgacaagtacggcgcagccatcggctggtaaggacttgccaaagggcggcggggcgggtacaatagagcctgacttgtaaggggagggcgctgaagaatggcgggatactactacggacagctgagcaaggagaaaaaggcggtctatgatatgctggcggcggggtgcgatgcgctggcggcggtgatccgggtgccggatctggggacggaggtgctgtcggacatctatctgcggatgaagctggatctgccgctgctgttttttgtgacggggtttcactaccggaagatgccgggggcggaccatgtagaggtgctgccggactatctgttcgatcggggaaaggtgaagatgcaccggcaggcggtgacggctcggctggagcggctggcccggcccctgaagggaaagagtgaccgggagaaggagctggccatccacgatttcattctggagaacgtcacctatgacaagctgaaaaagtcctattcccacgaaatcatcgggccgctgacccaaggggtgggggtgtgtgagggcatcgccaagacggtgaaggccctgtgcgacgctgtggggcttccctgtatcgtggcgctcagcgaggcggcaccggagatcggtgtgcgataccggcacacatggaacgtggtgacggtggaggggcagcggtatcatgtggacgccacctttgataactcccttcagcgggggatgaagcggtacgactacttcaatctggacgaccggcatatcttccgggaccatcagaagctggtgctgccgctgccggagtgcagcggggacaaggggtacttctaccggtcgctgtccttcaccaagacggaggatgtggagaagcgggtgcggcaggccctgcggaagaaccaggagcacttcgtgttccactggcgtggcggcgggctgaatcaggagattctggggcagctgctggagaagtgcgccggtgcggcggcggagcggggcaagaccgtgggctgctccctgaaccgggcgcaggcggtgatccagctggatttctccgacgccccggcgggggaggtgctggtggaggagccggacgagggacagaagctgtgaatgggtaaggatttcaggctcttgaaggagcgagaggcgcaaaaccggcggttttgcgcctctttttgttgcactcaaccgttggttgaattataatatccgtaattcaactacgccgttattgccattttagacggttttttatatgctgagagcacaaaatgaaaggagcgaacacacgatgagtgagaatttgttggcaggccgcatcgcacagctgcggaaagaggcgggcatgacccaggaacagctgggcaatgccttgggactgacgtatcagtcggtgagcaagtgggagaatgggctgtcctgcccggatgtgcagctgctgccgcagttggcggatctgttccatgtgacactggacgatctgtttggtcgggaggccccgcaaccggagcggacggcggagcaggaggagatggagatggagcgcatcctgccgtggccggacgatgatactctatatacagtggtgtatcatgggcatcagctgctgacggaggagccggcagcgctgagaggacaccgggaggaactgcggttcgtgtacgacggtccggcggtgaacgtcagcagctggttcgacgtggtgtgcgagagtggcccggtaggcggcaatgttaccgccggaggagacgtgaagtgcggcgaggtaggcggcagtgtcacggctgacggagatgtggcgtgtgacgccgtaggcagcggcgtgcaggccggcggtgatgtgcattgcgccggtgtggagggcaatgtcatcgcaggcggcgatgtggcctgcggcggggtgacgggtgacgtccggagcggcggcgatgtggcctgcgggagtgtaggcggcagcgtccgggccgggggagacgtggtgtgccgcaagggcggcgacggcttcgtattcactaccggtgaaaggaacgtggaggtttccgacgtggcggagacggtggaggatatccgccagacggccaaggggttgaaggacagcctgcgggagatgttccgcaggaagccttccgaggaggagtaagctgtaacagttttgtatcaaattgtaacaaatttgtatatattagatgaaaaataaaagaaaagcggaaggaatatagacgtttttgcgaaaagctattgacgggcgcagacgggtatggtaaggtcttttacagaggagcaccgtaaaaaagagctttgaagtgaaggaggatcatattatgaaacgtttcctgacgatggtgctgatgctgtgcctgtgcgtgggactgtgcgccggctgcgcccagaatcagcagcccgatcctcagaagccggaaaacggtacgctgacggctgaggagctggaggagtttcaggcgatgttcacgccgggcagctggtacagtcaggccaccaccagcagctacacctccccgaaggatatcgacctgcaccacctgttttacgacggcatcgggttctacgggcttctctatggccacacctatctcaccgaccgggagcgggcgtatctgacgtcgctggatccggagtcggtcatgcagtactttcgggcgccccggcaggtgatggacgccgtgctgaaggagtatttcggcgtgtctctggcggaaaccaatcaggtggagctgtccaaattcatctattgggcggagacagatagctattacgtcgcccacacggatacccggatgacctctgtgaccctcaccggcggcgagcgggcggaggacggcacggtgacgctgcggtatgacggcggcgtgatcgtcctgatccaccacgacggccacgacaccgcagagtatacagttcactcccaccagtgcggatgacggagtgatatgaaaccacacatcccccggagtactgctccgggggatgctcttttcccggaaacaaatggttgtaaccggtggaagggtgtgatataatgagacggaaaaatcggcggggagccgcctatctgaaaaggaggaacgaacatgaacgaggtatgggatctgagtatcctttacaaggattttgacgacccggcgtttaccggggatatgaaggcactggacgaggccattgcggcggtgaacgcactggccggtgaggcggcgggcatggagcacagccagctggtgcatcgcttcctgcaggtgcaggagcgggtggaggaactggtcaacaagctcttcatcttctgcagccttcggtgcagcgccaacaccgccgataccaaggccaacagtctgggcgaccagctcagcgccaagcttagcggctgcgccgccgccaacgcctccctgcgccggacggtggcggagctggaggatctggatgccatcatggacgccgacccggcgctggagccctatcgcttcctgctggagtccatccgccgggacagcaagtacctgctcaccgaccgggaggaggagctgttcgcccggatgaacatctccggtgcttcggcgtgggagagcctgcgggataacctcaccagcagcgtgaaggtggagtacgacggcggcatcaccaacctgtctgccatccgcaatctggcctacgatcccgatcccgccgtccgcaagagcgcctatgaggcggaactggcgtgctatgacaagatcaaggactccgtggcctatgccctcaacagcatcaagctgcaggtcatcaacgagtgccaggtccggggctatgcctccccgctggataaggccctgtatcagagccgcatgaagcgggagacgctggatgccctgctgggggccatggatgagtatctgcccaagttctggcagtatctgcgagccaagggcaaggcgctgggccacgagaacggcctgccttggtacgagctgttcgcccccatgggcaagagcgacaagaagtacaccacacaggatgccaaggactatctgctgagcatcttcagtggcttcgacagccagcttcacgacatggtggagcgtgccttcgacgaggcgtggatcgacttctatccccgtaacggcaaggtgggcggtgcctttgactgcggtgtccccagcgctagacagagccgggtgctcaccaacttcgacggcgccttcggtgatattgtgacgctggcccatgagctgggccatgccttccacgatcagcaggtgttctcccacccgctggtgtgccaggagtacaccatgcccgtggcagagacggcctccaccttcaacgaggtgctcaccgtcagcgctgctatcgacgccgccgagagcgatgacgagaagctggctctgatcgagagtcagctgtccgacgcctgccagatcatctgcgacatctactcccggtatctgttcgagtccgccgtgtttgccgcccggccggaggagttcctggatcccgaccgcctgtgccagatgatgctggaggcccagaagaaggcctatggcgacgggctggatcagacctgcctgcacccgtatatgtggctgtgcaagggccactattacagcggcagcctgagcttctacaacttcccctatgccttcggcggcctgtttgcccgtggcctgtatgccaagtatcagcaggagggcaaggacttcgtgccgctgtataagaagatgctccacgccacctccgtcacctgcgtggaggataccgccaagatcgcaggcatcgacctgacggataaggccttctggcggcagggactccagtctctggccgatgagatcgacctgttctgccagctggtgaagtaaaccgtattccccgagcatacccccctgtccgccgcaaggcggtcaggggggttgtcttttggaaggagatggcaccaccatcgccgctttgatgggcttttcccggttcgtcagcggattttgcttgaaacaggggggatagcctgctataataaattagttattatatgcaaacatgaaagaggtgagcgactcgtgtaccttcgggctttggaaatccagggcttcaagagcttccctgataagacggtgctgaacttcggtgaggacatcacggccatcgtggggccaaacggctccggcaagtccaatatctccgacgccatccgctgggtcatgggcgagcagaacagccgccagctgcggggagccaagatggaggacgtgatcttcggcggcacggagaagcgcagccagatgggctttgcacaggtgacgctggtcatcgacaacacggagcacatcttccccggccgggacgaggcggaggtggccgtcactcgccgctactaccgcagcggggagtcggaatattacatcaaccgccagtccgtgcgtctcaaggatgtcaacgagctgtttatggacaccggcatgggcagggagggctactccatcatcggacagggcaagatcgacgagatcctgtccgtcaaaagcggtgagcgccgtgaggtgttcgaggaggcggcgggcatcagcaagtaccgccaccgcaaggaggagtcggagcgcaagctccagcggacggaggagaatctggtccgcatcaacgacaagatcgctgagctggagctgcaggtggagcccctgcggaagcaggcggagacagcgaagaagtatctggtgctgcgggacgagctgcgggcgctggagatcagcgtgtggctggaaaatcttcaggctctgaaggtcaaggcccggaagctggaggcggatcaccagtccgcctgtcaggataagcagcgggcgcaggcggcgctggatgaggtgtatgccgccgcagagacctgcgtggagcaggtgcagcagaacgatatgcaggccgaggccctccggggccggatgtccggactggagacggctgccggggaggaggacgccgccatcgccgtgctgcagacgggggtggatcataatcaggagtccatgacccggctggagcgggagatggccgacagcagcagccgcacggaggatctgcaggggcagatggatgccctcacccggcgcacggaggagatcgaccgccggacgcaggagctgaccggcgagctggagggctggatgcaacagctgcagtccatgactcagcgtgccggcagcgccgtccgtgaggcggaggccctgcgggccagagagacgctggccacggcggctgccgccgatggaagggtgcagctgtcaggactggaggcccagtctcaggcggcccgcacccgactggaggaggtgggccgtgagctggagcagctgcaggagcgccgccaaaccgaggagagcgcagcagcggagaaccgtaaggcgctggaggaggcccgtgaggaggccgcagcggcggagaacgtcattcagggccacggcctgaaaatgggcgggcgacagcgccgggcgcaggaaagcgctcagcagcgggagcagctgagccgtcaggcggcggccatggaggatcgcatccgcctgctgacggagatggagaaggagtacgagggcttttcccgtgcggtgaagctggtgatgcaggcggcggacaagggcggcctgcggggcgtacacggcccggtggccagcctcatgaccacgcaggagcaatacaccgtggccatcgagatcgccttgggcggcgccctgcaaaatatcgtggtggacacgcagaacgatgctaagtccgccatcggctacctgaagcagcgggacggcggacgagccaccttcctgcctctggacgctgtccggggggagaagctgcgggagagccgcatcgaggaggagtacggcttcgtgggcgttgcctcggagctggtgcagtatgaaaagcgctacgacggcgtgttccagaacctgctggggcgcacggtggtggtggaggatctggattgcggcgtcaccatggcccggcggtaccagaaccgcttccgtatcgtgacgctggacgggcaggtcatcaaccggggcggctccatgacaggcggcagcgtcagccgcagcgccggtgtactgtcccgtgccaacgagctgcagcggctggcaggtcagctggagcagctgcgtgggcagctggcggatgccgaccgccgggcgcaggagacgggtcgtgagctgcaaaag

SEQ ID NO: 12369 - DNA, 85162 bp, Unknown
  gut microbiota DNA sequence
ctgccggaacttcctcatggcgctgccggtgccgccgtccggggcctgatcctgacggtctcccaccaggatcagatggggcagctgtatccgcaagtcctctccctgctggtccacggggcctgccgggagctgttttaacaggggaaggctgcagcggtgtggcttttccaagggatatcggttcgcccattctaaccaagcattttacccgatggtcaaattccactaactgccaagtcacagggaggaaggtacgttcatggaatgtgatagttctgttttctcattgtccgacacctcctgacgttttcatgatacgcagaaagctgccgaggcacaaagatgcgatatatgacaggcagaaaacaataaggctccgaccttgtgagccagagtcttattgcttgcctttgcgaatgtcactttccgtattttgaaattaccgccttatagggctgtgacatggcctctcctttttctgttttcagaaggtcatcgactgccgcagcggttgacccaacgggcctcagatgacctgatactccttcagcagcttctcgatatcggtgccgtggatcttgctgagaaccttcttcagggccatcttttccaccagattcaactccatatcgatgggtttcttgccgtcccgcagcttcacagtggcatccagcagatcccggacatcatatacgctgccccagacctccggcacgccacgatccacgttcagcagggtgtacacggcctccataccggtccgcatggagtactccgtggtgaagatggtgtcacggggcgtctcggcaaactggcccaggaaggcgaagttcacagcgccgtcgggtacgaccttgggccgatcgccgtaggcacggggcatgaagaaggcgtcgatatagggcatcatcacagggacggtgttggcgctattggcggccatgtcctcgatctcactctccggcacaccgatgtgatacagccactccatgcagatctccttaccggtacactcccgcataggctttttcacatagtcaccgggcttgtcggtgaacagggcgtacacccataccaagcagtgatccttgggctgctggcggaactgaggctggcggttgatggtccagctcatgagccagctggagtccttcacagtgacgatgccgccggtgactaccttgccggtgaagggatcccgcttgcagatgttcttgatataggggatgatgcgctgatccagcgtctccaccgtggcgctcatccagttggtctgctccggatcatagcagaacttgtccggatggccgaaggaggggtcctgagcggcgatcttgcgccacatatcccagccgccgccctccttgatctcggtgttgtagggggcgggggtattctggctgcccatggaggagttctctacgcagccgccgttggtgatgaacaccagatcgttctccgtcaggtcgatggcctcgcttttgccgtcccggaggacgtcgatgcgcttggccaccttccgatgggcggtgcagtcaaactccacgttggtcacctgcacgccgaagtggaactggacgccgaagccctccagatacttcaccatgggcaggatcatggactcatactggttgtatttggtaaagcgcagggcggtgaagtcgggcaggccgccgatgtgatggatatagcgctggatatacagcttcatctccagagcgctgtgccagttctcgaaggcgaacatggtgcgccagtacagccagaagttgctgccgaacacctcgtcatcgaagaagtcgctgatgcgcttgtcctgcaactcctcgttgggggtgaagaacagcttcatgatctccatggcgcccttgtcggagatgtcgaacttaccgtcggtatgggcgtcctcgccacggttcaccgtggcccggcacagggaatagttggggtcggccttgttgagccagtagtactcgtccagcacgctgacaccctccgtctcaatggaggggatggagtggaacagatcccacatgacctcaaagtggttgtccatctcacggccgccccgcatgacatagccgatgttctcgaacttccagccgtcgcaggcgccgccggcagtgggacccttctccagaatgtggacccgctcgcccttcatctggccgtcacgcaccagatagcaggcggcagtcagcgccgccagaccgctgcccacgatgtaggcggatttattgtccacgccctccggctttttgggacgggcaaaggcctcatagttaccactggaataatacatagaaatgcgctcctttctgttgaccgttacgccgcccgtccccttctcagcactcgcatggggagcaacggcgtcctcgccggtatgttttcctttgatgaggataatatacaactcaggcacgatttgttcaataaacagaaaaatcccggtgataagttttttatcaccgggatgggagatgttcagttttttatcattccgctccgtttgatgcaggcttgtccgtccgcatccgttgcagggcggccaccacattgccgtggagcaccagctccagcttctgcaccatgacctgtgggtcgcccttcatgtcccccttgatccagtccagcatcagtcccacgaacagatatttatagagcgtggcgatgagttccttgtcctcctgccgcacggacatcccctgagcttcctcctccaccacactctccagcaggtcataggtgacccggtagaggtagttctccacctgctcccggctaacggagcgatagacgttcaggatgaagggcttgttgtccagcaccgcctgaaggatctgcaaaaagccctgctgccacgtctcataggtctttttccccgccagcgcccggctggcgtcctcctgacagctccactccaccagatcgtaaatgtccttgaagtggtagtaaaaggtcatgcggttgatgccgcagtcctcagcgatatcattgatggtgatcttgttcagcggcttttgcagcagcagatgcttcagcgacgcctccagcgcccgcttggtgacctgtgacatggcggccctccttttctttctgccctcatgatagcctcccggccgccgcctgtcaatcccttttggcccggcgcaccggtatccggccctgtctcaggccatgcagcaagcttatcacagcagccccggcagttctgccggggctgctgttgcttcgacttgcgagacgggccttacaggttctcctgcttcagcgcctcaatggggttttcactgcggatcttccgggtggcatagagcatggtggcaaacaccaccacgaacacgctgcccacggcgatggccacgctgtaccacgggatgtagaactgggcggcgatgctctgggccacgctgcgatagatgccataggtcaccagcaccgataccggcaggccccacagcagcgcccgtgcgccgtagatgatgcactcgtagtccatcatccgggcaaagccccgctgggtcagtcccacggaccgcagcatagcgaactcccggcggcgcagagcgatggaggtggagatggtgttgaacacgttggtcatggagatcagggagatgaggatgatgaagccgtaggaaaacacgttcaccaccgtcaccatggcccgctggctctcaccgttggcggccagatcttccagatcagagcgactgttgcccagttccatcaggatctgccccatgctctcgtaggaggcggcgtggtcgctgctcctgaaccagaaggcgtcggcggcagggacctgcccggtgacggcctcatacatactgtacgggtacagcagatacaggtagtcgccggtacccaggaagtcgggagccttcttcaaaatagcgcccacggtatagctccgggtgaggacggcctccgatgccggcaccgcctgtgcccggctctcgtccggggtctccccctcgctgcgggcggtatagtaatcgtctatatagtcctccggatagtacagcacatactccgtaccgtcccgtgtgatgcggtctccctcggtgaaccagccctccatgggctgatagctgctctccgttccggtgatgggcaggctgctgccgttcagcaggtggtaatggtagagcttattgtacttactaccctcggtgctgcgccagatgtccagcatatcccacgccaccgcctgaggtgcatcggcacggaagtaatcctcctccgacaggccgttgtcccgcagcagctgccggaaatcctcatcccggaggaagtacatggcggcgctgcggtctccctccagcccggtgtccttccagtagtccggatccatgtcctccttggcaaagtgcaggctggcgtagctgtcggcggtgtagaaacccgattccacgccgtcggcggcggccagctgtcccagccgctgctccggcgtcacgccctccggcagggcctcgctgtaatacagctgcacgcccagtgtgctgttgccccccagttggtctacggcgtccgtcagataggcgcagaaggaggaagcggagatgaacagcgtcacgctgaggaacagtcctaccaccgtggagcggtagcgcttgcggttgcgcttgaagttcttggcggccaacatcccggagaagccgaagagcttttccgtcaggcgggaggtcctgacctcccggccccggagcttcacgtccttggtctggcggatggcctccaccggcgacacccgcacggcacgcttggcggggatccatgccgagatgatggccgtcacaaggccgatgcccgccgccgccagcagcgcccagccgttgagcacaaagtgcatttgtagggcgttgccgctctcccccatcaggaatccgaagctgtcccgcagacagtacagagtgatgccgatgcccagacagcccaccagcagacccagtgggatccccacggcgcacagcaccagtgcctcatagaggacactgtcccgaatctgcttgcgggtggcaccgatggatttcaggatgccgaactgccgggtccgctccgccacggagatggagaaggagttatagatcagcgacaccgagccgaaggagatcatcagcagcaggatcaccgcaaagctgtagatcatccggttcacggagaagaaggtggtggcgccgtagtaattcagcaggtcggagttggagtaccacgccagtcccggatatttctcggcgtttccctccatatagctgtaaaagcggctgggatgggccacccggaaaaattcatccgtctgatagccctgctcctgacaggtcagggcagtatagccggggcaggagaagggctccgtcgtcatatccagccgctggtaaaagcccaccacagtgtaggtgtggggcgtggtatctgtcagcgtctcccccttcgtataggggtcatcggccgtcagtttctccccgtccagcgtccggtggcccagctccagctccatggtatctcccagcatatggcggacgctgccattggaccacagatgctccggcagaagaagctccccggccttctccggcaggcggccttgggtcaggcggatggagagcaggtccggcaggtcggggtccatggacatgatcctcagatagggcttataagcattgtccgcccctacctgcccccagcccaccagctgccacgcagactgctccgtgatctccttttcatcacggctcagctgcgatgcctgctgctccgtgaggttctggtagcagccgtggaaccggcctacggtgtactcggcggcccccacgagatactgtacgccgctgtaagcaccctccgtcacggcggtgaacagggccaccgacaggatgatgcccacgatggtcacccacgtccgggagcggtttttccgcagggcctgccgggtgtagcggtgaaagacgttcattccagcacctcccggatgcgctcatcccgtgtgatgcggccatcctcgatggcaatgacccggtgggcctgcagggcgatgttctcgtcgtgggtgatgatgaccagcgtctggccgtacttcttgttggacatcttcagcagctccacgatctcctggctgttcttgctgtcgagattgccggtgggctcatccgccagcaccaccgccggggcgttcatcagcgcccgaccgatggacacccgctgctgctggccgccggaaagctgattgggcaggtacttctcccgaccccgcagacccagcacgtccagcagctcctccagccgctcctgattcacctgtcgcccgtccatcagcaccggcagggtcatgttctccaccacgttcagcacggggatcaggttataaaactggtaaatgagccccacctgccggcggcggaaaatggccagctgatcctcgttctgggcgtagacatcctgcccatccacaaagaccttgccggaggtggggcggtcaacaccgcccaaaatgtgcagcagagtggatttaccggagccggaggggccgatgatggccaagaactcccccttctccacggtgaaggaaatgtcgtccaccgcccgcacctgattttcaccctgtccgtataccttactgagatgctggatctgcatcagttccatagtcgtgtccctccttgactttctgttgtccagtataccacacgaaggtgacgtttcggtgacaggtttcattacaaaaacgtcacaaaaccgtcccggcggaagggaagtctctcagagcagccttacagagcagtctcccggcagtaaaagagcagccccggcggaaaattccgccggggctgctcttgttcttactgttgtccttgaaaggcttttgtcattgcagaattattttttgcggcgataggtggggaccaccgaggccacgatgtccttcatgtcctccgtctcctcctcacaggccttctccagccgatccaactggtggcaaaactcctcgtcgtccatgacgatgggctttccgatgtggatcagcttgttggaggtctcctgcaggccctcctccgccatgaggatctcctcatacagcttctcgccggggcgcaggcccgtgtagactatcttgatatccacatccggctcatggccggacaggcggataaggttgcgggccatggtgtcgatcttcaccggctggcccatatccagaatgaatatctcaccgcccttggcgtagtatcccgcctgcagcaccagcgacaccgcttcggggatggtcataaagaagcgggtgatctccgggtgcgtcaccgttaccgggccgccctcagcgatctgctttttgaacagggggatgacgctgccgttgctgcccagcacattgccgaagcgcaccgccacgaagtccgtattggggctgcggcggttcatcatctgcaccaccatctcgcacaggcgcttagaggcgcccatgatgttggtggggttcaccgccttatccgtggagatcagcacgaacttcttcacgccgtacttcaccgaggccatggccattttataggtgccgaagacgttgttcttgatggcctcgttggggctgtcctccatcagggggacatgcttgtgggcggcggcgtggaacaccagctccggccggtacttggccatgacatcgtccagacggcccatgtcccgcacggagccgatgagcacctccagattcagctccggatgggtgtggcgcagctccatctggatatcgtaggcgttgttctcataaatatcgaagatgatcagctgttcgggcttgcttttggcgatctggcggcacagctcgctgccgatggaaccgccgccgccggtgaccatcaccaccttgccggagatataccggcagatctcctccagattcacctgaatagggtcacggcccagcagatcctgcagctccacgtcccggagcttgctgacactgacctcgccgttgaccagctggaacatccccggcaccgcctgcacccggcagccggtcttgctgcagatgtccagaatctccttgcggtcctgtccgtcgcaggtggggatggcgaaaatgatcttattgacctggtacttcttcaccgcatcggggatctcctgccgcccgccggcgatctctacaccgtccagataccggcggcgcttgctggggttgtcgtcgatgatgcacaccacccggctgcccagccggggattggaattgatctcccggatcagctggcgtccggcctcaccggcaccgatcatcagaatgcggtcccgctcgcttttctccgtgctgatccccgccatcagctggcgcatgaatcggtaggagaaccgcagtgccgtggtggacatgaagctcatgataaagcccgcaaagtagaaggagcggggcatatcgatcttcaggatcagcacataggccagtccggctgccagcagcacgccataggccagaatgatgcggaacagctcgtcgatgctgacaaagctccagatgctgttatacagccggaacagctggaacaccaccagacagatgacgatccacggcccgatgatcttcaaatactcgttgaggtacatctgagggatggcccccagacggaactcaaaccgcatccacagcgccaggaaaaaggacccggcgatgcacagcatatccagcacgaagatcaccatcgtccgccgcagtccggcggtcatggctcttttgccgttttcttgtttcatccgttcttccttccggcggctccggctgacgccgggccgcctgtccttcctcagatcttctccacgttcagggagaagtctgccttatagccacggaagcggaggatgcgctcatagtcctccacatagtccacctcggcccagaacaggccgtccatctcctccacatataccgggcgcttgcccaccatttcatagaggatattctcccaccagacgctgtgctgctgggtgcggatcatgccgtccagtttctccatgaactccggcatgaaatccttgctgaagcggccgatgccgatgtactcgccggtgatatcactgccggtgagctccttgccgtacttcaccagcaggccgttctcgtacttatacttgtagtcggcctcctccttgcgggtgccgtcggcgaacatcaccggagacttatggcactccagaatgcggtccagcagcgtctcctccagatacacgtcggcgttcatgatgagggtgtcatcgtactgggacaggaagtccttagcgaaccacgccgaggcgatgctgttggtgacgtcgaagaaggggttatagaagtagcggatgccctcgtagtccttcagcgtctcctgaatgacctccgcccggtagcccagcaccatggcaatgtcggtgatgcccttcttgtggaacagctcgatggtgtactggatcagcttctgaccgccgatgtccacggtacacttggggttgccggccaaataccggctgatgcgggtgcctcgacccgccgcaagcaacagaactttcatgtttcttcctccttgtaatatatcgatcaagccttcagaatcccacgggccatgaggtcgtcaaaggcccggaacagtgcgtcgttatcctccacggtcaggtggccgatgtggcccacccggaacaccttatccgccagctcgccgccgttggggcagatgataatgccgtactcgtccttcagggtcaggaacagctggtgggcggacacctccggattgttgggagacagcggcgtcaccgcataggacagggaatcggacacgatgtggaagggatacttcccgatgcgggagcggaaatccttggcaatggcacggatctgggcctgtacgtttgcaaagccgtcccgtttgatctgattcaggcgggcattgatctggataaggatgcccaccgccggagtgaagggggtctggccccgctccccgtttttcagggcggccttcaggtccagatagtagcaggcgggacggttggcgtagatacgctccacagcccggctgctgagcaccatcatggagatgccgggaggcacggccagcgccttctgagagccggtgaacaccacgtcggcgccccaacgcttcatactgacgtcgtcggccagaaatgcactgatggcatccaccaccagtaccagaccgttttcacggcagaaagcggagatcatgtccatatcgtacaaaacgccggtggacgtctcgtgcatattcaccagaaagcccgtgtagccctgtccggcatagggggccagatcggcgggggtcagagcatggccctgccgcagctcgatggccgtatgggggatgccgtagacctcgcagatctcgcagaagcggtggccgaagctgccgccggccaccaccagcagccggtcgtccttggtgaacacgttctgggtgacggcatccatggaggccgtgccggagccggtgaggaataccgctctggcatcctccggggcatccatgaactccttgagcagtgcctcgttctccttcatcagggcggagaagtccggcgtgcggaagtagggcacggggtctgcaccgatccgggagatctcctccgagatctgaaccggacccaccgcaaagttgatatgatcctttttgatgtccataaaactatattctcctttcaccggtacctgtcacagagtacgctctgccgcaggcaccttatcttccgtttccagcatcagcgcacccagcgccagccagaaaataaaggacacatcattgatcttcaggaatacgctgttcatgaacagcgcctccaccagtccgaaggccaccaccgccagtgtcgtgatcgtccacagggacagctgcggatgccgcaggatatagcgaatcacccgcaccagcaccagcaccaggaagcacaggaacagccctgctcccacaaagcctgtgctgataaacacaaacagatagttgttatgggactcgtagaccagatccgttttcaccgtatccttgaactgatcggtaaagtagcgcacgatgtacatctccggatgctggtcgccgatatagtcgttgtagttggacagggacagtcccgcagggccgatctcaccggcaagggatatatagtccctccagatctcgaagcggttgttggagacatcgccctcctgtgaccgctcgatggcatccggctcctcgatgacggtacccacggccatatgctgcataccagcccagataccctccgtacagccccagcacaccaccacggcacacacaccggccaacacgctgacacccagccgtttcagctgcttcatactgccgcagcggttacgcaccagcagcaccgtgaagcagaaggcatacagaatcagggcgatcagggcgctgcgggacacgctgaggatcacgtgcgtgaccagcaccagcgccgccacggccagtgccgcacggcccgcccagtgttttccacgggtcacgaccccctgcatacagccggcaaacaggaacatgctggtatatgccgcatagtccagacccatgaacaggccgaacaggcggctctgataatagccctgccgtgtcagctccgggctggtggtattgggattggcgacatatgtatagccgatgcggaacagatattgatacaggcccacgcagcaggcaatgccccagatgaccagcaccacatagaacaggttccgcaggaaccggcgcatccgttccttgcccacccgctgggccagactgtacaccagcgcaaactggatcaccacccagcacaggtcaaaaaggttatccttcacgccgtagcgcatggtacgcagggaggcgatgacatccataaaggccacgccatacagcagccagcaccagatacctcgccagaggccccggttggtgaacagatccagtgccatcagcacagcgcctatcagtcccaaataggtggaaatgtggtacagcggggttttggccatccacgtcagcaccggggcgatctgcagcagcacaaagctcaccaccgtcacgcctacatacaccagcaccgccgtgttcagccacggaagccgtccgatacagctctcattcccgaataccgcacgccgcagttctctcttttgcatatggtataactcctactttgtatagattatgcggcctttttccccttgggcaaaaagcgcagcagaatgccccacagctgcttccactccgccgtgcgtccggtgacgcccagccagatgccggggtagataacgcccacgatgacgcacctcagcagcagtgacaggatggtattgtccggcgacagccaccggcacgcaccgtagcaggcggcgcaggcggcaaaggccagcagcacatagcccagcagctttcccatgtattcgttccagctgcggtagaactggtatttcaccaccacccacgcttcccacggggtatagatgaagaagaacaccagaatggtgggaaccagcacgccggcaatgctgccggtggccttcaccatccagatgctgcccaccagattcacggccatgcccacatagggcttgagccaatcctccgtccacaggcccgccgcatcccggtaggtcagctgcatgatgcggaacatccacgagaagaagtacagcacgatgagcatcatcagccgctcatccagcagatactccgggccaagccacacggcggcgatgaagggctggtaaaagcacagcatacacgccgctgcgccgcccaccagcgccacccagccataggtcatggttttgaagaaccggtagttgtcctcacgggagtccgtcagcagtttattgccgatgccggagaggctgccgttggtgacgatctccaccagaccattgacggcggtgaggatatagtaatagttgctatacagcgacagcgccgtcagtcccagaaaggaggagatgatgatgctgtcgatgctcaccagaaaggtgttgcccagcttatggccgaacagcgtccccacccgcttatagatgtcctttttggtcaccgggtccaactcaccctgacacacgatgtccgggtagtgcttccgggccgccagatacaccgccacgttgttggggatcaccatcagcggcagcaggatgatataggcatagtaattggagaagatcagcagcaccgccgcctgcagggtatactgcaccacatagcgcacggtggagatcttcagcgtcacgtcgttgcgctgaaaggcagtaaacgtggcgttgttataggcgaacatcaggtaatccagcacgctctccgacagatagatggcgaagaggacgtacaggttcacatccggcggacagtcgtttttcaccagccatggcaaaaacggcatcaccgccagacccatgcccagaatcaccaggcccacaatgcggtagaccttccggtagaatttcagcatggcgcacagggccggcttgtcatcctcggcaatggccttgtacatggtgaacaccaaggagctgttaaagcccagattggccagattcagcaccgtcagcacagaggtgaacagggtggacaggccgttatactcctgtcccagctccttgatgatgatggtcttgatggcaaacggcccgatgagggtggccacccggtagatggcgccccaaagggtattccgcatggtatttttggctcgtgagagctttttcatagcatccgtccgttctctcagtttcgggagcggctcatgaccgctcaaaggcggaagtctgcgggaaggtccgctggaagatatccaccagctgctgccgctccgtatcgaaatcgaagtccatggggtcgtcgttgacgcagaccacccggtacttcccgccccgcagcagccgctccacctccgactcgctctgcttgccgatggtgagataggtgctgtctggctttttgggggcaaaccggccgctggccagctgccagtaccggaacaggtactggttcacgtccgcccggtcccggaacttgtggcggcaagtggcgtccagcacctccgggaacctgtcccacacctcctccagcgtgctcttgcagaaggaaacgcaggagtggtaattgcggaagcctgtgaagtccccccacgggaggaggtacaggttatacagcaggcccttcccgtagccgggatagaaccacttgccaaaattctgccggatgacgctgcgcttatcgaagctcatgttcaccagcgccatcatattcagcatgatatagggcatgaagttggcggtgtcgttgtttttgatgacgcccatcaccgccgtgtcacagggcaggtcgtcccggaagaaatcctccggctgggagggcttcatcaggtacacgtcgtcgttgaagtagaggaagtgctccgccagatccgggatgcggtgcatattcagctcgatggtatgggagctgaaggtgggcagatactcctccgggatgaagtcccggtggttgacgatatgcagcttgggatggtcaggctccagccatgcaggcaggtgtccgtaggtcagcaggtgtacctttcgcacccacggggcgttctgctcgatgccccggaaccaatagcggaacagcccccactcccggtagcgggcggggtgattgtcggcgcttttagaggcccggtatttggcgtgatccgcctgccagaccgggtcagacccgtccacccatgggatcacgatgtcaatgggatgcgtgctcattggtcctgtgctccgtcctttttctgttcctcggcggcgcagtccagacagaagcccacggaatagtgcttctcccggtcggcctccggcgggatgacccagtaatcaccgtactgatttttcagataggtgtccggatcatggggcaggttgatggaaaagtcctcaaaaggtcccttgatggggggataatatacctctttgggcataatatgtccgaaatagtggccgatatccgtggggacggcccacaatcccgtgtccttcttgcaccgcacgaagcggtcaaacaggtcgccccacttcttataggggcggaaggagaacaggaagcccactgtgcaccgcaggccatagttgaactttccggcggaggactggctgaagaacttcttcttctccgggctgcggtagtggtagaacagggtggataccgcaatgtattgcaggcccatggccgttacgcccttgatgccccggacaatggggtttctggggacggactcaatggcgaagatatcgatgtggacgcccttgggaaacggcgtgttatagtccagaaacgccgctttcagggtgtttttcttatatacggcggagatcatgctctccagctgatacttgtcggaattgggggtggtgagctcgtacttgtcccccatgcactcctcgaacagctccacaaagcggttcagatcctcacggggcatgaggatatccacgtcgtcgtcccaggggataaagcccttgtggcgcacggaacccagggccgtaccgccggcggccatatagcacaggccgtgctcctgacacacccgatcgatgtccttgatgatctccagaaagcacgcctgcagcgccttcagctcctccggcgtcagctcgtgcatcatctccgtctccggtgcgatctgcatacacttccgggtggagaacatatttctcagcttcgacatgactctcacgctttcttttcatccacacagtagtggatgcccttatactgcttgtagctgtgctccagatcgatgaataccgcatcgtggcggtagacccgctcctccggaggcggcagctgcatatagtcgccgtaggagatggtcagccacttgtcatagtcctccggcaccggcatctgatggccctcgaactccagatacgccggatggcggaaccaccggatgggaaaccgctggcgcatgatggtggcgccctcaccgaaggaggagacgtactccgcatccgccagtgagtagcggctcagccgcttttcggcacccttccacatcttgtaccgggccttgaaggacggcaccagcgtcagcgccagcttctcggcgtagtaggtgatcttgcccttgtgggcgggcaggcgctggaagttgaagcagcagtacatcatggagtccaccatctgccacagctgcttccacttggacttgggtacggcgtccagcgggatcacgtcgatcatcagcccctgatggatgtccagatctacgctgtggcggttgatgaaggtggtgttgttgtccttgatctccgtggcggagtggcggatgttgaattgatcgttggagcggacgcaggagtagtgctctgtgtccgccttttcgtcccagatacggcagagcttttcatagtcgtcccgcagcatgaacacgtccacgtcgtcgtcccaggggatgaatcccttgtggcgcacggcgcccaagcaggtaccgccggccagcacgaagcccagtccgttctcctgacagaacttctgaaaatacagcaggatctccaggagcttgctctggatctcctgtatggtgacctctttcttttcttccatagttgacctctcaccgccacccggcccgcaggggcaggcggcgtcctctttgttttttcttcctcggttatcaccgcaacggagtattatactccctgcggtccggaattgcaacctctgtgtccgccctcttacagcacggccttgaccgtccgcagcatggtcagcagctcctgccccaagccaaagcgccggatgctcgccagattatatgccattttccccggcagcacctgctgcacatacgtctcgtccacgtcctccgccttgtccagcagctccgcctcgtccttgtagcggatgctggcctcggaggtcactcctgccggcagcaggagggtggccatcatctccggggtgtagcgggccacgtacttgggcacctccggccgtgtccccacaaaggacatggagccgcccagcacgttcagcagctggccgatctcgtccagacggcagctgcggatgaccttgcccacccgtgtgatgcggctgtcgccgctgaccgtcacctgactgccgatgcggtcagcgttctgcaccatggtgcggaacttgaaaatgcggaattcacgcccgtactgggtcacccgcacctgccggtaaaacaccgggccgtgggagtccagcttgatggcaatggccagcaccagaaacaccgggctcagcagcaccagcagcaccagtgacgccagaatatcgaacagccgcttgcaaagcaggctcccctgcttccttcgcagcaggtcatagtacgggcggacttcctccgtccgcatctcctgcggcagatcctcccacttccgcagcatcaccggagatactccttcacgatgtccgcaaactgctccgtcacataggccgcatcctcatcggagaggcgggtgtgcagaggcagtgtgatgaggttttcatagtggtggtaggcattgggatagtcagcgatatcgaagcccatggccttgtaggccgtcatcatgggcaggggcttatagtggacgttgcaggccacgccccgctccgccatccgcaggatgatctcattgcgctccttctccccgatgccgggggtccacgtcaggtacaggtggccggagctggtatagtccggggtaaagtggggcagggtccggatgcccagcgggtgcagggcttcatcatagcgctggatcagctgatgccgccgctccagcaggccgggatagcgctccagctgcttcaggcctatggcagccatgatgtccgtcatgttgcacttataccacggccccacgatgtcgtactcccacgcccccagcttggtcttggccagagcgtccttggactggccgtggaggctcagcagctgatagcggtggtacagctcctcgtcgtcaagacccggcagcgtgcgccacgccgatgcaccgccctcggcggtggtgaagttcttcacggcgtggaaggagaaggaggtgaagtctgccagagcgccggtaggcaccccgtgacgggaggcgcccagcccatgggcgcagtcggccaccacggccacccggcccagtgcctcctgcacatcgcccttgggacagaacagtgcctttttcccctccaccgcctgatagatgcggtcatagtcgcaggggatgcctcccagatccaccgggatcaccgccttggtcttttcggtgatggcccgctccatctggtcatagtccatctccagcgagtccttctggctgtcgatgaacttcaccgtggcccccacatggatggccgccgccgccgtggcggtataggtgtacgccggcaccagcacctcgtcgccttcaccgatgcccagcacccgcaggttcatctcctccgccgccgtagcggagttcaggcacaccagcttcgccacatggcagtactctgccagctccttttccagctgcttggtgcgggggccggtggtgatccagccggaccgcagggcctcgcacacctcttggatctccagctccgtgatatccggagggctgaagggtatatttcgcatatcgatacgcactccttagtcggtttgatccgtttcgttgtttttcagtctgcgcccggtcgggcggacttacatattgtgaaattatactacaaccctcggcaaaatgcaaccggcggcggcaggtcatttcacacttcccggcggtttttatgaatagaaggtaaattttcctttaatcctgcacttttcccccggcttggtggggcttatgagggcatctatatcgtgcccttataccaccgcaggataaaccgtgcgccgccggtgaggacattttccgcctgcaccgtgccgttctgctgggccagcacctgacgggagaggctcaggccgatgccgaagttgttctccccggcgtttttgccccggtaaaaccgctgaaaaagccggggcagctcctccgggtcgaagcccggcccatcatcctgcaccgtgatctctgtgaaaatggctgtctcccgtgccgttacctgcacccatgaggcggcgtgctccatgcagtttttcagaatatttcccagtgcctccgtgctccacggcacgtcgcaggtaagccgctcctcccccgcctgagcggtgaagcggatgctccgcacctccatggggacctccaacggctccgccgcacggcgcaccagctccgccgccgtggtgtcctgcgggtggaacaccaccgtcccggcgtccagctgggccattttcagcagggcctccaccagccactccatacggcccgtcagcttcttcagctcccgcatcagtgccagacgccgctggggtgtcagctcctcctgctccagcagggacagggtcaggcgcatggccgtcaggggcgtccgcagttggtgggagatatccgccatggcatccgccagccggacacgttcctcctgctgacgctgggcgttctcccgcagccgcaccgtcatcttcccgatctcgctgcggaggatggccagttctccctcctcctgctggggcagcatctgctgctcctgcccgtggagaatgcggtcaatgtcccgactcatgccctccagttcccggtagcgccgccgggtggagccgtaccagatggtcccgcagaccgcccccagccccagcgtcagcaggccgcagatgggatacagcagggccgccgccacggagcacaccgccgtggccagcagcagccacagggccgtccgccgcacctccgtgttcttccagatgctcatgcgtccaccatgtagccgatgccacgcaccgtccggatgatctgtgggtctgcggggtcggtctcgatcttctcccgcaggcgcttgatatacaccgtcagggtgttgtcattgacgaaatccccggcggcatcccagatctcctccagcagctgcgaccgggagaggaccttcccccggtggctcagaaacaccagcagcagccggtattccagcgccgagagatacacatcccggccgtcccgtgtgacccggcccttctccgtatccaccatcacaccgcccagcggcaccagcgtcttctccttgccgtaccgccgcagcacgctgcggatgcgggagaccagctctctgggccggaagggcttggcgatgtagtcgtcggcccccatgtccagccccagcaccacgctgctctcgtcgccggaggcggtgaggaaaatcaccggcagaccccggctccgggcgtaggcgcacacgccgaagccgctgccctccgccaactgcacatccaccagcagcagccccggagccgtctgctccaccagctgcctggcctgagtttccccggtagccgtctccacggaaaagccctcactctgcaaaaacgccgacagtgacgccgtgatctgggcatcgtcctccaccagcaggatccgctccatacgctcctccttccccggcgttatcccacgggatagcgccagccgtcctcgatctcgccctttctggcccggcccatgagctcacgggccacctcctgcaccggccgctgccggtacaatatctcatagacgcaccggcagatgggcatctccacgccggtcttttccgccagctggtgcatactggcggcggcatagtagccctccaccacgccgccggtctccgccagcgtctgcccgacggacttgccctgtcccagcaggatgcccgcccggcggttccgggagtgcatggaggtgcaggtgacgatcaggtctcccatacccgccagccctccgaaggtctggcggtcgccccccagccgctcccccagatggcacagctccaccatggcccgtgtcatcagcagggctttggtgttgtcctgatagcccataccgtcgcagatgccgcaggccagcgccaccacgttcttcagggcgccggacagctccactcccacgatatcggggctggtatacacccggaagcggtcgttcataaaggcgtcctgcaccgtgagggcagccgcctgagacacactggccgccacacagccggtggggagcccacggcccacctcctcggcgtgggaggggccggacagggcggcgatgggaaaggctccccccgtctcctgctccaatatctggctcatccgcaggtgagtatcccgctcgatccccttggccgccgtcaccagcagcgtatcggggcgcagcagcggagcggcggcatgggccgtctcccgcacggcgtaagacggtaccgccaccaccaccagctccgcttccgtcaggcaggccatatccgccgtcaggcgcagctccggcggcagaggaacgccctccagccgggggttctctctggcccgctccatatacgccgccttctccggcacgtgggaccacagggtcaccggatgtccgttccggtgcagcaccaacgacagtgccgttccccagccgccgctgcccaataccaccgttttcatgtcacgcctcccgctctcctctccgccggggatgaccttcccggcggcaggaatctatattccgtgatattttaccacaaacggcggacagtgccaagtggtttccttcgcttttcccggtgacaatgccgtcaccttgacggcggctgaacgcaaaaaagcgccgcacacccaaatggctgaataccgttgccacgctcttcagcagcgatgagagataggaggactccagaaactcctccatctggccgaagtagttgtcatagatgcggttcaccgcatggttcagggaaatgctgatgatggcgatggcccgtgcgatatccagatagtagctgcgcccgccggtcaatgttttttcctgcataggcgtgtcctcggaatggaagtttatgaggaatttatgaacggaagcttaagaagtttaagacgttagcattacataggacacgctgtcggattgcaagaaaaaatatgtccaattttgtattttacatggacttcatggagattctgcggggcgccacagaaaggccggcgcatccgtaacggatgcgccggcctttctgtgtgtatccataggtcgctggatcactccaccagcccgtatttgactttgatgcggtccagcttctccagcataggctccgccagcagcagcaggaagatcaccgtggcgcaggcgtgaacacagtccatggggaagccggtgatatagtacgtcagcagcgtctgccagttcatctctgccccatagatcagcgccgacacggggttcatgatggccccgtagatgacgaaggtgacgatgccgccgaacaccgccagagcgccccggctgcggcgcagccagcccttgcggaacagcactccggccaaaaagccgatgatgcccatgctgaacatctggaagggtgtccacggcccctgggaaaagaggacgttgctggccagcatggtcatggcccccaccagaaagcccgtctcaccgccgaaggccaccccggcgatgatggtcagggccataacgggcttgaactggggcagcatgaagaaggccgcccggcccgccacgcccaaggcgcacagcacggcgatgatggtcagctcacgggcctgtgggcgtcggccctcaaagaccatgaaaaacggcagcatacactccagcatcaccagcagggcggtgatatagtagtgggtgcggccaaagaggcctacgcacaccaccagtgtcacggggatcatcagcaggatcagcacggaggccaccaccgtgcggcgggagagcttccgtttttccaccggagtctgtacctgcaccggcggcggcgcccgacggccgatggaggccaccagcacgaacatggccaccagaaatacgccgtaggtggccagcgtctgccacccggcagcagagaccttgccgccgcccaccagcgccgtcagatccgtcttgcgggtagccatccataggatcaccagcgccacggcgccggatacggcagccagcgccttgcgccaccacggaagcttcggaggcttccagtcggcggactcctccgccgccggcggcagcggcgcataggtgtgctgtacctccggctccggcgggacggtgccgccaatacccgccatgacgtcctccgccgtgacggcatggggcagcagcccacgggccatgcggtcagcggaggtggtgtagaagctgttgccgccgaagaaggcacggggcgtcccctcggcggagatactgccgtcgaaaaatagggcgcagcggtgggcatagcgggcgcagaactccacgtcgtggctcaccatcagcaccgtcacgccgccggagagcagagagcgcaccatggcggcgaaggactgcttgaactcggcgtccaggcccttggtgggctcgtccatcagcaggatatccggctccagcagcatgaccttggccagcgccgcacgctgctgttcaccgccggagaggtcatagggatggcggtccagcagttccgtcagacggcagagggtcaccatctgctccacccgccgctgctgctccgccaggggcaaacgcagtccgtcgaaggtctcgaacagatcctcccggacggtctttttcacgaacagcgcctgcgggttctggggcaggacgcccagccgacccgtatggcgcaccgtgccacggtagggtcgcagtccctcgctgagaagccgcagggtggtggatttgccggtgccgttgccgcccagcagggccacaaattccccctgccgaacactcatatggaggccccggacgatatccgggcccttttcctcgtatttgaaccacacgtcctccgccgccagcaccacctcgccgcagggagggatctcctccggcggcaggggttgggcggggtgatctgtgagccactccgtcaagaaagccttgccctcccgcaccgtcaccgggcagggggcatcgctctgtaccgaggcccagatccgcatggcggagggcatggccaaaaacatccggtgcccctcctgccgcagcaggccgcccacctccgccggtgcgccggtacacagcagccgtccgccgtccatcaccgccgcatgggttgccagcggcagggcctcctccagccgatgctccgtcagaaggacggtggtccccagctcccgattgatgcgccccagcgtctgaagaaagtccgaggcggcaatggggtctaactgactggtaggctcgtccaaaatcagcacacgaggctgcatcaccatcaccgaggccagactcagcagctgcttctgaccgccggacagctccgtgacgtttttatagaaccagtcctgtatcccgaagaaggaggccatctccgccacacggcggcggatggtgggggtgtcgaagcccagactctccagtccgaaggccagctcgtgccagaccttgtccgtcaccacctgattctccggtgactgctgcacgaagccgatctccgccgcctgacggcggctggggatctgggacagcggcgtgccgcagaaggtgatctccccctcccgcaggccatggggcgccagcaccgttttcagctgccgcagcagcgtggactttccgcagccggaggggccgcagagtaccatgaacgccccctccggcagcgtgagggtaacatgggacagcgccgggcggcgctgctgggggtaggtaaagctgtaattctccagatgcagaagctccgtcaccggcgcacctccttctcgatttgtctccactggcgggccgccgccagatccagtgccgccggggtcaggcacagcagaaaatagaccacgaaaaaactcacggtcatgggcgtcacaggcgctcccgccaacgagggatagtagcggaaccgcaggcctccggccagcacaccgcagaatacataggccccgcagaaaataagccataccagcagcccccgatcccggtcgtccatgcgatagatggaaaaggccgtgcggcccttttcgccgtagccccggctcttcatactgtccgccgtctcgatggcgctctccagcgaccatgtgaccatgatggaaaagaccttcatggcgtttttcgtgcggcggagaaggctgccgttctccgtgtcacggcccatgtatttctgggcctgcgccacggtgtgcagctgggtgcggaaccgggggacaaagcgcatggtcatggacagcaccagtgacagggcggggatcaccctgccaaagagatagatgaacttatccgaggtcatgacggtgttgtagcagctgaaccacagcagcgtggccgacagcagcgccgccgaggcaaggccgtagagcatactctccagcgtcaggggattgccggaggggagataggccagtatggtaacgccctgatgggtgaaggccgggttgatgaccgccgccagcaccgccataggcaccatccacacggcgcttttccgcagggagcggggccccagcagcacagcatggtagatcacggccccgcacaccgacagcagcaggcataccgggtgagtcaggcacatggaaaaggcgatgaccagcacgaaatacaggaagttcaccgccggatggcagctgccgaacacgtcgctgtatcgcatggtcatcgcctcccttcgccggttcttctcactcgcccacggcggccccgccgcctacatcctgtcccagatcgcaggtatagacccagcagatcacatcacccggctgcaccgtgtagcaggagcagccgtagttgggataccagtcgttgacgctgtacatccagccggagccgctgcccacgtcgaattcatacaggttgtggatgccctgaatgtaggcactctcatacaggggcgtccatttggactccatctggatgcgattttcccggcacacccgctgcagcacgtcaaagacgttttccccggtctggaagcccacctccaccggggccagaatgacgccgtcctgaggcacctgctcccgcttgtcggggtcgcaggcgtccatattgtccagaatggtggcgcaagagatggagatggtgcaggtggcgtcatagtccacctgcttggcgccgcagccggccagagccagcagcatcagcatcgctgaaagcgccgcaaagatacgttttttcacggaagatcgctcctttccgacccggtgcagtcaggaaaaaggccggttccctccggaaaccggcaccggccgccccgccgcccgctccgtctccggtgaagcggcgttctgcgctatctcattgtgtcccattatacggaatctcctccgggaagtcaactggaaaagccctcctccacaggggaaggagggctttatgtccaaagaacccgctgtggggaattcacaggaagaacttccggtgaagggagcggcgcagaggcggacagacggcaatgatgatcagcatcacccccagcagcaccccggcggccagcggatagaaggaccagaagaaggtctggtgaacgccgaaggtcaggttcagcaaaaactccagcagcatggcaagcccgccggcggcaatgagggcgccgccgaagatgtagagatacccccggcggacgtagcgcagcaacgccaccacggtggtgatgagcaccccgatggatcctgccacggggaaggcgaaggtcaggaaccagtgtccgccggtggcgaggtcgatatacagcaggtacagaataatggcggcaaaatccagcggcacgaagatcaccgggttgggccgcttgaaccacaggggcagcaccgtcagcacatacagcagcaggatgccgccggaggcatagccggaccagaggatacccccgttgatgcgccagtcgcacagcacgcagatcaccgccggcagcagggccagcgccgtcaggataaagcacacgccggagcggttcacctcctccgggtggacccgctcatccgggggatagggcgggtcggcaggggtgcggggaatatccgggtggaacacacgggtgccgcacaggggacacacccgctggctgtccgccagctccacgccgcatttgacacaatacatggctttgcgctcctttcttctctcagcgctggttgctctccgccttcaccggcaggcccagttcatgcagcacctgataaaagtgcagctccagctccggctcccggatgttgcggatgcagttgatataggcggtgccgttccacgacaccacggcgcagccgtggggggccgccgcctgcacgccgatgatgaaatccatccggcgcacatagggggccatggcctccggcaaacggacactgcccagattggacaggcacaggcaggacttccgttcccccactgcgtcgaacaccagcttcatggccagattcttcacgaacagcggcatcacccgcagcacgggggagcgctcgctggccacattggcggcgaacttggcctgcatggtgtgggggttgttctccagtcccatccggtgatgaacggcggcacagatctcccgaaaggtgaagtctcccatgcggggatcgatctccggggtgatgtaggaggcaaagttccgcaaggtacgggtggggaacagattccgcaggttcacggggatcagcaccttcaccggcttgcggtggctgcgtcggggctctttctccgcctgcaggcggtcgatggcctgcatcatggcggcggccagcagctccgtcaccgtgacgccgcactccttggcacaggagcgcagcgcctccgtcggcaccatcagcgtcaccagattcttgaagccgtccggctccggcgtgccgctgaggtgataggcggtggcctccttgcggctggccttcacatctccggcatagcggagaaagctgtcctccagttcctcctcgtccggctcctccagacggcccagtacgccgtcctccgccgggatggtgatgccgtacttctgacacaggtactccgccagcagggtcttgagaaagatggttccgccggtgccgtcggtgatggcgtggaagaactccacggcaatgcggtcatggtacaccagcacccgcagggcgcagcgccgcacctgatcgaaggggacgtgggccagcgggcagcttttctccgactggatggccggggcctgggggatctgctccagatagtaccagaacaccccccgccgcagccgcaccgccatggacggaaagcgccgcaccgtcacatccagcgccgagcgcagcactgccacatccaccggctccgtcagggtggcggacaggcggaaaaagttgttccagttgcggcgcttggcggcagggtagatcttggcggcgttatccagccgcatccaccgcaggctccgggccggggagagtaccttatccagaaaatggttgatggactggaagtcctcctccatgttctcggtgaggcagtacagcacataggcgtgccaccgttccggggcaatgtgcatcttgctgcggcagccggacttcagcagcttctcatggagcatccgggtgtcgtccagcatcacctcgtccccgcccacgaacagcagggacggcggcaggccgtggagatcaccgaacagcggggagcacaggggctcctccggtgtctgggtatagcacccggcgtagaaggtcagcagctcacgggtcatggaggggtccacatcccggttggtctcgaaggaggctccggaggaggtaaggtccgtccacggggagatgcccaccagcccgcagggcaggggccgtcccaactccttgagcttcaggcacagggcatagatgagcccgccgccggcggactcaccgcacagcaggatctgccgggcgggatagccctttttcagcagatattcatagctctccagtgcatcctccagcgcagcgggatagggatgctccggggccagccggtaggcggcgcaaaacacccgcacgccgcactccgtggccagcgtggaggcaaagcccttggcgtattccagactgccgcaggtatagccgcccccgtggaggtacaggatcacgccggtgcggcgctcgtccttgggcatgatccacgccccctgaaaattccggaagtcatgctcacgggaaaaggtctcccgccggtgcatggccgtcatcagttcccccagcttgtcctgccccttccgggtcagctccagagagcagttttccgccagaggcttgaagaaattcagctgtgagcgcaccagctttgcgtgcagttccatgtgggtccgttcctttcctgatctcgtatcttatgattatagcatttacagggtgccgtgtaaatacgacgccccggcgggaaaatgtgaattttctgtgttatttccgttccccatggcggaattttcccacaggcggcggggcggtcttgcaatcccgccgcagatttgctatgctgaaaaaaacacgggaggtgcggcggatgatgcaggcttggacaccggagggcatggcctttttgcaagatgccatggcctgctgcggctactatccggccctggcccggcgcatcgccccctatctgccgaagcaggcccatgtgtgcgacgccgggtgcgggctgggcgggctgtccgtggcgctgctgccctactgccgccacgtcaccgccgtggatcgtgcggcggcgccgctggagaacctccggcagcgggcaggccatgacccccgtctcacggtgcggcagggggatatccgttgcctgccgccggaaacgccctacgacgccatggtgttctgcctgttcggcgacgtggaggaggcgctgacggtggcccggcagcagtgccggggaacggtgctgctcatccgccgtgactacgcctatcaccggttcagcaccggccgggtgccggtgggcttcacggcggcggactcggaggataccctgcgccatctgggcctttcctatcggatggagcggttttcgctggagttcggtcagcccctccgatcgctggaggatgcccggcgattcttccggctctatgaccgcagcggcggagcagaccctcccctgcaccgattgacggcgggaccgggaccggaattcccctactacctgcccaaccggaaggagctgtgtctgctggcggtggagattccggccatggaggaggcgtagcatggaaaagcacattctcatctgcggggagcgtggtgtggggaaaagcaccctcatccgccggctgctggcggagagcaccctccccgtaggcggcttcgtcacccgccgcctgacgcaggcggacggggacgggatgttccccatctacctgcacgccgccgccctgccgccggaggagcggccctatgacccggagcatctggtgggtacctgcgacagccgccgcagtatccggtatccggaggcctttgaccggctggggccgccgctgctgacgtcaggcggcctgctggtaatggacgaactgggctttctggaaaatgacgcccacctctttcaggcggcggtgctggcggcactggacggccctgtgccggtgctggccgccatcaagcccaaggaaacggactttctccgccgggtgcgccagcacccctgcggggaggtattctacatcacaccggaaagccgtgaggcgctctatcagcgtctgcggagtcggatcctgcaatggaacaaggagaagctatgaatcagatctttgcacagctgttttatgagatggaaaagcaccgggacacggtgctggtgacgctgatcgacacagcgggcagcgccccccggaagagcggttcccagatgctggtgggtgccagcggccggctcaccggtaccatcggcggcggcgccgtggagcgccgcagcgaggagatggccatggccctgctgagggagaagcgctctgccgtccacgattttctgctgcacaccgccgcctccggcggcgatatcggcatggtgtgcggcggcgacgtgacggcccatttccagttcatcccggcggaggatgcgtcgtggcaggcgctggcctcggccctgacagagcggctcaccgcccatcagcggggctggctggtgctgcgggaggacggcggctgcggcgctctgctggggccggagggtctgctgtggggcgatctgccgaagggcgtaggccccgcttctctccaaaccgactgcgtccggcaggatggcttgttcagtatgcccctgcccatcggggagcgggcgctgctgttcggggcgggccacatctcgcaggccctgtgtcccctgctggtaacggtgggcttccgcccggtggtgttcgactgccgcccggagctggccacccgcaagctcttccccacggcagaggaggtcatctgtggggacttcacctccatcaaggaccacctcacggtgacggaggaggacttcgtggtcatcatgaccaacggtcatatgcacgacttccaggtggaggaacagatcctccgtgggccgtttgcctatgtgggggtcatcggctcccgcaccaagaccgcctccgtgaaccggaggctgcgggaggcgggcatcccggaggaatccatcgcacaggtccacactcccattggcaccgctatccaggcggtgacaccggcggagatcgccgtcagcatcgccggggagatgatcctgtgccgggcagagcgccggggcgataagccccatggctgccccatgcactgaatcagaaagggagggacgcttccgctactcctgataggggtaccttgaagcgtgtcctcggattaggcaggcagtgcaattgtactgtctgccttttctgttgtctctccgcatagaagcatatcgtctgtctcgttgaggttgaagtcccgaaaacagatgtggatcttctgcggtgcgtgcttggagtatttgacctctttctcatacacgatgattttcgccacaaaggtgcggagcagttccggggtcagttccgtcatgtcggtgaactttctggccttggcgatgaagttcttggcgttggccatgctactgcgtagtttctccaggcgctcctccgtggcagggatggcttcggccagctgcgctttctccttggagtatgcctcagacagcaaacggaactgctcattgctcacccgtcccaaggcgctgtcctcatacatccgcttgaacactacatccagttcgccatcccgtttccgcatcgtggacaattcccgttccaacccccggatctcctttgccacctcagtagattgcttttgctgaatatatgcggcgaaccgctccgggtcgctcctggcaaactctgtagctctgcggattgtttccagcacgatttccttcagtgccacttcccggatatagtgagcgctacacacttctgccccgtccttcctgtaggtgcggcaggtgaaatgattctgttccggcttcatggtgtgcgcccggtgcaataccatgggcttaccgcagtccgcacaatacaccaatccagagaacatattctgctcatccatattcgtgcggcggcgcttatgagatcgcacctcctgtacgatatcccaggtttcctgatccaccagctcttcatgagtattctcaaagataagccactctgatttggggcgttcacatcgttttttgtccttgtaggacttggtgctgtagcgaaggttgaccgtgtgcccaaggtagaccatgttctgaagcatatccgccaccatgtcgccagtccagttgtagggccgctctgcattcagcccggaatgggatgtgccgaatttcgtataggcgtacatggatggactgtagatgcattctttcttgagctgctttgcaatctgggctggtcccattccgccggcgcacatggcgaagatgcgtttgacgacagccgccgcctcctcatccaccaacagaggagagtccttggttgcacccttgcggtagccgtaaggagctcgtgtccccacccggattccccgctgtgccttggcgttcactacattccgcaccttgcggctgcagtcccgcacgtgccactcattgaacaaattcttgaaaggcatcagctcgttgctgttttcatacttggtgtcaacattgtcgttgacagcgatgtagcgcacatcattggaagggaatatctcctcgatataaagaccggtgtgcagttggtttcttccaaggcgggaaagatcctttgtgatgatgacggcgatgtcgccgttgctcatgtcatccatcatctgttcaaaggctgggcgattgaaattcgcgccggaatagccatcgtccacataaaatctggtgttctggaacccattctcatcggcgtacttttgcaggataagtttttggttctggatactgttggagtcgccctccagattatcatctcgggacagacggcaatagagcgccgtgatcttttggtttggctgtaacatattgacctccttcataaaatgccaaaccgattgagagattgcaaccatacaataccctcaatcggtttgtttgtctatgcgaacctgtttttcaggcggaaatattttttgcgtcctgctccaggtcgatgacctgtttcataagatcgaccgtagattgcgttcctccgaaactgaattccgcgaacacaatgtactctctgccgcatacatgctgtcggcggctttttataatcttgccgtccctttcttccactgcggtatcccgcactgccttggcagagggaatatcctcatctccatgcttttcttcactgtaggagcggggacgctcattgtatttgaatttatacgccatatcgttcctttcccctgacgctacagtcaggcaacaaaaatagcagaccgttacatggtctgctgctgtgtttgttctgcctgctgatcttcggtccactgctgttctgtagatgattgctcatcctgtgtgagcaccatggctacgccggccaccagtccgatgacagcgccgatatttttggcttcctgttctgcctggatacggcggtaacgttcctcgacatcttcgttaccatcatccagtaacgctccagttaccgccagaccatacagtccagcgtggagcggcttcatagaaacaggttgcggatgttgctgaccactgtcgctgtgccataccccatccccagcagtgccgccacgatgagcagtaccagtacgatccatttggccactacaatcaggtcgaagtccggaagccagtccagccatttgcaggaatgcttttctttcttcttcccagcctgttccagcagagtggtcatctccgtcaacgatttctggatctccgccatgctgttctgcaccgctgtcaggtctgtgtgtgatctcaggttcggaagatactcccgcattccacgcacttcccacccgatggattctgtcttctgtgtcagcatcgtcagagcctccggcagcggacactggatgacaatgggcgtgatcggtgaactcgactcccgcgctgtcggctgcggtgaaggctcgggccggttcagggccatgagctcgtccatagataatttcttctctgatcctgaattcatattccatgttctcctttagatatttgtcaccgaacagcaaacggtcccgacactgccagccactcggcgtggtatgggtgatattctttcgggacttttcccagcgaaccttgtagccctcgctctccatcagcgcaatgaactcctcgcggttggaagcgtggcgcatacagtcattgatgatattcatgagctgcagcttcttgctctgaccacgggccgccgtgtgatactctccgatggtcatagtctttgttttctgcttttgttccctgggttgaaatacaggaagtgaaaactccttgcagaccatgtcgttgcgttgccgcagttcctggagctgctcctttgcgatatgcagtttccgtccggtatcgaaattgaccgagttgatgaggaagtgggaatggatgtgctcacggtctgtgtgggtgcagaccagaacttcgtatccctcatagtactcggccagcttcagcgcggccgcgtgagcggtgaccgggtcgactgcttcgcctttcgggaagctctgtaccatgtgatagaacagtacaccgtccgtcttgtggtagagccgcttggtggtcatgaaatccgcgtagacagattccggctgacagttgatacctgtgaccaactgctgcccctcgaactcggtctttttatcctgcatggtataccgcatcacggcgctcatgcatccggtggtctggccccgcttgtagtttgtgaagctgatgatagccatagcttaccagcgctttcgttcaaggatcatccgaacggcaccacagagttcagagaacgcccgacatacgctttccagatcgatcacggtcactcgtcccatgtgcgccagggtgacgagctggttcagatttctgccgatggacttcagctccttcagcacttctttcaggccgtcgatgaccaccacctgctttcccaggcagcaggcagtgacgtagtcgctcatggacatcccggactgcttcgccaactccttgatggcctcccggtctgtggacgccatgcgggtgctgaatttaacatcttttttcatgtcgtttcctccaaatcgtagataaagtgggtccgggcttctgcccggaattcatgcggaagtcgggcagcggcgttgccgcagaccagacaaacgcgatgctggccacctccaaggaggtgatttccctgcaccgaacacccgcgctccgctttcggccacaaatggccacaaacggcgtttctttttccctgcgggtgtttactcgccatgcccggcaatctcccgcaaatcgccgcacagcgccccaacagggtcaacaggggcgaccacaggtacaccctgggcatcgtcactttcggcacggcgcagctcgatgagccgcttcccgttgctgcggcgcaccataccggaaattccgattttgcttatcgcgtcaaggttttgcaggatcaggcgggacactttcttaggcgagatacgctccataccgacagggtcgattttttcagacagctctgtgggagtgccgataaatttcgtacggtcgcgcatcagttcagagaccagataggtgatccggtcgcccagtagctccggctgcgttctgctgtctgctatcatctcccacacgttttcaacgttgcgttccagagacaactcccggtattcaatgtcacgaccgatgcagaagagcttcgccttaccgctgccgcgccgatcttccaccagagtaaaactggaatccaccgccccgctgatggctgtcgtaccggagatgcggttgaacacatcatcggcagtttcctttcgcagatgatggatcagcaggatggcgatgccgtgcttgtccgccagccgcttcagcacggacaggtcccggtagtcattggcgtaggtggcatcgtggacggggcggaccatctgcagcgtatcgacgaggaccagaacagtatccgggtgagctacgaggaagccctccacctgctcctccagcccctggccgatgggagcgcactccgtacagaaatggacgctgtccggcgcgtcctctgtgatctcgaagaggcggttctggatgcgaaggacggagtcctccaggcagagatagagggtggtgccctgcttcacgctcattccccagaccggttctcccttggccaccgtcaccgccagccacagggccagccaggacttgcccaccttgggtgaacccgccaggatatgcagaccctgagagatcagcgtgtccaccacaaaattgggcggctccagcggacggtccatcagcgtcctaccgtccaccgtggccagaggacggtccattttgttgctcatagtcagtacctccaattcaaaatatctgaatacaaaaatctcccacctcgaaagaagtgggagtagtattcttttagaggagcagtgcccacaggacttttgagcatccccttgcccctctgcttgtattgtggtggaaaagatggtatcctgataaaaagcatggacagattaaaaatcaagtaggacaaattattgcagaggaggggggcagcggaaatggaggggagcatcatattctatacctacggcagcaccttggagctgaacgggcagcagtttgaggcaggcaggctgaccgaagatctgctgaatctatcaccggatgactaccaccccctgcacgaacggatggtgcgcatccgtacccttatggacatctacgagtatgtccgcaagagtgaactttggtggaaactgaatgatgagatggagcagctctgtcaggaacttcgccgatatactgtgttccgcttgctaccggacgattgctatgacgctttcttttcggtgatacgggagatcacaggacagttcagcttgtttcctcccgaggagcacagcctttcagaggatgatcagacaaaacttctcagcgcctcagcggaagaattcttccagagcgatgatggggacagcgatcctgaaatctccttgggactgctggatctgtttcgtcgcagagagggcagcgaggaaaagggcgagttgttttattacgagatgtttcgcctcctgggagcgtgcgaagatacctggagtgcctacaagaaatacatcgaccgctacatgatgtatcttcacgacatccgtgcctttgttcctaccatccggaatttcatcaagtttatcctctccacactcacgaccaatgggccggaaagttatgcggcagcgctctatggtttctataacgatgatcgcaccgcagagaagctgatcgtcaaccccatcacttaccacggggactgctacaggagacacgatgaatatatgctctcctatgtcccgcgggagctgccggacggctccatggccatctgtcaggagcatgtgacggacagcttacaggcgctgatgaaggcagactatatgctggccctgaatagcggacacaacatccgccgctgcatcatctgcgggaaatacttcatgctgaagagcggcgtccacgctttgtactgcgaaggggcctgtccccacgctcctggctacacctgtcggcaatttggcacggtggaagttcaaaaggaactggcaaagaacaaccctaaggtgaaggccaagctgactgtcttttccaggatcacgaaggatatgcagcggggagctatctctcaggaggatgccagaagagccaaggatcatgtgcgagaccggctctacgatgcgctgcgcagcccggatatctctgttgaggagttttctgaacaaatatctactgcgcaagtgtatgaatattgccgcatcaccagagtgagcaagccccgagggcgtccaccgaaagcaaaggcgggtgggacccatgaccaatgagaaactggtccgccgatattacggcggtgatgagcgcgcgctggaggagttgtaccgcaggaatctcgggctgatccggcgcatcgcccgggagactgccagagagttcaactgtctgcatatggacagggaaagaccgggagagttgtccggctatacgaaaacgattctggaggatctttgcggcgagggtgcgttggaatttctgacacgggtccagagcagagaatacgatgagagccgtgctgtgcttgccacctacctgtacccacatctgaaaggccggatgacccgttggctggagcaacatatcggaaatctttctctgagcaagcacgagatggatgctgtccggcaggcacaaaggctatatcattcaggtcagttcagcatcgaagagatcgcggagaaaatggatgtccttctggaacaggctgtcaagcacatccgttacaacacccattttgttggtgtcaatgatcttgtccctgggagctatgacggtgatccctttgagcggctgatacctgggaatctctctgcttctgcggagcaggtcgtgtatcgaaaagtctgcattgagctgctgcaggaactatttgatgctctcccgaagaaggacagggacatcctcggaaaattctacggcgtattcggatttgaaaaaacttcgctgaaggaaatcggcatgtaccacatgatgaaggagtccgccgtggaaaaggcaaaggagcgtgctgtcacaaagctgaaaaaagcctatccgggtagcaggctgcagatctggaggaatgttcatcgtatgatacgcagaccgatcctgccagcgaaggatgacagagcactgcggcgcagcttcacgacttcgaccctacgaaatcaggagtctggaagatcgtagtttcgatacagtctggtgagaattttgcgcagacaggagaccgcaacagtcccctttaggacatgtttagaaaaaataaagagtcatactcgcttttttatacgttccgtgctataatgcaggaaaacacgaaaggccggcaactatggctacacatattttagtcgtcgatgacgagactgcgatcgcagatctggtggaggtctatctgaaaaacgaaggcttcaccatccacaaattctataatgcctccgacgccctggcttgtgtgcggacgacacgcttgaatctggcggtgctggatgtgatgctgccggacatggacggctttaccctctgccagcgcatccgggaggaccacctgttccccatcatcatgctcaccgcaaaggtggaggatatggacaagatcacggggctgaccttgggagcggacgactacatcaccaagcccttcaatcctctggaactggtggcccgggtcaagactcagctgcgccgctacacccggtacaaccccagggaggggacagtccaggaggtcaccgaatacgactttcgaggccttcagatctccaaggccactcacaagtgcgtcctgttcggcgaggaactggccctgacgcccttggaattctccattctctggtatctatgtgagcaccgggggaatgtggtgtccagcgaggaactgtttgaacatgtttggggcgaggcgtttatggacagcaacaacaccgtcatgagtcacatcgcccggctacgggaaaagatgcacgagcccagccgaaagcccaaattcatcaagaccgtttggggggtggggtacaccattgagtaagaaaggaaatacccgcagccgccggagatctttgcgcatctggggcggctacctgctggtcctcatggcttgggtggtcgcagtgatggccttggcattcctgggcttcatcatctgcgccagcatcacctggcagccctcgccgctccacgacatcctgaattgggttcgagactacatcgttctggtctgcatcgtcacagtgctggcgggctgggtggtcatcagcttctattttatctccaagcccatcaagcagctggacgtggtggccaatgcggcagagcaattatcccgccccagtgaggagcccatccagctgccggattccctggaggacatctccatccagctgaatctggcccgggagcaggctctccgggacgcccgggcagcccgggaggcagaacagcggaaaaacgacctaatcgtctatctggcccacgacctgaaaacgcccctgaccagcgtcatcggctacctgaccctcctgcgggatgagcctcagatctccccggagatccgggccaggtacaccggcatcgccctggagaaggcggagcggctggaggacctcatcaacgagttcttcgacatcacccgcttcaacctctctcgcctggagctggagcggcagagcgtggacctgacgcggatgctggagcaggtcgccagcgaattccgccccattttcgcagaatcggggctgtcatgcagcctggatctgccgcccaagctgcactattcctgtgacccggataagctggcaagggtctttgataatctcctgcgcaacgcgtcttattatagcctgccggacagcacggtggaaattgccggacggatagaggccgggaaaatcgtactcaccttctccaatgcgggaaagaacatcccccaggagaaattggaccggatctttgaacagttcttccgtctggacagctcccgcgccacccggacaggtggtgcgggccttggcttagccatcgccaaggagatcgtggagctccacggcgggaccattcgggcggacagcaccgaggatcggatcaccttcaccatctgtcttccgtcagaccattcagaagcgccgtaagaaaatcacaagaatttcgcagaaaacttgcaaggcatccgttggtagatagacaagtatgaaacgcctggttctggtaccatttcagtatcagaaccaggcgctttattttgattaggaggtcttatcccatgaaaaccattctcgttctcttcggcggatgctccacggagtacgaagtttctctccattccgcctatgcggtgctgtcccacatggaccccgcccgctatactcctttggctgtgggcatcacacgggaggggcagtggctctgctataccggcgacctctcccggctggaggacggtacttggcagcaggcggcagactgtatcccctgcaccccgctggtggaacgggaggcccacgctttactactgctggacggctccggccgccgtctcctctttgacgcggtattcccagtcctccacggcaagaacggcgaggacggtacggtacagggactctttgaactggccggggtcccggtcatcggctgcgggacattgtccagcgccttgtgcatggacaaggaccgggcccaccagctggcggccctggccggcatccgggtcccccggagccacgtctttcattccagcgatgatttcagccggatcgcccaggcagcggaggaactgggatacccggtgtttgtcaagccggtccgggccggttcctccttcggtatcaccaaagtctccgggccggaagagctgcccgccgccatggaggaggcattccgccacgacagcgccgtgatcctggaggagacgatccccggctttgaggtgggctgcgcggtcatgggcaacgaggaactgaccgtgggtctggtggacgagattgcgctgtcggagggctttttcaactatgaggagaagtacaccttaaagacctccgccatccactgtcccgcccgcatcccgccggagaaggcggcagagatccaggcagcggcaaaaaccatttaccgtgccctggactgccgggtattcgcccgggtggatctgttcctcaccccggatggggagatcgtcttcaatgaggtcaacaccatccccggcttcaccgcccacagccgctaccccagcatgatgcagggcatcggcatttcctttggggagctggtgacccgcctgatcgagttgggggtggcgggatgagaaccgtgtcgattccccgggagcagatttttcaggggccgctggtcctggtcaaccgggcgcatcccctgcatgaaaaagagcgatctgcgctgacctcggtggacccgcaccaccccgacattcttcttgaaagccgggcacggcagctactgtctgcctgtatccaaaaggcggggggacagcgggagatcgtgccggtgtccggctggcggagccagcaggaacagcagcggatctgggacgactccatggcggagcatggggagacatttacccgccagtatgtggcccttccaggatgcagtgagcatcagaccggcctcgccatcgacctgggaaaggctgccggatacatcgacttcatccggcctgcctttccctatgacggcgtctgcggaagatttaggcgtctggcggcccggtacggctttatcgaacgctaccagcggggcaaggaggaagtcaccgggatctcggctgagccgtggcacttccgctatgtgggggcgccccacgcccagctgatggaaaccaacgggctgtgtctggaggagtaccgggactttttgcggcagggtccccggagcgtcgctctggaaaacggccgcatggcccaggtgttctatgtgcccgccgccggagccgtcacagaggtggaagtgccggagggctgctgccagatatccggcgacaatgtggagggatttatcctgacatggtggggggatacccatgagaacggctaagaaaaccgtcccgactttggacctctttcgtctggcggcagtcctgctggtggtgatgaaccacacctcgcccctggcggatgtgtctgccatggctgatttctggcttacccgggtactggcccgggtggcagtcccattctttctgatgaccactgggtactttctgagccggaatcactgggctggtgtggggcggcagctgaaaaagctctgcctgctctacggcgtctgcatccttttgtatctgccagtgaatctctatgccggcagcttcaccggtccggcggatgttttgcggaaactgctggtggacggcaccttctaccacctgtggtatttcccggcgaccattctgggcatcgtcatcgcccggtggctcagccggctgggcctgcgggtggctctgcctgtggcggcgctactctatctcatcggtctgggcggggacagttactatggactggtttcccagatcccgctgcttcggaccctttacgacggcatttttacactgtgcggctatacccgcaatggcctgttcttcgcgccactgttccttctgcttggggccgccggaaggcggtggaaccaaaagctgtctctggcgggcttcttcctctctctggcagccatgagcgccgaggggctgtggctccatcgcatggatgtccagcgccacgacagcatgtacctcgccctccccctgtgcatagtatgccttttttctctgctgctgggcggaaacaagggcgagtccaggaaagtccgggaattttccacagccatgtatgtgctccatcccctctgcatcgtactggtccggggagcggcaaagctactgggactgggagaaatgctcattgaaaacagtgttctccattttattgtggtgctggcgctcagtgtgctgctctccgccccttgcctgctgaggcttcaaaagaagcccagccccaccgctcgggcctggcgggaggttgatctggcggcccttgggcacaacgcccaggtgctgcggaacacattggccccggggacagagctgatggcggtggtaaaggcggaggcctacggtcacggcggggcagtgaccgcccgcaccttacagcgagcgggcgtccgggcctttgccgtggcctgcctggccgaggggattgctctgcgaaaggcgggcatccgggggacgatcttgatcttaggttatacctccccggaggaagctccgctcttgacacgatggcatctgacccagacggtggcggatattgaccacgggcgggccttggcagccagagggcggcgtgtccatgtccatctggccctggacacggggatgcaccggctgggcatcctggcggaaaaccggaaggagatcctggaggcattccggcttccaaacctggtagtggacggtgtcttttctcatctatacgtctcggacagcctggaagccgaagatgttgcctacacccaggagcagctgaccttgttctatgatacggtggcctggctccgaactgccggatatgatcccggcaaagttcatatccagtccagctatggactttggaacctcccagctcagccctgtgactatgtccgggctggaatcgcactctatggagttcgaagcgatgatgcgcctgttcagcgaagtcttgacctgcggccggttctgtctctccgggccagagtggccagtatccgcactgtgcaagccggagagagcgccgggtacgggcgggtctttcaggcagagcaagaaaccaaactggcggtggtcaccatcggctacgcggacggtctgccccgggatctgcctcagcggggcggccaggtgctgattcagggccggcgttgtcctatggtggggcggatgtgcatggaccagttgctggtggacgtcagcgatctttcggaggtcgctcctgacgatacagtgactattatcggccgggatggcggtcaggtgattcgggcagaggaactggctgcatgctgtgggacgattaccaacgaactgctctcccggttaggcatgcggttacccattgtttctggttaaagagcggtagggaattttacaaagattccggttcggatttcaacatgaatatacctttaaacaggaatagccaccaaccacgatgaaatggttgatggctattcccgtttggtcgacaccaagagattctctcaatcggtttaatctggtgttttcaagatgtccttatgaggagtcgcccttgtccctccctttttacgcagaaaatccctctcccacagaccaaaccggaaaaagttcttcccttttgccgccggatgtggtatactccctgcgacaggggccctccctgtccaagcgccgccgctggcggcgttcgttcggttcacgccgttctctaaacaaaaaatgggaggataccaaacatgcagaagctacaaacccaacacctgacacgggccgccgccgtgggcgccgcctacgccgtactgagtcttttcagctccgtgttcagcctgaccttcggagtcgtgcaatgccgcttttctgaggcgctgtgcgtactcccctttttctttccggagacggtctggggcctgttcgccggatgcctcatcaccaatatattgagtccctatggtctgctggacctgatcgtgggatctctggccaccctcatcgccgccctgctgacggcccgatgccggaaaaagtggctggcccctctgccgccggtggtgctgaacactctgctggtgggggctgtcatcgcctatgaggagacgggcctcaccgccgccttccccgccacatgggccatcaacggcctgaccgtaggcgccggagaggccatcgcctgctatgggctggggatgctcctgctgtggcagctgcccaagatcccctatttccgggatcacggctgccgctgaacaggcggctttgcgggccatcatcagcctgtctccattccgctcaatcaggcggttcaataaaatctattcggcgtgaaagctatcggagcgctgcgggggtaccgcagcgctctggtcgcatatggggcagcctccggggaaacggtgcagctctcagcttcacattatgtcaactgcacttgacgttccctgcggaagctggtatgatgatattatatggtgcgccatgaaatctgcagatcacatgaaacggaggtcaccccatggataagcccctttccaccaagccggaggagtgccggtactctttcttccagcacactcagtgcgaatttttcccctgtcacaaaacagccaagccggaggacttcaactgtctgttctgctactgtcccctctatgcgctgggcgacaagtgcggcggcaacttcgcctatgtgggcgacggcatcaaggattgcagcggctgtctggtcccccatggccggggcagctacagctacatcaccaagaaattcccggagctggcggagctggcccggaaaaaggacactaagtaaaaaagcatcccctgaccagcaggtcaggggatgcttttttacgttttgccgttttgcttcttctcgtgcctacggcataggcctcggtagatcagcagccctatggcgctgactgccagcgttccggcaaacaccagaatggcaaaaaggtagttttttccacccagagcgtttccgcccacggtggaggtaatgatggaggggacacgccccaacgaacagatcagcagccacttgccccaggacagatcggtcagtcccgcaaagtagcacagcagatccttgggcgtccccggcacaacgaatacgatccagaacagcagatcccgcttaggggagctctgcaaaaaacgcagggactcgatcttctccttaggaaagaaaacctccaccagctcccggccaaaccggcgcacgaaggcgaataccgccacgctgcccagaaaagcccccagcatacacagtaccgtgccctgcaccgcaccgaaggcatagccgccgctgatttccagcggttcaccggggatcacagccaccagtacctgcaaaagtgtcatgcccacataggccacctgactccacaggccgtggctgtccacccacattcggaacttctccggttcggatacaaacttcaccatgggcttgcccacgaaccagcagatagcagcgctgaacaccacaaatatgacgatcgccaccccgccgatgagctttttctggtttttcgtaaaatgccttttctccatgtcagaatgattctccgtgtattgggatgctcttactataccacagacgctttacgtttatttgaacaggctatgaagttttccgtaaacatcgaaaaaccgtcaccggatgcccgccacaaagcatccgggatcccgctgccgctgggccgccgcccagcgcagcatctgccccaccggcacggccccggtgatgacgccgctatcccaccggtccgccgtgacgctctccagccacgggtctgctgtccgggtgcgaacatagtagggatgtgccacggcatcggcctccactgccatgggccgggccgtctccgtgtagaagccatcctccccggccaacagatccagacagtcctgcaccacgttggccgccgtgggatagcgtccggcgccctgcccgaagtagctctggcggcccagcagctccccggtgcaggagatgaggttatagttccccggcaccgccgcctccggctcgccctccgccaccagcgcaggctccacataggcggccacgcccgtctccgtccgcagggcgcaggccagcagcttgcaggtgaagccatgagcccggaagtccgccacatccgccccggtgacggtgcggatgccgaaggccgggatgtcctcctcccgcagcagcgcatcaaaggcgatgttggcggagatggtcagctttcggcggatgtcgtcgccgtcaatgtcagcgctgggatctgcctcggcatagcccaactcctgcgcccgctgcagcacagtgggaaaatccgccccctgccgggccatggcatccatgatgaagttggtggtgccgttcatgatgccccccacctccgtcacggtgtccacccggcggcagcgctgcagattcaccagccatgggataccgccgcccaccgccgccgtgcagcgcagggccgcaccgttttcatgggccagcgccgtcagctcccggtagtaggcactgatgaccgccttattggccgtcaccacgtccttccccgccgccagcgcccggcagatccactcataggccgggtgcaacccccccagcacctccaccaccgtgtcgatatctgtgtcccggaggatggcctccacgtcctgcaccgccgccttgcccagcggcggcgcctcccggcgcaccagcaccttcttcacattcaaggcccggttttcctgcgccagctcccacacgccgccacctaccacgccgaagcccagcaatccgatgttcattccgtctcctccttcttctcgatgatgtgtacgttcaggtgattgtagcacatctccactcccgcctcgttaaaggcggtgcgtatctcctccagcagctgatagtgcgccggccagtagtcctctgttttcgtccagcaccgcacaatgtactctatgctgctctcgccgtagctgctgacgtacaccaccggtgcaggatcagccagcacattggccgtccgccccaccgccgtcaggcaggcccttcgcacgtccgccgcggcatcgtcgtaggaggccgtgatcttgtgctggagccgccgggtggccagcgtggagtagttgatgatcttcccggaggacagggtgctgttgggaactgccagccgctggccctccatggtctccagaaaggtataggtcaggctcatctcccgcaccgttccctccccgctgggggtatcgatgtaatcccccacggtaaagggcttggtcaccagcagcaccagcccgcccgccacgttggccagcacattctgtaccgccagcgacaccgccagtgataccaccgagaacagtgccaccagtgatgtcacggggatgcccagctgctgagccacgatcagcaccgtcaccacccacagcacgaaccgcacggtgctgacgatgtatttgctgacccgctgctccagcgtggtcttgcccagcacccggcgcagcagcaccgtgatgatccgcaccgccaagatgcagaccaccagcgtcaccactgctcccagcagcgcacccacggagatgatccccagatgcagggccgacagatccagcttttcattcagtgcattatccatgactggcacctcccggaagaatttttcttgattataccccatatccgtctcattgacaagagtccgtgtctcacggaaaatctgtgagagataaaaagtttttcttacattttattaaaaatgtgttataatgaaatggataaaaatgtatacgagaaaagagttgaatgggatgtttacggaaggccaactggtcatttatggaggagaaggggtgtgccgcatagcggcggtgggaccctcctccctgtccggaacggacaaaaccaagctttactatacgctgacgcctctgacccgcagcggcacggtgctgaccccggtggataccaaggtgctgatgcgccccatcctcagccggcaggaggcggaggacttcatcgcccagctgccccagctgccgccggaggagccggagagccgcagtatgcgactgctgaaggagttctatcagcagatcgtcacctcctacgactgccgccgcatggcgggcctgatccgctccgccgtccgccgccgcaagcacgccctgcggaccgggcgcaaggtcagccagatggacgagcgctacctgcgccgggcggaggacgccctctacggtgaactggccgccgctctggacctgccggaggaggaggtactgccctacatccgccgcacctgcccccagtggccggaatgatactgccgacccgctttttcacatggagaagccccacccgcatcaggcaggtggggcttcttctatgcgtttatgcgttttttaccgggtctggccgttgccacggatgatgtacttataggtacacagctcgtccagccccataggcccacgggcgtggagcttctgggtggagatacccatttcgcagccaaggccgaactccccaccgtcggtgaagcgggtggagacattgacgtacacggcggcgctgtcggtgccgtccacaaatttctgtgcgttctcggcgttctccgtgatgatggcgtcactgtgaccggtggagtggcgcagcacatgggctacggcctcatctacgctgtccaccacccccaccgccagaatgtagtccaaaaactccgtgtcgaagtccgtctccgatgccggggtgccggggatgatggccgccgcacgctgatccagccgcagctccaccggcacggccccggcggtcctccggtcatccaccagcgcctgcttcagcatgggcaggaactcctccgccaccgcccgatgcaccagacacacctcctcggcgttgcacacagaggggcgactggtcttggcgttgatgatgatggccaatgccttttgcagatcggcgtactgatccacatacacatggcagataccggtaccggtctggatacagggaacggtggcgttctccacacagcggcggatcaggcccgccccgccacgggggatcagaagatccaccagcccgttggcccgcatcagatcggcggcgctctggtggctggtgtcgtccacgatgttgatgatctccgcatcccctccggcggcggcaatgccctgcttcagagcctgcacgatggccttggcggtgcggtaggcctcccggccgctgcgcagaacgcagacgttgccgctcttcaccgccagcgccgccgcatcggaggtgacgttgggacggctctcatagataatggcgatgaggcccatgggcacctgctgcttgcagatggtcatgccgttgggccgggtgatctgggacaggatgcggcccgtgtgatccggcagggccgtcagcacccggatgccctccgccatgcctgccagccgcttttcatccagatacagccgatccagcatcacatcgctgatggtcccccgtgcctcctccatgtcccggcggttctccgccagaatggcgggggcgcaggccatgagactgtccgccatggcccgcagcagagcgttctttccctctgcgtcccggttgcggatgctgggccacgccgcccgtgtctttttcaggatatccaatgtggtcataggtctttcctccctgccagaaagcgggtgcctaccggctgacccgccgcaatgtcatacagcgccgccggatggtggccgttggcgatgaccatctcgcagcccgcctccgtggcgatctgagctgcctgcagcttcgtcaccataccgccggtccccagactggagccgctgcctcccgccagcgcccggatgtggtcatccagccgctccaccaccgggatgagccgggcatcggggttcttgtgggggtcgctgtcatacagaccatcgatgtccgacagcaggatcagcagatccgcccggatgctggccgccaccatggcagacagggtgtcgttgtccccgatgctgatctcctcggtggagatggtgtcgttttcgttgatgatgggcagcgctcccagctccagcagccgctccagcgtcacgtggaaattctctcgccgctgtccgcccccggtgatatctggccgggtgatgagcagctgggccaccgtgtggttatactcggtaaacagcttgtcgtaggtatacatcagctcgcactggcccacggcggcggaggcctgcttggtgggaacgtccttgggccgctccggcaggttcagcttgccgaagcccatagcaatggctccggaggacaccagaatgatctgatgtcctgcattcttcaggtcgctcataaccttgcataaaagctcgatgcgctggatattcagccgccctgtgggatgcgccagcgttgatgttcccactttaattacgatcctcatagtcggtcctttctcattctccgccaacattcccgccgccgggcgccgggtcgggctgtgtgtcgcttcccgtgccaggggcctcccccggctccggatcgggctccggctcaggctccggttcgggtttcggttcgggtttcggttcgggtgccacatccgtcggcttgttccacggattgtcgctgtcgggatccgtggggtcccagccgggataggcgctgccgccgatggagggggcggagggctttcccatcgggcctgggtcgtcgctgtcgtagatggtcactccggcgatatcgtacttgttgtcatagatccacttggcgtccgccacctgcaggcggatgcagccgtgggagcagctggtccccagcttgtcgaactctcccggctggagggagcccttgttgtaccgctccgtataggggacggagtggaacaggtagtcgccgtagatctgcgtgcagtactgaccggacacaccgcccaccagccccagccactcccagcgataccagccgtccagcgagaagtcccccagcggcgtcccggagccgccggaggagcacaccatggcccggtaggggacggagtatcgtccgtcgtccccggcggtataaaccgtgaccacgttggcgctgcggttgacccggatatagtaggcgtagccggagcgcacccacgggtagtcgctgcttccggcggaccagtccggctcctccgggggtgtctgagcctccgtcagctccagcgccggcggggtatggctttctatggccgccacggcggcaaggcccatatccgccggggtctcctccggcagctgctgtctgccgcagccggagagcaccagcaccgccgccagcagcagggtcatggcttgttttttcacgggatatcccccattctgcaaatcgatggaatgattataccgcatctgtcggaaaatgcaacttccttcctgaaaaaatttgtgctatactgggaaaaatacgccagtcaggaggtgcgccatgaccaaggaggagctgagggaaaaagccaacgacctgcccctgctgccgggggtctatctgatgatggacaaaaccggcaaggtcatctatgtaggcaaggccaagaagctgaaaaaccgggtaagccagtactttcaggacaccgcctcccacaatgagaaaaccagagccatggtgtcgcaggtggaccacttcgacaccattttcgtctcgtcggagttcgaggcgctgatcctggaaaactccctcatcaagcgccaccagccccgatacaacatcctgctcaaggacgacaagggataccccttcatccggctggacaccggggcctcctacccccggttcactctggcgggaaaggcggaggaggacggcgcccggtacttcggccccttcggtggccgccgggagacacgtcttgccatcgaggcggtgtgcggggcactgaagctccccatctgctcccggcagttcccgcgggacatcggcagggaacggccctgcctgaaccaccacatcggccggtgcgatggcttctgtctgccgggcgggccggatcagacggagtaccgtcggcgcatccggcaggcggagcgcattttctccggccactaccgccagctgacggcggagctgcaaacggagatggaggatgcggcggaggagctgaactttgaaaaggccgccgccctgcgggatcgcatccgggccatctccgtgctgggcaagcagcagcaggtcattgccggggtctgcgccgacacggacgtgtggggcgtgtacgtggggcaggtgcgctccggctgcgccgtgctgcacatcgaggacggcaatctgctgggccgggaggtggaggtattccccaccgccgccgatgaggccctgccggcggtgctggcggcggtgctgcagcagtactatctggagcgtggcgcactgccgtcggaaattctgctgccggagccggtggaggacatggagaccctcgccgccctgctgacgggccgggcaggccaccgggtgactctgcgggtcccccagcggggcgagcgggcagagctgctgcggatggccgggcgcaacgcccgtgaggaggtggagcgcatcacctccgacgccgagcgggtcaacaagacgctggagcagctccagcagttggcggacctaccggtgcttccccggcggatggaatcctacgatatctcccacacggcggggcaggacatggtggcctccatggtggtctttgtggacggcaagcccctgaagcgggactatcgccgcttccagatcaagacgctggatcacgccgacgatctgcgggccttacaggaggtgctgcagcggcggatgcagcggtatctggacggggacgagcacttctctcccctgccggacctgctgctgatggacggtggtcatctgcaagcccaggccacgcagcagcagctggagtccatgggcatccatgtccccattctgggcatggtgaaggacgaccgccaccgcacccgtgcgctggtgacgccggagggccgggagctgggcatccagcagagcccgccgctgtttgcgctggtgggtcgggtgcaggaggaggtccaccggttcgccatcacctatcaccacgaaaagcacagccgcagcgccatgacctcccgtctggacggcatccccggcataggggacgtgcggaaaaaggcgctgctgaagcacttcaagagcgtcaaggccatctcggaggcggagctgctccagctggaggtgctgctgcccaaggccgccgcccgtgcggtatacgaccatttccatgagaaaaacacctgaaaggagaggcccggccaaaatggccgggcctctcctttcatcggatacaggcagaagctctcgcagccgccttaaaattccatcagattcagccccgtctccgggtcgaaccggcgctccaccgtgccgtccatgatctccagcaccagctcacaggtggcgctgatgaccgcctcgttcaggtgtccgcccagcacacgaccctccgtgtccccggcgctcatgtggaggtgggcataaaactccccgtccttggtggtgatggtccccaccagcgagacgatctcaaaatccccctgaaagcggtgggcatggtactgcctctccgccgtgtggaacccccccactgtgaagtcccccacggcgcccagcccgctgacagccgccaaccggataccctcctgctccgccgcccggtgcagctgggtcagcacctcctcgccccgatcgatccgcagcaccatgcggctgccaaaacgcttatattccatccgtcccatcctttcgctcataggtcaaatagcgataccgcagaccctgctcctcctgccacggggactgctccgtgatgcgccacagctccggcgcaggctccgggaagaacacgtccgccccaccatcggcgtcgatctgggtcacgtacagccgccggcaagcgggcagcagcagacgatacacctgcgctccgccgatgacaaaggcatcctccccggcggcgtccagcatcggctgcacctcgtggaacacctccgctcccttcgggacaaggtccccctgccgggacagcaccagattccggcggcccggcaggccacgcccccccggcagggactggagggtccggcggcccatgaccaccgtatggcccatggtcagggctttgaagcgccgtaggtcggcgctgatgcggaacagcagaccgccgtcccgcccgatgccccagcgggcatccacggctacgatggcatccatcactgcctccttaaatggctacggggatcttgtcctcgaaggggtggggctcgtagccctccagcgagaagctgtcccgtgtaaagcggtagaaatccgtgacagagggatccatgacaaatctgggcgcaggacggggctccttctccagcatccgctccacgataggcacatggcggtcatagatgtgggcgtcggcgatgacatggaccagttctccggcctccagtcccgacacctgcgccatcatgtggaccagtacggcgtactgcaccacgttccagttgttggcggccagcatatcctggctgcgctggttcagtatagcgttcagggtatgaccggacacgttgaaggtcatggaataggcgcaggggtacagggccatctcatgcagatcctgaaagttgtagatattggtcatgatgcggcggctggcggggttgtgcttcaggtcatacagcacccggtccacctgatcgaattccccctccggatactggtgcttcaccgccagctgatagccgtaggccttgccgatggagccggtaccgtcggcccagctgtcccagatgtggccccggagatcgtggatgttgttagacttctgctgccagatccacagcagctcgtcgatgcaggtcttgaaataggtgcggcgcaaggtgagaatggggaactcctcccgcaggtcgtagcggttgatgatgccgaattttttcaccgtatgcgccggggtgccgtcctcccaatgggggcgcacctccagctccgtgtcccatacgccgttggtcaaaatatcccggcagttctggataaagcgttcgtctgcatagctcattagacttgtcctcctgttgctgctgttgttttcttcatcttatcacaggccggcgacgttgaaaaggaaaatttccatcccagctgaaaagaaccgcttgccgtcatgagcagcagcggcagctggcagaagggattcttatttgccctccggcggaatttgtggcataataaaagtacttgtgttgattttcagaacaggaggaatctcttatgacatatgacgttcttatcatcggcggcggccccggcggcatctatacggcctgggagctgctgaacaagcgcccggatctgaagctggcgctgtttgaatccggccacacgctggagcgccgccgctgtcccattgacggtgtgaaggtcaaaagctgcgtccactgccccacctgcgccattatgaacggcttcggcggcgccggtgccttttccgacggaaagtataacatcaccaatcagttcggcggcaccctccacgagcacatcggcaagaagaaggcgctggaactgatggagtatgtggatcagatcaacatggaaaacggcggggagggcaccaagctctactccaccggcaacacccgcatcaagaagctgtgtctggagaacgacctgcacctgctggacgcctccgtgcggcatctgggaacggacatcaactatgtggtgctggagcacctctatgccggtctgaaggaccggatggatatcttcttcgatacccccgtccgctccgtggagaagctggtggacggctacgccgtcaccaccgacaaggagcgctatgagggccgcacctgtgtcatctccgtgggccgcagcggcagcaagtggatggaggaggtctgcacggcgctgaagatccccaccagttccaaccgtgtggatatcggtgtgcgggtggagctgccctatgaggtgttcgcccacctcaccgacgagctgtacgagagcaagatcgtctatcggacagagaagtttcaggatcgggtacgcaccttctgcatgaatcccaagggtgtggtggtcaatgagaacaccaacggtatcgtcaccgtcaatggtcacagctacgaggaccccgccctccatacggagaacaccaactttgccctgctggtggccaagcacttctccgagcccttcaaggactccaacggctacggcgagagcatcgcacggctgtccaatatgctgggcggcggcgtcatcgtccagcggttcggtgacctgatccgtggccagcgctccacgcccaagcgggtggaggagagctttgtcacccccacgctggccgccacccccggcgacctgagtctggtgatgcccaagcgcattctggacggcatcatcgagatgatctatgcgctggataagatcgcccccggcaccgccaatgacgacaccctgctctatggtgtggaggtaaagttctacaatatggaggtccagctggacgaaaatctggagacgccccacaagggcctgttcgtcatcggcgacggcagcggtgtcacccactccctgtcccatgccagtgccagtggcgtgtatgtagcccggcacatcgcagagagcctgtaaccgccgaaaaagcttatatcgcaaaaatcggaagcgccccggccattggccggggcgctcctttctggcgtttaccacttgttctccaccttttcggcaaagcccagaaggtccttcacccggacaggcgtgccgtcgtccagcagggccgtgccggtgaagcgcccgaacacctgatgctggtcggatttgatgagcttcacatccgtacaggcagcccgatccagaatgggtgcaaagtccatctcgaaccgcccgtcgtcggaggtaaagcgccacggggccagatagtcctcccgcttccccgccatgggaatgtggaaggtcacctgccccagcttgtgggtcctgccatcgtagaacagcatattctcgctggcggcagaggtatccccgaagccatagccgatgttccagccgaagggaacgccatccacctgcccggaggcgctgccccagtaccatgtgttgtgatacgtccacacgccccgtccccagtccagcacgccgaaggagtcggcggggtcaaaggtgtatgtctgccccccgatacgcaccgtcccggcagcccgcatacagttgatcttctggttgtagtagaagtggccgggcttgtcaaagggcgtgcagatgaccatggactcctccggctcctgcgtcagcagcaggtggccctcgatggtgtcccggttcaggaagtcctccatgcggaaggtcagctcccggccgccggggacatggcggaacaccagcgcatggcgcttgccgctgctggcggtatctccggcggcggaggtctccggcaggcccgtccggcccatgggaaaggcccgcatggggctgcgggtcatctgccacccctcatcaaattgcagaaaggagacggagtccagccccatatatccgttgtcggcaatggtcagcgccacggcaaagtggtcgttggtcacaaggtagtagtcccactccttgatgcgggcgaccggagccttgatgtccacccgacgatagatgggcagcaggcgcttggcgtagcccggctcccggagattgcccttttcgtccagaagcggtgcgctggcggtgatctcatgctgcatggcggtgtcctccttttgatccgtttgggccattatagcacaccccggcactgtgcgctatggttttcttgcaggctcttttgcccgcttttccaactcatgggaaaagttacccgccggaggcaatcaaacatttgaaaaaacacccccaccgccaaaaaaagggaagccccgcaggacttcccttctcgtttgcaaatatgtaagcccttcgcctcacccacgggtactctcggcggtaaaatagtcacgggtctggcggatattctcccggatctgtgccttcagcgcctccagcgaatcaaatttctgctcgtcccgcaggcgttggcagaactccacccggatgcacttcccgtagagatcgccgtcaaaatccaacaggaaggtctccacggacacagcagtgccttcagagacggtggggcgggtgcctacgttggtgacccccgccagcgacgtgccgtccggcagatagacccgtgtgatgtacacgccccgacggggcgccagcacatggggcggaaaggtgaggttcaccgtggggatgcccagcgtgcggcccagccggtggccgtggaccacggtctgggtcaggcagtggcggtggcccaggaacagcgccgcccgctccacgtccccggcctccaccagcgtgcggatgtaggtagagctgacggtaacgccctccagctccaccttggggatgatgtcgcagcctatccccagctcccggcacttctcctgcaaaagccggggatcgccctgattcttgtagccgaagtggtagtcgtggcccgccaccagatgcacggccccgtggcgctttaccagcagctccgtgataaaatcctgccacggcatggtcatcatggcctcgtcaaagggggccaggatcacctgctgaatgccatagatgcgccgggccagatcagcccgatcctccggggagttgatgaggggcatggggcgtccggtgaccacctccttcgggggacggtcgaaggtaaagacggcggggatcgcccccagctccccggcccgctgcaccgttttttgcagcagggctccgtggccccggtggacaccgtcgaaaaagcccagggcgatgacagtacgttccaaattcattcacgctccgaaaaagtttttaatggaggtcagcacaccgccctccaagcggctcaggcacagaaaatcgccctccgggtcgtagacccggtactccccctccggcagcggctccgacacggagacgggattgccgttgcggcagcgggccacagcccatggggtaggcagcacataggccggacgatcccggaacagggagtccaccggccgcagcagggcctcgccctccgcctgcacctgctccagcgtcacggcgtcggacagggtaaagcccgccgccatggtgcgccgcagggcggccatacagccgccgcagcccagcgcctgcccgatgtcgtggcacagggtgcggacataggtacccttggagcatcgcacccgcaggacgtagtcgccggaggccgtctgctccaccagctccagggcgtggatggtgacgggccggggacggcgctccacctccttcccctgccgggccagctcatagagcttcttgccgccgatcttgatggcggagtacataggcggcagctgggaaatttctccggtgaaccgtggcagcgccgcctccagcgccgcccggtccggcagttcctccgtccggtgcagcacctgcccggaggtgtcctgcgtgttggtgacaaggcccagccgcaggacggccagatactccttgtccccggattcggcgaagctgacgccacgggtagcctgtcccacaaacaccggcagcacgccggtggccatgggatccagtgtcccggcgtggcccacctttttggttttcagtattccccgcagcttggcacagacgtccatgctggtccaatcggcgggcttgtcgatgatgatgatcccgttggccatagtcgctccttttcagggggccagcgggccgatgacctgagcgatggccgccagcacggcggacttcgcctgagccatggtgccgctgacggtggctcccgccgctgcggcatgacctccgccgcccaacaggcggcagacctccgtggcgttgacacgggggccggtccgcagggacagcttcaccgtgccggggcgcagctcccgcagggtcacaccgcagtcggtcccctccacctgcgccgccagagcgctgagctcctcaatatcggcgtcggtggcgtgcagctcctgccgcagggacagggggatctgcatcaccaccacccgcccggcgtcgaagcgctccatacccgccaccatccgggcctccatggccagacgcacggcgctcttggtgcggaacagtgccttgttgacgggggccacgtcgatgccgcagtccatcagctgtgcggcaatgcggtggctgcggggggtggtgttggagtagacgaagcaaccggtgtccgtggagatggccacatacagcggcagagccatctccggcgtcaggggcgtcagctgccggaggatatcgtacacgatctcgccgcaggcggcgctgtccgcctccagacacgtctcacgggcgaaaaactcctgagaggggtggtggtcgatggccagagcaatgcggtcctgatagggccgggcgttctccggcagcagcgacagcgccgcaatgtccacggagaccacatacgccggtgcaaaatccgcctccgccagatagggggcggcatagggggcgtaggtggccgtcagctccgggttgggcagcagatacgccgttttgcccagcgcccgcaagccgcagcacagggcggcagcggagccgatggtgtcgccgtcggggcggacatgggtgaggatcagcacctgatccataaccgccagccggacggcggcttccgcagtggtcataacagacacctcctcagtcctcccgatcctccggcagcacgatatcggcgttccggggatcggcgggcttgacatggttcagcatatccagaatgtgtgcgccataggcgatggagtcgtccacaaagaattgcagctccggggtatagcgcagatcgatgcggctgcccagctcatggcgcagatagcctgcggcggacttcaggcccttcaaaagccccttctcgtccgggcagttcagggcgctgacatagatgcgggcatagcgcagatcgctggtggtgtccacatgggtgatggtcagcatacaatccgtcacacgggggtccttgacggtccgcagcagggcggagagctccttttggatctcgtcgttgatgcggccgatgcggttggatgacatagacggttctcctttcgttggatgtggaaaagagggcgggcgaagcgcccgccctctgggtcttgtgtttatctgttgcgggggaaaatcggagacaaagagtgcatccggcggcggttcctgtgtggtatcacggcttcccacggtcatctgcgaactgtccgtagaaaggccggtgcttgccgaacacctctctccacgggccactcccccctttactggggaatttcctccatggtgaaggcttccaccatgtcgcctaccccatgaaactcgtttcatgggggccccgatttaccatcctttggcagaaatgaattccgccaaagcaaggttttgctccgcaaaacccttgtacgcacgacctgcgggcgcagccgtgctgcgccggaaggcgaccggagacggcgcataagggccactcccccgtttactggggaatttcctccatggtgaaggcttccacaatatcgccttccttgatgtcgttgaacttctcgatggtcaggccgcactcgtacccggccagaacctccttggcctgatccttgaagcgctgcagggaggccagcacaccctcgtggatgacgatgccgtcccggaccagccggacctggcagtccttgcgctggagcttaccgtcctgcacgtagcagcctgccacggtgccaacgccggagaccttgtaggtctggcgcacctcggcatgacccagcagcacctcacggaacttgggcgccagcatacccttcatagcggcctcgatctcgttgatggcatcatagatgacacggtacatccgcatatccacgttggcacgggcggcggagtcacgggcggcgttgtcggggcggacgttaaagcccacgatgatggcctgcgacgtagaggccagcatcacatcggactcgttgatggcgcccacaccgccgtggatgacacggacacgcacctcgtcgttgctgagcttctccagcgaagccttcaccgcctctacggagccctgcacgtcggccttgacgatcaggttcaggttcttcatctcaccggcctggatctggctgaacagatcctccagcgagaccttggtgacaggggcgttggccttggccttctcctcggccttgcgctgctccaccagctcacgtgccagcttctcatcggccacggcattgaaggtagccccggcggtaggtgcctcgctgagaccggtgatctccacaggcacggagggcccggcggaggtgatcttctggcccttgtcgctgaccatggcccggacacggcccacggaggtaccggcgatgatgatatcgccctgcttcagcgtgccgttctgcaccagcagcgtggccacggggccacggcccttgtccagacgggcctcgatgaccgtaccctgagcggcacggttggggttggccttcagctcacccacctcggcggtcagcgtcagcatctccagcagattgtccacgcccataccggtcttggcggaaatggggcagacaatggtgtcgccgccccactcctcacacaccagcccgtactcggtgagctgctgcttgatgcgctcgggattggcctccggcttatccatcttgttgatggccacgataatggggatcccggcagccttggcatggttgatggactccaccgtctggggcatgataccgtcctcggcggccaccaccagaatggcgatatccgtcaccatggctcctctggcccgcatggaggtaaatgcctcgtggccgggggtatccaggaaggtgatgggcttgccgttgatctgcacctgataggcaccgatgtgctgggtgataccgccggcctcgccgctggccacatgggcgttgcggatatagtccagcagactggtcttgccgtggtccacatgacccatgaccaccaccacgggggcacggggtaccagatccttctcgttgtccttgtggtcgtcgatgagcttctcctcgatggtgaccactacctccttctccaccttgcagcccatctcctcggcgatgatggcggcggtatcgaagtcaatgagctggctcagggaggccatgacgccgtttttcatcaggcacttgactacctctgcgccggtctttttcatgcggctggccagctcgcccacgctgatctcatcggggatctgcacggtaacgggggtctttttgatgacctccagccgcaggcggcgcagacgatccgcctcctcctgcttgcgtttattggaaaaaccgttgtcccggcgcttgccgccgttgcggaacttctccttgccctgggtctgctgctgggcccgacggccgccgccggtgcggccctccgccatgtcctgcagcttctcgtcgtacttatccagattcaccgccgtggccttgcgggtgtccaccaccttggtctgaggcacacgggagacgggcttggtctcctgcttggcagaacggctctcccccttgccctccggcttcttctcggcgggcttggcggcaggctgctgcttcttctcggcaggcttggccccctcggcgaagatcacctgaatcccggatacctgattgtgctgggtcagatactcaaagatcagagacagctcccgatcctccaagacctgcatatggttcttgggcgtttcggcgtacttggtcaagatctccgtgatctgcttggtggggactccgaagtccttcgccacctcatgcactctatatttgtttcctacgctacccaaataaagccacctccatctttgtgattacgaaatgtgccggagcacaaaacttacgattttttccgatctctgccggagcccttgccctttttcaccggccgggagccggcaaaccgctgctgcggagcagcggggcgcctgcggcccggacgggccggacgccggggcttttccttcgccgcctcacggggcggctcctgcaccggctgcggcggctctgggggagccgtgcgcttcttgccccggcgcaggttcttctcgtgccgggcctgctcctcccgccgctccatggcccgccgggccttgatctgcagccgctgggatgcctgctcatagtgctccggatccatgactgccagctttttcacgatggcgtcggcaaagcccacgtcggtgatggctgccatagcgcagctgctgcggcccagcgcacgccccaaggcgtccttgtcggcggggatggtcagacacaggcaggcccccgtctgtgcaaaggcatacgcccggcgcacagagctggccgccgcatccgacgccaccagaatgacccgtgcgtgcctgctgcgggcggcagagcccaccggctcctcaccgatctccacacggcccgcctttttggcaaggccgatcattgataaaatatgctccattactcccccatccgggcctccagcccatcgtatacctccgccgggatagtcgtctccagcgcacgctccagcccgcgggacttccgtgccttccgcaggcactccgggtcgggacagacgtacacgccccgtccggactttttgcctgtggcatccagcacgatctccccctccggggtcttgacgatccgcagcagatcccttttatcccgcttggtacggcaccccacgcactggcgctgggggatcttcttcaccttctgcatgacgggcctcctctcaggatacgaacttattcatccgcccgggacacgggcttgatgtcgatcttatacccggtgagccgggcagccagacgggcgttctgcccctccttgccgatggccagactcagctgatcgtcggggacgatgacccggcacaccttgccctcgtccgccagacgcacctcctccacatcggagggagccagcgcagcggcgatgaactcggcgggatcctcggagtacttgatgatgtcgatcttctcgccgtggagttcctccacaatggcggccacacgctgaccacgggggccgacgcaggcgccgatgggatccacgttctcgtcggcggaccacaccgccatcttggtgcggctgccggcctcacgggcgatggagcggatctccaccgtgccgtcgaagatctccggcacctccagctcaaacagccgcttgacaaggcccggatgggtccgggacaccatgacctgcgggccacgggtgccacggcgcacctccaccagatacaccttcagcagctgtccctcggtgtaggtctcggtgctgacctgctcgttcaggctcaggatgccctcggtagcctcgttgccggtgccgatgcggagatagacgttgccgctgcggggatcgatgcgggacacggtgccggtgaggatctcatgctgcttggagccccactcgtcatagatcatgccgtgctcagcctcccgcaggccctgaatgatgacctgcttgccgttaccggcggcaatgcggccgaactccacgttctccaccgggaagcgcaccataccgcccagctcatacttggcagagatgcgccgggcctcctccagagagatctgggagccggggttctccacctcctccacgatctccttctgcacgaacatcttcaggtcacgcttctcctcgttgacctccaccaccacgttctccacaccctcgtggtcccgcttgtaggcggtggtcagggcctgaacgatcttgttcatcataaagtcctgagggatgccccgctccttttccagcattgccagtgcggcaaagatctcatcgcatttcatgatcgtaactcctattctttctgtcgttgcttaaaattccacacgcaggcgcaccagcgcaatgtcctgcttttcaaaccgcaggggctgcgccgtgcccatatccagctccacggctccgttgtcgtagcccgccagcctcccggcgaactccttgcggccgttgacgggcttataggttttcagcagcacggggctgcccatgaactgctgaaagtccgagggccgcttcaaaggccgttccgctccagcggaggacacctcgaagatatagcttgcctcgatggggtccagctcatccagcaggtcgctgaccttgcggctcacagcctcgcagtccaggatgtccacgccgccttccttgtccaggtacagccgcaggtaccactgccctgcctcacggacatactccacgtcccacagggtgcagccctgctcctgcgccacaggcgccgctacctccgccaccagctcggtgatcttctttgccataggaacctcctgtccgccatattttaaggatacaaaaatgaccaacaaaaagagcggacaaatcgtccactcccagtcaataccaccttactatgcagtaagtatagcacgatttttcagcgattgcaagagcttttccggggattttccgtcgaaaccggctttttcagccggcattttcccctcccgtgcgggaaaacgggacgccgcagcccgcagcgtcccgcccaaagcgttttaagtctcagccccgcacccgccgcacaccgcagcacagcaggaagatcagcaggtctaccaccaccaccgaggcccccaccggggtgctcagcagatacgaaccggtgagacctgcgcagaagcccagcaccgacagcacccccgccagcaccaccacgccccggaagctttttctcacccgcatggccgacagtgccgggaagatcaccagactggagatgagcatagcgcccatcatccgcatccccagcacgatggtcaaggccgtcagcaccgacagcagggtgttgtacagccccaccttcaccccggtggcacgggagaagttctcgtcaaaggtgatggcaaagagccggtggtaaaacagcacgaacagcaccagcacccccacgcacagcagggcgctgagtaccacatccgcctgcgtcatggccagaatggagccgaacatatagctgtccacgtccgtggtcatgccggtggtgaggctggtaacgatgacgcctaccgccagtgatgaagcggacaccaccgcaatggcggcgtcggctcccatgcggctgcgctccgtcattcgcagcagccccagcgccgccacgatgaccaccggaatggataccggcagcggcgcccagccgcaggccagcgccacggacagcgccccgaaggacacatggctcagcccgtccccgatcatggagtaccgcttgagcaccagcggcacccccagcagcgccgcacacagcgacagcagcaccccggcggcaaaggcccggacgataaagggataggtaaacatctccagcagcagcgtcatgtccgctcacctccgaaccgccgcccgtagggggaggcgagatattccgccgtcgtgccgtgaaaccacttgccctgcccggcatagagcacggtgtcggcgtattgcagggcgctctgcaggtcgtgggtcaccatgacgatggccagcccctcatttttgttgagataggccagcgtccggtacaggtcctgtgcggcggcagggtccagccccgtcaccggctcgtccaggatcagcagccgccgggcggcgcacagcgcccgtgccagcagcacccgctgctgctgtccgccggacagctcccggtagcaccgatccttcaattccaatatccccagcttgcccatgtgcatcagcgcctgcgacttctcggcggcggagtagaagaaccgccgtccacgggcgctgagaaagcccgacagcactacctcgctgacggtggcgggaaaatcccgctgagcctgggtctgctggggcagatagcccaccgcccctgcggtgtcgcttcgccggatgacccccttcagcggcggcagcagccccagcaggctcttgagaagcgtggacttgccggagccgttttcccccacgatacacaggtattcccccgaatataccgagaaggtcagatgttcccacacggtgtgtccctcgtagcccagcgacacgtcccggcaggacagcagcgtttccttatccatcaggcaagcccctccttcagtgcagcgatattctgccgcatcagcgacaggtaggtggccccggcgtcgaagtcctgccgggacacggtctggcaggactggaaggtcagcaccttggccccggtggtctcggcaatggcctgcgccaccttccggctgcttagctcgatggtatacaccaccgggatgccctcctcctgcaccttatcaatgagatatttcagggtagccagcgacggctccgtatccccggcgcagccgtggaaggccgcccggtactccagcccgtaggtcttacagaagtacagcagcgggaaccgatccccgaacaccaccatgtgccgattgccgtcggccaccgcctccgtgaaggcctgatccagctccgtcagctccgccagatacgcctccagccgccgggcgtagttctgtgcgtgggccggatcggccttctgcagcgtctcggcaatggcccggcacagccccatggcaatacggggtgacgtccagatgtgctcgtcgtaccccacctcgtcctcatggccgtcatcgtggtcatgatggtcatcgtggtcatgatggtcgtcgtggcccgccccctgcatcccctccgccagctcctcctccagcggctgggcatagtccataagccgcagagtgtaggggatctcttccccggcagaatccaggatctcctccacccagtactcgctctccccgccgttgtagacgaacacatccgcctgggacagccggatcacatccagcggcgttggctcgaagctgtgggtctcccgcccggcagggaccagcagctccgcctccacgtcctccccgccaatggcccgcacaaagtcgtagtaggggaacagggagcacaccacccgcagcttgccgctctccggctctgccggacgggcagcgcatcccaccgcagggagcagcaccaccgccgccagcaccgccgccagcagccgcctcatgacggctcctccccgctgcaccggtcgcacagaccgtagaacagcgtccgccgggggttgatgcggaagtgatgctgctgcaaaacgtgctgatacagctcccccagatgagcgcagtccatgtgctggatggccccgcacacctcgcacttcaggaggatgcagtcccggtgggcgtggcagtcgcagtactgccagcaggctccctcatccgtcaccagcttgtggaccagcccctgcttctccagccgctccagctgacggtatacggtggtcagtcccacggactgaccgccgctgcggagccggtccgccagtaccatggccgtggcgcagccgccggggcaggcggcgatgcagtccagcactgcctgctgctgccgggtcatataggtcatatgcgtcacctcgcagatttgaaaatgaaaaccgttttcagattatagcaggtatgagagaaatgtcaatccttttttgcggaattttgtgcttcgctccccggcggtgtcctttccccgcagtcttttctccttttgtctccgacggcatattttcccagtagttttttcttcgattgcctccggcgggtgactttctttcaatagcacgtttgcgtaaggaacgtgcctccggcggcccacttttcccagcagctggaaaagtgggcaaaagagccgccagagaccaatggtctctggactccctttactctcaagagtttcgtttgttatgggccataaagggaattgacgcagcaacagacccgctgccgctcccggctcaggcgaagaaaatgatgcgtctaccgccggaacatacggattccccacggtagaacagcaatctctttcaccctcacaatgcagcggcagcgtgagtagaaggcagtcaattccctgcttcggcgggacttaggatgcagctcttgtacacaaaaaggaagtgcagaaaccatgggtttctgctggcgttctttggtgactttctttcgctattgaaagaaagtcacccgtcggagacaaaagaagaacgagccgccggaggcacgttccttacgcaaaagggactgctgaaagaaagtcacccccgtatcccccaaaagaacacccccttcccctcccgcatacactgtcacaggaacattccggaaaggagccatttccatgcccaagatctatctcagtcccagcacccaggaatataacccctacgtcaccggcgccgggtcagaggaatactttatgaacctgctggccgatgccatggagcccattctgctgctcaacggcatccagttctcccgcaatacgccggacatgaccgccgcctcctccatccggcaggccaacgccggacagtacgacttctatctggccctccactccaacgcctccggccccggtgccgggggccggagccggggcattctcgccttctactatcccaccagcgccaacggccgccgggcggcggagctgttcgtggaaaacctccgggacatctaccccctgccggagaaggtgtccacacgggccaccacctctctgggagaggtacgccagccccggttcccctcggtgctgttggagctgggctaccacgacaaccccgacgacgccctgtggatccaggagaatctcccccgcatcgccgccaacttggtgctgagcctcacggagtactttggcctgccctacaccgcccccactccccagccgggtcaggtatccaccgtctccggcggcccggtgaacctccgctccgccccctccctccagtccccggtaacggcccggctccccgacggcgacggcgtgacggtgtacggccgctatcaggactggtacgtggtgtcccacggggagcatctgggctacgtcagcgccccctttatccgcctgtcgtaaaacgtcggcagagcctccccggcgacctgcgaaaataataaacagaatgtggtttttctcttgacagttttgcacaattcgattaaactattaggaagattatcatcggagattcaagggggatcttcggttattttctgccctgaacggagctatccgttttcatacgttaaaacaacataggaggaatatctgtcatgacgacaatcggctggatcgtatccattgctgccttcgtcgttgcggcggtgatctttttcctcctcggtattcgctatcgcaaaaacgtagcggaaagagaaatctccagtgcggaggaagaagccacccgcatcatcaacgaagccatcaagagttccgaaaataaaaagagagaagcacttcttgaagccaaagaagagattttgaaaagccgcagcgagtacgagagagaggtcaaggagcgccgtgctgacctgcaaaagcaggagcgccgactgcagcagaaggaggaaaacctcgatcacaagatggattccatcgagaagaaagaggaagccctcaccgcaaaacacgccgccgccgataaggctgcggaggagatcaaaaacatcaagcacagccagatggagatgctggagcgcatctccggcttcaccgccgatgaggccaaggattacctgatcgctcaggtggagtcggatgtcacccacgagactgccatcaagatcaaggagatcgaggcccgcgccaaggaagaggccgatcagcgggcccgtgagatcgtggccaccgccatccagcggtgcgccgccgaccatgtggccgagatcaccgtcagtgtggttcccctgcccaatgacgagatgaagggccgcatcatcggccgggaaggccgcaacatccggacgctggagaccctcaccggtgccgatctcatcatcgacgacacgccggaggccatcactgtctcctgcttcgagccggtgcggcgcgaggtcgcccgtctggctctggagaagctcattgccgacggccgcatccatcccacccacatcgaggagatggtggagaaggcccgccgtgaggtggatgccgtcatccgctccgagggtgagcgggccgtgctggagaccggtgtccggggcatccacccggagctgcagaagctgctgggccgcctgcactaccgcaccagctacggtcagaacgtactacagcactccatcgaggtcagccacatcgccggtatgatggcggcggagctgggcgccgacgtccagaccgccaagcgtgccggtctgctgcacgatatcggcaaggccgtggaccatgagatggagggtacccacgtctccttgggcgtggaattctgccggaagtatcgggagaaggaggacgtcctccacgccattcaggcccaccacggcgacgtggagtgcaagacgctggtggcctgtctggtgcaggcagccgatgccatttccgccgcccggcccggcgcacgccgtgagaatctggagaactatatcaagcgtctggagaagctggaggagatcaccagcagctatcccggcgtggagaagagctacgccattcaggcgggccgtgaggttcgtgtcatggtgaagcccgaacaggtctctgaggatcagatggtgatcctggcccgtgagctggcccaccgcatcgaaaacgagctggagtatcccggccagatcaaggtccacgtgctgcgtgagaccaaggctgtggaatacgccaagtaaacatccttcccaatacgcatcgtccccaacggcgcaccgcagcagtggtgcgccgtttctttatgtcctttaactttgctttaggaagcggtgatatcctgtcctcaaaacccgaaaaatcgaggactctgccatgaaacgcattccactcattctttcgccggccctgctgctgttgctgccggccattgccctgtatccaatgctccatgcctccgccgaaaaggatggtgtcgatagcagcacagccattcaggaggccgccccatcggaagccgccccgtcggaagccgccccgtcggaagccgccccgtcggaagccgccccgttagacagcgccgtcgctgcccccgccgctcccgtcgccgtcagtggttctatcgaaaccggtgatttccccctcaccgacggccagcagcaggcgcttcaccgctatatgaccgcctactataccacgctgggggatctgacggaggcgagcaccgacggcgtattctgcgccgacgacatcgccgcctatgagcaggcggttgggaatgatccttcgcagtctcggccggggatgatcctctgcatccttggctggaaataagccctatcatctccggccgggaataagacgttgcgccctgacagttttgtggtataataggactgtcagcggacagagccatgtccagttaccatgtccacctttgtccgcagaatgtaccaattcaccgggaggataccctatggaatttcgtgtgctggcactgggagatgttaccagcgaggatggcacccgccatctggcccgtactctgcgcccctttcagaaggtccacggcgtggacttcaccgtggtcaacggtgagaacgtctccggcgtggggctgaccccagatcaggcggaggatctcttcgccgccggcgccgatgtcatcacgctgggcaaccatacgtggggcaaaatgcagatcgctgactatctggaggacagtccctacatcctacggcctgccaacttttccccccgcacgccgggccgtggtgtgggagtctacgactgcggccgcttccgcatccgggtcatctccctcattggccgctgcgatctgtcatggggcagcgataacccctttaccacagcggaccgcctgctggcggagccggacgctcccaccttcacggtggtggattttcacgctcaggccaccagcgaaaagctggccatggcctactatctggacggccgggtctccgccctgtgggggacccacacccacgtccccaccgccgaccagcgggtgttccccaagggtaccggctacctgacggatctgggcatgaccggcgccgtggagtcggtgctgggcatccagccccagcagtcggtggagatgttcttaggcggtctgccgggccgtttccgccctgcctccggcccctgcaaggctcagggggcgctcttcacgctggacagcgccacgggcctgtgtacggcagtggagcgggtggatatccgctgagcacaacatttgccacataaaatttgtcacataggacccgtcacgcaggttctatcacataggagaaatgagccatgtctgttgaaaaggtccgggcgtacctgacgccctatggggtggcccagcgcatccgggagctggaggtttccagcgccacggtggagctggctgccgccgctctgggggtggcccccgcccgcatcgccaagactctcagcttcaaggtgggagagcggcccatcttagtggtggccgccggggatgcccgcatcaataacagcaaatacaagcactttttcggcgtcaaggccagaatgctgacgccggaggaggccgtggagcacatcggccacgccgtgggcggcgtatgccccttcgccctgccggaggacgtgtccgtgtatctggacgagtctctgcggcggttcgagacggtgttccccgctgcgggcagcgccgcctccgccattgagctgacctgcccggagctggagcgctgctgcggagagcggttctgccgatgggtagacctctgccgtggctggcaggaggcataaaaggaggacgctatggcaaaaattctacacacggcagacttccatctggacagcgcctttaccgccctgccggaggagaaggcccggctgcgccgtcaggaagcccgccagctgacggaccggctggtggactacgccaatgaccacggcgtggagctgctgctgctggccggggatctctttgactccgaccagctctacggtcagacggcgcaagagctggcccggtcgctggcccgcttccggggccacgccgtcatcgcccccggcaaccacgacttctacgccgcctccagcccctatgcccggctgctgtggccggaaaacgtccacatcttccgggaggagcggctccagcgactccccttcccccaatacggctgcgtggtatacggagccgccttcaccgcccccgccgctcccgccgggatccccggctctcttggcccggaggatgaggggctggcccgcatcctgctgctccacggagaggtgggcgtccgggacagccgctaccgggccatgaccctgaaggatgtggagcagagcggcgccgactatctggcgctgggccacgtccacgccttcggcggcgtgcagcaggcaggacgcaccttctgggcctatcccggctgcccggagggccgaggcttcgacgagctgggggacaagggcttcctcaccggcaccgtggaaccgggacaggtgaagctcaccttcgttccctttgcccgccaccggtatcagtggctgacggcggatgtcaccggcgttgacccgctggaggcgctgcgccgggagctgcccccacacccggaggcggacatcttccgcatggtcctcaccggtgagacggaggagccgccccggctggacgccctctatgatgcgctgtccccggactgcttctatctggagctgcaggaccgcaccacccgctgccgggatctgtgggagcactgcggagaggacaccctgcggggcctgttcctccgagacctgcgccagagatacgacgctgctccggaggaggagaagccccggctgctgcaggccgcccggttcggcttggcggcgctggaaaatcgagagctgtaaagcccttttcatttactgcccacggcgtaggccgtgagagaggagccattcctatgaaaaagatcctcatgctcggcaccggcggcaccatcgcctcggagatgacgccggagggcctgacaccggagctgaacacccaccagctgctgtcctatcttccccgcatcgcccagctgtgccatgtggactgcatccagctgtacagtctggacagcaccagcattcaccccgcccactggctggggacggcccaagccatccgggagcactacgacgactacgacggcttcgtcatcagccacggcacggacaccatggcctatacggcggcagccctgagctatctggtacaggacagccccaagcccatcatcctcaccggcgcccagaagcccatctggttcgatggcaccgactccaagcgcaacctcaccgacgcctttctctatgcctgccggggctgcggcggcgtgcagatcgtctttaacggccgggtcattctggggacccgtgcccgcaagacctactccaagagcttccgggccttctccagcgtcaattaccccgatctggcggtggtgcaggatgagcatctgttacagtacatccgttgtgagagccggccacggcccctgttctatgaccggctggatccccatgtggggctgctgaagctgatccccggcacggaggatgcgttggcggagttcatgctggatcgctatgacggtcttatcatcgagagcttcggcgtaggcggcctgccggaatacgacggcggacacctctacgacgtggtgcgccgtggggtggagcggggcaagatcgtggtcatgaccacgcaggtccccaacgagggcagcgacctgacggtataccatgtggggggacacctgaagagcaccctccggctgctggaggcctacgacatgaccaccgaggccgccgtggccaagctcatgtggatcatggggcagacccgtgaattttcggaggtggagcggctgttttaccagcctgtggcgcaggatatcctccgcttcggggacgaataagatgtttgctccggcgggacacgccttgtgtcccgccggagtatttttttgacctgcggcacaagctaacggggcaaaaaagggaggcggacagtcagctgtccgccccaagtgaggagaaaaaatggataaagcattgaaaacgccgtccctcagacgagggccagcaccagccacagcaggccgatgacaccgccgcccagcagcgccgccatccatgtggtaagccgtctgcgccggggcggagccccgtgggtgcgggcgtagctcttggcgatgcggaccgcctgctccaccacctgctgggatgagacgccgccgcctgcggcgtcgttgctgagaatgaagatcgcctgctcgaaaatatggggatcgggggactccaccacgatcacccgtctggaaataccttttaccaaggccacgccctcctctgtccggtgatgtttgacagatagagtatttccggcgtcggcggcggttatacctgccgggggcggttttctcccggcaggggcaggtgtaccgccagcacggcgcagtcgtcctccagtcccctgcggctgcgggattccgacaggatcagcgccgtcagggcgtggacgtcggtgccgttccaccccgccagcagattttgcagccactcgtcgctgttctcgtcggcgatgccgtcggagatcatgacaaaatagctgcctgccgggagggccagccgagtgacctccggcggctccgccgtggcctgcagccccgccggaagggaatgggcggtgaagcgggtaacgtgggcggtgtgcttgagataggagggcgcagcgccgtatttatagagggtggcctcgccggtggagcggcgcagagccaaaagatcgatggtggtgaaggccccgccggtctccccccgcagggccagcgccgagttcagggtcttgagggccggagccggttcaatgcccgcccgcaggaactgctccagcagccgcaccgtcagcgccgcctcccggtgggcctccgggccgctgcccatgccgtcggagagcaggaggtacagcatcccgcctgtctccaccgtggccagctggtcgccgcacagctgctgtccctccttggggcgcagggccgaggacacccgatagcccatggggacggtgggctcctccgccggggcgtgggctgctgccgccagcagatcccccatctgggcgtactgctcctgagcctgacggcgggagcagctcagctggcgatgatattggcggcgcaggaggaaaagccgcagttcctcgttgacggcggcgataaactcccgcagatggacacaccgggcggtgaagtacagggggaaatcctccgactgggccgtgccacggcgcagcagcgccggacaggcatcattgaaggcgttgtaggtggcgttatagttctgctgccagcagttggcgcacaggacgcaggagcggcacacctgctccgccgcccggtcgaagatcaccgagggattctccggcggggccggggccgtgtcccggaagaagctgtcgtacagggagcgcagagccgcagcggactgctccagccggcggggctttgccgtctctccgggtgcatccgcccgggcggcacgctctgcgcagggaggcagccagcgccggggcagcagcagataggccgcaccgcccgccagacatgacagcagcagctgtcggggaggaccgacatccagcagcactgcaaaggcgatggtgggcagagaaaaggccgccgccgggaggatgcggggcagacggccatagaaggcggccagcgctccgccgcagccgtaggccaccgtcagcagcagcgccggggtctccggcaccaaatccgccgcaaggcccgcacaggcccccgccagtcccgccgtcaggggcggcaggcggcgggagaggagcagcagctccgtcatcagcagggctttccccacggagaacaggccctctaccgtcaccggcaccagtgccagcgacagggcggcggcgtatagcagtcccttttgccggagggtcgttccgtgggcggtcagcagggccgtggcagccgccagcagcgccgaggctgtcaggcacagcacccactggctcagggggcggtacagcaggtacaccgactggatcagcagttgagacagagccgccgtcaggggccggaaggcggggcggcggtagagcttcgtatcacagaaggccgtctgggcggcgaaaagcagcacggcagcggcggcatggcgcagccccggttgaaaatccagaaacagcagcgctccgccggtaacacccaacagggaaagcaggcccggcaggcccggccctgcggcggcggccgccgccagactgaagggggcgtacagtcctcccagccgggcagcggtgaggacgcagcagagcgccgcctgccccagcagcgtcaggatgcggcggagccgtctgccgggcagcgggaggtgaaacttcatggacaagccctcctttttcccctattgtagccaccggcggcgggaaaagctgtcgggaaatggagtctggcggatttttccgtggacggcggtgtttacggaggcggaaagctgtgatataatgaagaaaccttgacagaaagcaggtggccgctatgaaagcgcagcgtccctatccgcagatcaccatcacccccaagggggaggccgctctggtgggcggacacccctgggtctatgagggggaggtcacgggactcagcggccccgtgtccgacggacagctggtggacgtcatcagccgccggggcagctggctgggctgcggttttttcaacagccgctcccgcatccgggtacgggtgctgtcccggaaccccaacgaccggttcgaccaggccttctggcggcgcatccagtacgcatgggactatcgcaagaccgtcatggggccggaggatagccgctgctgccgggtgatcttcggagaggccgacggcttccccggtctgacggtggaccggttcgagagtgtgctggtggcgcaggtgctgtgtctgggcatggagctcatcaaggaggagctgttctccctgctgctggaggtgctgcgctccgacgggcaggacgtagtgggcgtatatgagcgcaacgacgtggccatccgtggtctggagggcatggagcagggcaagggctggcatcccgtgggcggtgaaaaggctccggactttacagcggtggatattgaggaaaacggcatccgctacaccgtggactttgaaaacgggcaaaaaaccggcttctttctggatcagaagtacaaccggcaggcggtggccaagctggcccgtggccggacggtgctggactgcttcacccacaccggctcttttgccctgaacgccgcacggggcggagccaagcacgtcacggcggtggacgtgtcggagttcgccgtggcgtgtgccagggaaaacgcccggcgcaacgggctttccgacgtgatggagtgcgtggcggccaatgtgttcgacctgctgccccagctggagcagcagcccaagcggtacgacttcatcattctggatcccccggccttcaccaagagccgcaagaccacccagcgggccatgaccggctataaggagatcaactaccgggccatgcggctgctgccacggggcggctatctggccacctgctcttgcagccacttcgccacggaggagctgtttttgaagatgctgcgctcggcggccaaggatgccggggtgcagctgcggcagatcgaggcccggcagcagtgctgcgaccaccccattctgtggggcgtggaggagaccaattacctgaaattctatctgtttcaggtggtttgatgaatacgattcgtatacttttcttataatattacaagtagttgcagaatatgacagaggagaccggccgcagcctgtttcccgaaaggagcatttatgaacaccaactggaacgaccccaattttcagggcttcggcggcaggcagagtcccttcgggaagcggcctccacggcccaaaaaggagcacaaggccatcggcacgcccctgagccgcaccctcatcaatctggcggtgacgctgatctttgcggcggtgtacttctatgtggtgctgccgcccatcaatttgcaggcggaggagttctatttcttcatgctgctgtgctgcgctgtgtactgcggctgcgccgtgctgacctccgggtttcagggcagcggggccaagggctactttggcttcgtgaagaagcagtgccgcatccccatgataatcgccgtggcgctggtagccgtggccatcgtgggcggtatcgtgggctggcaggtgatccgggccgggtcctaccgggatctgctgacggtggagaccggtgacttcgccaccgaggtggaggagatcagctatgaccagatccccatgctggacaaggactccgccgagaagctgggcaaccgcaagctgggtgagctgtcggacatggtgtcccagttcgaggtggcggaggagtacacgcaaatcaactacaagggccgcccggtgcgggtgacgcccctgcggtacggggactggatcaagtggttcaacaaccgctctgagggtctgcccgcctatcttatcatcgacatggtgacccagaatgtggaggtggtgcgtctggagcagggcatccgctacaccaccgccgagcacttcggccgcaacctctatcgctatctgcagttccactaccccacctatatctttgacaagccggccttcgagatcgacgagggcggcaatccctattgggtctgcccccggatccgaaaaaccatcgggctctttggcggcacggacatcgacggggccgtgctggtgaacgccgtcaccggggagcatcagtactatgacgccaaggatgtgccggactgggtggatcacgtctacacggcggatctcatcgtccagcagtacgactaccacggtacctatatccacggcttcatcaactccctgttcggccagcgggatgtcaccgttaccaccgatggctataactacatcgccatcggagacgacgtgtatatgtacaccggcatcacgtcggtggtgtcggatcagtccaacatcggcttcatcctctccaaccagcgcaccaaggagacacgtttttactccgtggccggcgccgaggagtactccgccatggattcggcacgggggcaggtgcagcagatgaactacaccgccaccttccctctgctgctgaacatcgcagatcagcccagctacttcatggcgctgaaggacgccgccggtctggtgaagatgtacgccatggtcaacgtcagccagtaccagatcgtggccaccggcggcagcgtggcggaatgcgagagcaactatcgccagatgctggcccggtataacctcattgacccggcggatacggagccctccgcttcggatcagggggaggtcaccggcgtcatcgctgacctccgcagcgccgttatggatggcaacacctggtactacctccagctctccgacggcacggtgtactacaccatctccgccgccgaggctccggaggccgtgatcctcaacgtgggcgacacggtgacggtgaagtatgccgagggcgagggcagcatcctgcaggcttacagcgtggccaaggccgtcccggcggcgtaaagcagaacacagaaaaacggcgtgaccttgcggtcacgccgttttttgttccaatgggaggcaggcttgctgcctgtcctatgcagccttgacgctccaaggctttggaagcagtctcttcgtaagctcagcgcttgctgaactgaggtgcgcgacgggctgctttgaggccgtactgggctgaaaaaaatcccgatttcccttgatattccaacacttttgaggatgtctcaactggacttagcccgtatattaacagaaaacatcgttaaaaacgggtattttcaagacattgcgacaggccgtaacgcagcgtttacgacagggagaagttcttggggcttattatacttgatttttgcataaatgtccatagttgttttactgtttttatgcccggcgagatattgcacggtcttggggtctacccccatatataagaggttcgtaatgtatgtgtggcgaagctggtgc

SEQ ID NO: 12370 - DNA, 523 bp, Unknown
  gut microbiota DNA sequence
caggccatcttctccgctgtactctctacatctgcccaccagccgccgccaatggtgccgtgatagccgtagctcataatgcggccgatctgccgctgcacctcacggggcgtaaggggatgcccgtcaggcaggctcaggtgatcccaccaggtatcgtcgtggtctgtgatggaatcgtagtttttctgcggtgcgccgggttcgatgcagtaagctacctcgccctgccaggagtccagacaccggaactgcgtgtagctggaagcccctacccggtagccaaaccgcaaattcagtacaccgtggccccagttaccgctggacttcaaggtatcatctgacaggggaaaattccagatatacacctgtttggatgcggcgaaggctgtggtaggcagcaggcataggcacagcaccaacgccagcagaaaagccgtcccgcacttgatgattcgtttcaaaatagacctcccgttcttaaatttgaatataagaaaagggctctcgacgagagcctttc

SEQ ID NO: 12371 - DNA, 170 bp, Unknown
  gut microbiota DNA sequence
aggcggttatcctccatggccttcttaaagcccttatccgccatctgcagcagatagggcagggtggcgttggccagcgtcacagaagcggtctgggagaaagcggaggggatgttatccacgcagtagtgcatcacgccgtccacgaagtagatgggatcatcatgggt

SEQ ID NO: 12372 - DNA, 56699 bp, Unknown
  gut microbiota DNA sequence
cacgatcagcttcatgcggtttcgtgccgcttcgtcaatcttagcgcaatactgtcttacatacacccggatgggccgcctctctgttttttggtccgcagatatatggcagcgaggaggctgccgccattatgcggtgcggtggctgtttctccgccggagcaccagcagcaggagcgccagaccggcgcaggctgccagcacgatcacccacagcgtcaggggtgcttcgtccccggtgggggcggcgggcagcttctcggtgacggtgtccgtctgccggagttcacggcaggcctgtgcatcggcaaagtacttgccgcaggcggcgcagtaccagtactcgatgttgccgggggcctccgtggtggcggccttggcctccacatggcgcagatcggcgtgacggtgggcgtccacgtcgccgtaggccccgccgcagacctcacacacggcccggtccacgcaagtggcctcgccgccggtgcagctctcggtttccggagcaccgcagccggagatggtgcaggtgcgggtgtgggtgtcgtcgccgttggagctccagtcgccccaggtatggccgtcgttgacggtgatctccagccgggactcgttgccggcgggatcggtggccgtcaccagctgcgtcccctcggcgggccggagcaccagccgcccctccgtcaactccacgggagtgccgtttacggtgacggtgacggggtatgcgtcggtgatggtcagggtcactgcggcgcagtacacgccgccgttttcagccccggtgatggagggggccgtggcgtccagcaccatgccgtcggagcggaggcaggtgacgttgcccgcccggtcggtgatgcgggcatagaccacatactcgccgtccggagccagcgccagcgccttttcatagggcaggaaggtctcctgctccagcgccgggatgtccagatcctcggcgctcagcagatactccgtggccgccacgccgctggtctcgtcggcagaggtgatgaccacagtctgctcctcccgatagaagaggtcgaaggtgatcctggacaggaaggactgccaggccgtccgctcgtccacccggatctcgccggtgggctgggtgcggtcgatgcggtactgctccgtcacctgaagggagatggcgccggtggccagatccttcacatagaaggtcagccggccctccgccgtctcgtcggtggcccgcagggtctgctgccacacgccgtcggcggtgtccgtcagggacaggagatagccctccgccgccgtcaccacgaagtcgtggttgatccagtcgttggagttgacggcatactcgccgccggtgagggcgtaggggaggatggaggcagtaatgccggtgggctgggtcagggcgtagttcccggcgtcagcgccggtgagggagaactcggtgaaacgaatggcgatgtcctctgccgtccggatggaggtgaaggagggagtccccttcaccagcgccacatggtcgccggacacggcattgcccagagtgggctcaccgtcgtactccgcccgatccgtgccgtcgtagagcttatcctgaatgtgcaggtcctccaccgttaccgtccggacggtgatgtccgccgtggtgccggcaggctgggaagccagagtgtagttttcggcggcgtcgccctccagcgagaagccggagaaggagacggtcttgccggtgccgacggtcttgccgtcgtaggcggcagagccggtgacgatgcggaggtcattgccgtcgaagttggcgctgagggtgccgcccgtcacgatggtggcgtcggtggtgccgtcataggtcttggagggctccacggtgacgccgtcgatggtgacactcttggcggtgatgcggaagttccgctgggcgctggcggaggcgtaatcatcgtcggccgccgccgtgacccggacggtgtagctgcccacagccttgggggcctgcgtggtgaactcgccgccctgcgcccggtattccaccgtgagagcgccggttccgagagaggtgatggcgggagtttccaccggctggccgttgtagtcacggctcacgtcatccagaatggcaacgctgccttcggccttctggacggacagggccacggaggtcatggccggtgcctcgctggcctcgtagcgggcgttgtaggccacgcccaagggggcgtaggtgacgtacagggtgtagtccccggcggccagcgcctgcagcgtggcggcaggcagggtcacggtgccgtcctcggcggcggtgaagcccgccagaggcgtgccgtccgccagctgcacgccggtgacggtgttgccgttgagggcgacgtggaaggagacatcctgtccgctgcgcttgacataggtgatctgccgggtatccgcctgagcgtcggtgtagaccaccacgccgtcggagttcagaacggtgatgttcccggcccggtccgtgacccgcaggtacgcatagcccttctggccgggctggatggagaagctgccgctgccgtcggtgagggacaggtccgtccagctgccggtgatggcgtcctgactggcaaagacggtgtcagacagcatccatgccgccgtgtccacgccgctgcccaggtcggagaccgttaccgtcacggtctgggtgctcttgaagaacaggccgaaggtgacggtgttcaggaactggcggaagggattcccggcgatggtcagctccgcctccggcggggtgatatccgccacgccggtgacggtgatggtcaggtcgccctccacgctggggatcaggcactcgtcgaagtccacatcgcccatgccgccggggggtctggccgttgaccagcagggagtaatccggcagcttggagtagccgggggcgatatccacccggaaccggtaatcctgcccgtggcggacggtggtctcgccggtgaaggtgaagcctgtgccggtgggcggtgtcacggtatagatccgatacaccgacaccgtgacagcggtgcggttgccggccacgtctacggccacgatctcgtgggagacgttgtcggcggggagggtgtacaggctgccctcggcggtggcgggctggccgtccaccgtgacggtgaagtcatgggcgtcggtgacggtgaaggtcacgtcgtcgtaataggtctcaccgtcggtgatgccggtgatgaccggggcgtcggtgtcctcatctgccacatggccgcagccgcacagcagcttctggttcagccagacgtactggtgctgggcatgggggaccacgtccacgccaccgacgatggggacatagccgttgatgatgccgccgtcggaataggcgcagccctccgccagaagggcggcgcaggggctgccatcgatctgcgtgatctcgccgaagtggccgccggtgagagcgccgcctccgccggactggacgttgacgctgccgaaggtgccggcgctggcgaccagcttgccgccatggttgatggtgacatcaccggtgaaggtaccgccggtgacggtgacggtgtcggagatggtgacggcgccgaggaagctgccgccggagacggaggagccgtcctgcagggccacggcaccgtagaaggtgccgccttcgatgcggttggacccgaagatgctggcggagttggtgtagctgccgccggagagggtgacggtggcatccttggccagcgtcaccttgccgcccagcatcacgccctgcgccgccgtcagcgtgaaggagccgctattgacggagatgggatcggtgctgctgcggagaaccgtgagggtgcagccacggtaggcatcggtccgggccaacgccagagcctccgacagggacaggtagtagccggtggagccgttcagctccacggaggcggctacctccgcacggcactggctgcaccgattgtcggcatccacgccggggtggtcacaggtcagctcccgtactgtcagaacgtcggtgcggacggaatagcccttgtaggagaagatgccgtagtactgggccggcccgtcgatgaaggtatagagggtgaaggggttctgccaggccactgcactgccgtagctcttgatccggtcgggatcgcccacctgataccactggaactcgatggtggggctgctctcggggatgtggaaggtgacctccgtgacgaagtccggccgatagccgacgggggtggtgggatagaggtccgtgtccacagggtaacgggtgatggtgaagggaggtgtggtgacggtgacgtcctccagatagcggagattttcctccatgaccacgtcaccggtattggcgtagctgccgtcggccttttggaaggtatagccctccgccgggaagaacagaggcgtgcgggaggtatcctcgccgctgtaagcgatgcgggcgaaggtgccgccggtgacggacagatcagcgctgtcggaggccagatacacccggttgaactggccaccggtgatggcgacatggccgcccagcaccaaaatggtgccgtcccgccacagcttaccgccaccctgactgtcgcagatggtgagactggcgtcgatcatcaggtcgttggagccggagagggtcttgccgttgagatccagcgtataggtgccggtggggaggcccatgctgccccagagggcatccctcagcagggtgatggcggagccctccagcgctgcggcatactgggcagcgtcctcaaagacggcgaagtagcggagggtatcatccttagccaccttggccaccatcttggtgccgcagatgcggcaggtgatgccgtcgatctcatcgtgggggcaggagaccacggcgacattttccagcgtgggcgtgatgtcactgcggcggatcagctggccgtccgcctgctgataggcagtgcggaagggcagagccgcacggggatatgcggcatcctccgacgtaatgcgggcgaaggtgccgccgaagagggtcacgttgtaggcctgaaggttcagcgtgttttcaaagcagccggcctccaccgtcaggcggccgccctttaccgtcagtgcctgaccggtgatcttgccggagctggtgctgtcacggatggtgaggtcgccggagctctgctccagcgtcatgggagccgacagggtcagggtgtggccctccagcgccagcacggctcttatgccgtccagagagaaggcatcggcaggcagagagacattggtcagcatgaccaccgacgtgaaacgggcgccgtcctcgtcggcatcggcggaggtcagcgcatcctccagatgcgggaagaaagcgtcgttccaccgggcctctgcctgaaggccgcagtgactgcacaggccggtatcgtcaaagccgtgaccggcgtaccactggaagtgaacggtggtgccgttgccggcctcgtcggtgacggtcagggtctgctgtccctcctgagagccggagacggcgctgaggcggaggacataccagccgtcctcggcggcgtaggtcatctccgtgccgttgagggtgacgctcttgagatggtcatcccggaaggcgatgcggagaccgtcctggcagtaaatttggttctcggccacatcggaggagatctccggggcggtggcgtccaccgtcaggtcatcggtgctgagataggtgacattgcccgcccagtcggtgatcttggcatagacgatgctggtctgatcgtccggcagggccacggccttgccgggatagggccggaactgatgggcaagatcgcctatcttgtcggaggtatagcgctgatccgtcaccagatactccaccgtcacggggtagagctcggggtcatagccggcgtggtcaacgctgtcatcggcagcctcgatggtgaaccgggcgccggtggggaagaacaggccgaaggtgacggtgttcaggaagtcctgccaccagttgttttcatcgatgatgatcttgccggtgggcgtgcgcaggtccttgaggggagtgccgtaggagacgccgcacagggagcaaaccggcagcgtaaagtagctgtccggcatctggccgtcgtgggggcaggcatagccacagccacagcagcccggccgtccgctgcggacgttgtgggtgtgggccaccacctgcacctcgccgctgagcgtataggtgccggaggagcggctgaaggagggctcggtacccagatccaccggcgtgccgtcggcgtgggccagcgcatagccctccttcagaatggccagaagggtggcggcgttggcctccgtctcgtggatggagtaggacaggccgttgtggaaggtgcctccggcgatggagacgtggggcgtctccgccggagcagaggcgtaggtgccggcaacccggccggtgaactcgccgctttcgatggtgagacgggcgccgtcgggggcatagacggaggcgctggtgtcgccgttggggggcgtggccccgatggcggtgacattggccagcgtcacatgggtgtcggtgcccagaagggtcagggcctgggccttgctgccgttgccggtgcagaggttctccagcgtgccgttttcgatgcggagctggccgccggtgacggtgacgacgccctccctatcgtcggaggtcttgcccgctatggtgtggttgtggaggtccagcgtgaaccgaccgccggtgatggtcaccaccgggtcgtggaccagaggctggccgtcgtcgatgagatctgtcagcagccgcagggtgcagccctgatgctcctccgtctgggcggcggtgaaggcttcgccggcggcggcatagcgctgggtgacggcaccgtccgtcagcagcacagcctcgtatacccgcttgccgcacttggtacacaggccggtatcatcgctggcgctgtggaggcaggcggctgcggacagggacagggccgccgtgccgtccttccggtattgcttgttggagaaggtgtagccatcggtgagggtgtcggcctcggcatcgtaggcggaggaggcggtgatctccggcaggaggccgccgtctgccagagcggtggcgtaaagggccatgttccggccggtgacgtagagactcaggggctgggcggcgtcctcggtattggtcatggtgagggtagagccggtgccgaggatccgcataccgtagctgcggtcatcgttggagacaccggctctggcgtagatggtgccgccgctgagctgggtcttggacttgttggagaccacgctgagggccgccagtgtcccggaactggcgttaggggtgtcgccggtggtggcccggagggtgccgccgctcatggtcagctcattgcttccgcagaagccgtaggcgctgtagtccagttcccggtccgtgccgttggcggtgccgatcagctcaccgccggtgatcttggcggtgccggtgcagtaaaggccgtaggcgttaaactggccgccccaggtctggtacgacgagtcggggctgccggagatgccctccagcttgccgctttccataatgagacgcttgaactcgacgcccacatttctggagctggtgcaggacacgccgccctgaccgaagacgcagccgtcggtgagagtgaagcggctgtcgcatcggacacccttggaatcgcccttgacggaggtgccgccgtagcccagcaccctggagttctctccggacacggtgagccagctgacggcattgaagccgacgctctcataggagctgttgacctgtccgccggtggcggtgacggtggcgccgttcttgacgatgatctcctcgccggcgaacacgccctgactgccgtactggtcactctcgccgcccatggccgtcagctgagtgccgtccagctccagcgcattgacggagctgtaatccacgtacaggccgtagctgtatcgactcagggcgtggcctgcggcggcggtcaccttgcccagtcccatggtccaggtgtcgccccggccactgccctgcttgtcgaagtacagaccatagctggcatagccggtgcgggcggtgagctgggcctccacggagctgccgtgggtggtgaggcggccccggaggccgacgctgctgccgtcgtcggcggaggcaaagtccggaccggtggcccggaggatgccgttatccagcgtgacgttggcgcagatggctgcgccctcggtaccctcgtcagtcttgagcacggcaccgccgtcggggttgtcatactccaccgtcagcgtgccggggatgaacatatccagcgtggcgctgcgccagccccggccatagaccgtcaggctgccgctgccgcgcagcttcacctcgccgctgctgtatacggtggatctgctgccgccggtgagggtgctggcggtaccgtcggccagatcgatggtggccccgtcgggcaggatcagcgcatgggtgctgtcgtcgctgaccgtcagggtcaggcccgtgagggtcagggtcttggtgctttgtgtccacgaccagccgtcgccggaggtatcctccgtgatggcggtcaggtccatgggagtggtcaccggcggcgtctcctgagccaggacctccatcggcagcatggataggaccatgactaccgacaggatcaccgacaggagctgctgcacggtcttactgcgcaagtgcattcgatcatctccttatcaattccatttgcctgcctgccggtatcggcagggcatattacaacatctacattctatcgggatgcctccgccgccgcaacggctttggcacaaacggttgatttgtgataaagagggcgatggacagaccatcggaatgcatataaaaacacggggtctgcggcagcgccgcagaccccgtgtccggaatgagaaggcttattcgtagattttggcggtctcctcgccacgcagcacccgcagagcgccctccgccagcgccagaagctcgccctcgccggggtacaccgtcaccggtgcgatccagctgacgtagcccttcagggcgtccaccgtctcctgaccgtgggcaatgccgccggtaaggatgatctgatccacctgccctttcatggcggcggccatagcaccgatctccttggcgacccggtagtggaaggcgtcgataacctcccgcaccttggcgtcggtggcggcccggcgcatcagctcctgcatatccgtggagccggtgtaggccagcagaccgccgttgccggtgatcatgcggcgaatctcctgctgggtatacttgccgctgaagcacagatccaccagtgcgccgctgggcagcgtcccggaccgctccggggagaagggaccctcgccctccagagcattgccggtatccaccacctcgcccttgacgtgagcacccacggacacgccgccgcccatgtggcagacgatgaggttcagggactcatagggcttgccgatctccttggcgtagcgcttggccacggccttctggttcagggcgtggaaaatgctgcggcgggtgatgagggggtggccggagtagcgggccagaggcgccagctcatccaccacggggggatccacgatgtaggaggggatgtgcagcgccgaaccgatctcacgggccagcaggccgcccagattgctggcatggtggccgtagggaccctttttcagggtgtcgatcatggcatcggtggtgaggtaagtaccgccgtggacaggcttgagaacgccgccccggccgcacacggcgctgaggctctccagcgggatatggtgctcctccagtgccttcaggaccagccggcggcggaaggcctcctgctggggaatggtttcgaactgggccagctcctcggcagagtggtgcaggttctcctcaaacagcatcttctcgtcgtcaaacacgccgatcttggtggacgtggagccgggatcgatggtcagaattctgtaagacataagacatacctcctgtatgcgtgtatcgtttgctctttttttaacgaatcgattataacaccggtcaaaacctccgtaaatggcatttttcaccattttgcagcacttttttgcaggaaatcctgtttattttttgcctgcatcgacaggcgggaggccgagcggcacttacgcctgcccggaggagatgtccagctgcaggaccacggggcagtggtcgctgccgtagacctccgtgcggatggcggcgtccgtcacgcagggcagcagccgccgggacacgatgaagtagtcgatgcgccaaccggcgttcttctcccgcgcgtggaagcggtagctccaccaggagtaggtgatctcctccgggtgaagggtgcggaaggtgtcggcaaagccgctttccagcagccgggtcattttcgcccgctcctcgtcggagaagccggggttttggcggttggtcttgggatttttcaggtccatctcctgatgggccacgttcaggtcgccgcagtacaccacgggctttttcccgtccagctccagaagatacgcccgcagatcgtcctcccactgcatccggtaggggagccgcttcagcccgtcctgactgttgggggtatagcagcacaccagatagaagtccgggtactccgccgtgatgacccggccctcgtggcggtggatatcctctccgaagccgtaggtgacggacaggggctcctccttggtcagcaccgccgtgccggagtagccttttttatcggcggagtgaaagtagcggtgatagccctccagatcgaacaccgcctgctccggctggagcttggtctcctgcaggcagaggatgtccgggtcctcgtttttcacatattccagaaagcccttggtcaggcacgaccgcaggccattgacgttccagcttaccagcttcataggggattcctcctgttttcggcgggattttctgatattataccgtgtttccgcgggaaaagcaacaaagcggttgacagaccgggcggcatgggataaactgaacgtgtctatcgtcccggcccgtggctccgtgcgccgctgcggcgctttttctttgcccggacgatggcggttctgtgcctgtaattttaagccgtccttccattcgggacggcggaaaaggagatatccacccatggaaaagaagaagttctatatcactacccctatttactacccctccgacaagctccacattggccatacctactgcacggtggccactgacgctatggctcgctataagcgactcaccggctgcgatgtcatgttcctcaccggcaccgacgagcacggccagaagatcgaggacaaggccaaggccgccggcaagacccccaaggagtttctggatgagatcgtggagggccccagagggatcctcgacctgtggaagctgatgaacatctccaacgaccggttcatccgcaccaccgacgactatcatgtggcctccatccagaagatcttccggaggatgtatgacaagggggatatctataaggggacctaccggggcaagtactgcaagccctgcgagagcttctggaccgagagccagctggtggacggcaaatgccccgactgcggccgtgaggtgacggatgccgaggaggaggcctacttcttccggctgagcaagtacgccgaccgggtgcgtcacctgctggaggacacggattttctggagccccggagccgtgtcaatgagatggtcaacaacttcatcaagcccggtctggaggatctgtgcgtcagccgtaccagcttctcctggggcatcccggtggacttcgaccccggccatgtggtctatgtgtgggtggatgccctgttcaactacaccacggcgctgggcttcctgaatgacaagtacgacgactatgagaagtactggcccgccgatgtgcacttcgtgggcaaggagatcgtgcgcttccactccatcatctggccggccatgctcatgagcatggagatgcccctgcccaagaaggtctacggccacggctggctgttgctggacggcggcaagatgtccaagtccaagggcaatgtggtggatccctatctgctggcggagaagttcggcgtggatgccctgcggttcttcctgctgcggaccttccccttcggcagcgacggcaatttctccaatgagctgctgatccagaccatcaacatcgatctggctaacgatctgggcaatctggtgagccgcaccaccgccatggtggagaagtacttcggcggcactctgcccacggagcggcaggagggcgagccggatacggagctgaggaccatggcctctaccctccgggatcgctatgaggcggagatggagcgcttccagttccagaatgcgctggagcaggtgttcaagaccatccagcgggccaacaagtatatcgacgagaacgccccgtgggcgctggccaaggatcccgccaaccgggtgcggctggctacggtgatgtatcatctgctggagaccatccgcatctgcgctacgctgctgacgccctttatgccggagagcgccgaaaagatcttcgatcagatcggcgcctgtgagggctgccgcacctgggagaaggccaacgtatggggctccctgcgccccgacgccacggtccataagggcgaggctctgttcccccgtatcgacgccgaaaaggcgctggcagagctggaggagctggaggctcagcagcgcaaggcggcgctgccggcgctggaggtggagccctacacggaggagaaggtggacttcgacaccttctgcaagtccgatctgcgggcggtgaagatcaagaactgcgagccggtgaaaaagagcgacaagctgctgaagtttacgctggacgacggctccggcacggatcgggtcatcctctccggcatccggcgttactatgagccggagcagctcatcggcaagaccgccgtggccattctgaacctgccgccccggaagatgatgggcattcccagctgcgggatgctgatctccgctgtccacaaggagcggggggaggagaagctgcacctgctgctgctggacgacgctatccccgccggcgccaagctgtgctgagacgccatatgatatcataataagtaacaaacaggcgggcggcccatcgggctgcccgcctgttatttatatgtgcttgtgcggggcattttccggtctgcggcagcaaaaaaccggcccgaagaaaaatcgagtcggaaggggttgacaaacgcagacacatttggtacaataagacgcttatattcggatagtggggccatattcccatctcatccgtaagtgtatgataccagctttcggcggaatttacaagcgggaacggcagaaaacaggcaactgacccgtgcgtatcacgacgaaggcggcgccccgtggcgggggagagcctgtgccggagacggcccctgcggaggccgggacaggcggcgtggatgtgtaagaggatgttaaaaagctaaaagaaaggcgtgagtgttgaagatggccaaggacaagtactatggcaagaccctgcgaaagaattttgccagacacgaggaagtcatggcgatgcccgacctgctggagatccagaagaaatcctacaagtggtttctggacaccggcctgcgggaggtgtttgcggacgtagcctccatcacggactatgccggtaatctggagctgagctttatcgattacagcatggacgagaagcccaagtatgacgtggaggagtgcaaggcccgtgacgccacgtatgccgcccccatgaaggtcagcgtgcggctgcggaacaaggagacgggcgaaatcaaggagcaggagatcttcatgggcgatttccccctgatgacccactccggcacctttgtcatcaacggcgccgagcgtgtggtggtcagccagatcgtccgctctcccggcatctactacggcaaggagatcgacctcaagaccgatctgcccctgctgacctccaccgtcatcccctaccgtggcgcatggctggagtacgagaccgacaccagcgaggtgttctgggtccgcatcgataagaaccggaagctgcccatcacctgcctgatccgtgcgctgggcctcaagactgacagcgagatcatggaccgcttcggcgacgatccccgcatcgtggtgaccctggagaaggacgcctgcaagacgtatgaggacgccatgctggagatctaccgcaagctgcgccccggcgagccccccacgctggactccgccgagaccctgatgcagaacctgttcttcgatccccggcggtacgatctgagcatcgtgggccggtataagttcaataagaagctgaccctgtggacgctggccaagggccagcagctggctatgccggtggccgaccctgccaccggagagatcctcttcgacgagggccacgtcctcaccggcgcagagtgccgggaactggacgccatcggcgtggcggaggtctccgtgaagctggacagcggcgatgtgatccgggtgttcaccaaccggatgtgcgacatgagccgctatgtggatttcgatcccaaggagtgctgcggcatcaaggagcgggtgcgcttcgacgtgctgcaggagctgctgagccagtacagcggcgaggaactgatggagcagtgcaggctccacaccgacgatctggtgcccaagcacatcatcgtggatgacattctggcctccatcaactatatgaatgcgctggctcacgggctggtcaccaaggatgatatcgaccatctgggcaaccgccgcctgcgctgcgtaggcgagctgctgcaaaaccagttccgcatcggctttagccgcatggagcgtgtcatccgggagcgcatgaccattcaggatctggatatcgtcacgccccagagcctcatcaacatccggcccgttacggcggccatcaaggagttcttcggctccagccccctgagccagttcatggatcagaccaacccgctggcggagctgacccacaagcggcgtctgtccgctctgggacccggcggtctgtcccgtgagcgtgccaacatggaggtccgtgacgtgcattacagccactatggccgtatgtgccccatcgagacgcctgaaggccccaacatcggtctgatctcctatctggccacctatgcacgggtcaacgagtacggttttatcgaggcccccttccgccgggtagagcatccctccggccgtgtcaccgacgagatcacctacatgaccgccgacgtggaggatcagtacatcgtctgccaggccgccgagccggtggacgagaacggctgcctcatcgggcctcgtatcacctgccgccatcaggatgagaccattcaggtggagccggagtacgtggactatatggacatctccccccgtatgatggtgtccatcgctacggctatgatccccttcctgcccaacgacgacgccaaccgtgcgctgatgggcgccaatatgcagcggcaggccgtgcctctgctgcggccggaggcccccatcgtgggcaccggtatggagcacaagatctgcctggactccgctgtggcggtgctggccgagggcgacggtatcgtcaccaaggtggacgccaccaacgtgtccgtcaagtatgacgccggcgagaccaaggactataagctcatcaagttcctgcgctccaaccacggcacctgcatcaaccagaagcccatcgtttccgtgggcgagcgggtccacggcggcgacgatcccacggtgctggccgacggccctgccacgcaggagggcgagatcgctctgggccgcaacattctggtgggcttcatgacgtgggaaggctacaactacgaggacgccgtgctgctcaacgagcggctggtgaaggaggatgtgtatacctccatccatatcgaggaatatgagatcgacgcccgtgacaccaagctggggcctgaggagatcacccgtgacatccccaacgtgggcgaggatgccctgaaggatctggacgagcggggcatcatccgggtgggtgccgaggtccacgccggggacattctggtgggcaaggtcacccccaagggcgagaccgacctcaccgctgaggagcgcctgctgcgggccatcttcggcgagaaggcccgtgaggtccgtgatacctccctgaaggtgcctcacggcgagagcggcatcatcgtagatgccaaggtatttacccgtgaaaacggcgacgagctggggccgggcgtgaatcaggtggtccgtgtctacatcgctcagcgccgcaagatccaggtgggcgacaagatggccggccgtcacggcaacaagggcgtcgtgtcccgtgtgctgccgcaggaggatatgcccttcctgcccgacggcacgccgctggatatcgtgctgaaccccctgggcgttccctcccgtatgaacatcggtcaggtgctggaggtccatctgggctacgccgccaagactctgggctggaaggtggctacccccattttcgacggcgccaccgataaggatatttccgaggccctgcagctggcgggtctggacccggagggcaagagctggctgtacgatggccgcaccggcgagcgctttgacaacaaggtcacggtgggctatgtgtacttcctgaagctgcaccatctggtggatgataagatacacgcccgttccaccggcccctactctctggtgacccagcagcccctgggcggcaaggcccagttcggcggccagcgcttcggtgagatggaggtgtgggcgctggaggcctacggcgccagctacaccctgcaggagatcctcaccgtcaagtccgacgatgtgacgggccgtgtccgcacctacgaggccatcgtcaagggccacaacgtgccgacccccggcgtgccggagtccttcaaggtgctggtgaaggagctgcagtccctgtgcctggatattcaggtgctggacgaggacggcaaccagatcgagctgaaggaggacgaggacgctctggataccttcaatctggcccggatggatgccgacgacgagcgccagaaccgctatgccgacgacaacgagctggcggatgcgggctttgactacgtggccgacgaggaagtggacgcttcctacgacggagacggggaagaattttaaggacaggaggagcagcatactatgagttacgcaacatttgacgccattaaaatcggaatcgcttctccggaaatgatccgtgagtggtcctacggcgaggtgaagaagccggagaccatcaactaccgcaccctgaagccggagcgggacggcctgttctgtgagcgcatcttcgggcccaccaaggactgggagtgccactgcggcaagtataagaagatccgctataagggcaagatctgcgaccgctgcggcgtagaggtcacacgggccaaggtgcgccgtgagcgcatgggccacatcgagctggccacccccgtcagccacatctggtacttcaagggtatcccctcccggatgggcctgctgctggacatcagcccccgcattctggagaaggtgctgtacttcgccgcctatatcgtcaccgatcccggcgagacgccgctggtgaagaaccagatcctctccgagaaggaataccgggatatgcgggagaagtatgaggatgacttcgatgccggtatgggcgccgaggccgtgaagaagcttttgcagcaggtggatctggagggcctgagccagcagctccacgccgagctgaaaaccgtctccggccagaagaaggcccgtgtggtgaagcggctggaggtggtggacgccttccgcctgtccggcaacaagccggagtggatggtcatcgacgtgctgccggtgatccccccggagctgcgccccatggtgcagctggacggcggccggttcgctacctctgacctcaacgacctgtatcgccgggtcatcaaccgcaacaaccgcctcaagcgcctgatggagctcaacgcccccgatatcatcgtccgcaacgaaaagcggatgctgcaggaggccgtggacgccctcatcgacaacggtcgccgtggccgtcccgtcaccggcgccaataaccgtgccctcaagtctctgagcgatatgctcaagggcaagcagggccgcttccgccagaatctgctgggcaagcgtgtggactactccgggcgcagcgttatcgtggtcggccctgagctgaagatctaccagtgcggcgtacccaaggagatggccgtggagctgttccgccccttcatcatgaagaagctggtggaggatggctccgccaacaacatcaagtccgccaagaagatggtggataagggccgcaccgaggtgtgggacgctctggacgagatcatcaaggatcaccccgtgatgctcaaccgtgcgcctacgctgcaccgtctgggcattcaggccttcgagccggtgctggtggaaggtcgtgctctgaagctgcaccccctgaactgcaccgccttcaacgccgacttcgacggcgaccagatggcgatccacgtccccctgtccgccgaggctcaggccgaggctcgtctgctgatgctgtcggccaacaacctgctgcgtccgcaggacggcggccccgtcaccgtgcctacgcaggatatggtgctgggctcctactacctgaccttcgagcggtttgaaaacggtatgtgccagatgaccaatgacgagttctggcccgagggcatcgactttgcgctggctggtaagagctatgacgagctcaccgacgaggagaaggagcagaaccgcctcaacgtctaccgggacgaggacgaggtgctgatggcctacaacgagcacatcatcggcatccaccagcccgtgtgggtgcgggtggagaagaaactgggcgacgagacgctgcgccatgtggtgcgggcgactcccggccggatcatcttcaaccgcaacatcccccaggatctgggctttgtcaagcgcttcaacgaggacggtacgccctccgataagttcttcgactatgagatcaccgagacctgcggcaagaagctgctgggcaagatcgtggaccgcaccatcaagcagtatggctttaccatcgccgccgaggtgctggacaacatcaaggccaccggctataagtactccacccgtggctccattaccatctccattgcggatatgacggtacccgagaagaagtactccctcattgccgagacggagcagcgagtggtggatatcgaggaccagtacaacatgggcttcatcaccgacgaggagcgctacaagctggtggtgcgtgagtgggaaaagaccaccaacgatgttaccgatgccctgaccgccagtctggataagtataatcccatcttcatgatggccgactccggcgcccgcggcagcatgaagcagatccgtcagctgaccggtatgcgtggcctgatggccaacaccgccggtaagaccatcgagatccccatcaaggcaaacttccgtgagggtatgtccgtgctggactacttcacctcctcccgtggcgcccgtaagggtctggccgatacggctctgcgtaccgcagactccggttatctgacccgccgcatggtggatgtgtgtcaggatgtcatcatccgtgaggatgactgcggcgtggacaagggcatcgtggtgtccgagatcagcgagaacggccaggtcatcgagaagttctccgagcgtgtcaagggccgcttcccggtgcgggatatcctgaagcccggcaccgacgaggtgctgatctccaaggatcacatgatgaccgaggacgacgccgccctgctggagaagtttgatatccactccgccgagatccgcaccgtgctgacctgcaaggcccacagcggtatctgcgccaagtgctacggcatgaatctggccacctccaagccggtggggcccggcgaggccgtcggcatcatcgccgcacagtccatcggtgagcccggtacccagctgaccatgcgtaccttccataccggcggcgtggccggcggcgacatcacccagggtcttccccgagtggaggagctgttcgaggcccgcaagcccaagaagatggccaccctgtcggagatcgccggtaaggtccgcttcgaggatgccaccaagggcagcctgctgaacatcatcgtcaccgccgacgacggcgatacccggacctactccatgccccacaccggtctgcaggtacgggacggcgaggtcatcgagaagggccgccagctgcaggacggcgcactgaatccccacgatgtgctgcgaatccgtggcgcttcggcggtgcataactacctcattcaggaggtcctgaaggtgtaccgtcagcagggcgtggacatcaacgataagcacatcgaggtcattgtccgccagatgatgcgcaaggtccgtgtggaggacgccaacgacgccaccggcctgctgtccggcgccatggccgacgtgctggaggtggaggacgagaacgccaaggtgcgggcccgcatcgccgccggtgaggtcaacgccgagaccggtgagccgctgcaggaggccacctatacccaactgctgatgggtatcaccaaggcatctctggccaccgattccttcctgtccgctgcctccttccaggagactaccaaggttctgaccgaggccgccatcaagggcaaggtggaccatctggtgggcctgaaggagaacgtcatcatcggtaagctgatccccgccggcgccggcctgaacgcctaccgccatttcgctgaggagttggtgcctgaggagggcgctgccgacagcgtatccatggaggagaacatgcctgcggaagagcctgccgccgagacggaggagtaagcgatccctatcataacgtactgaaaagagcgccctgcggggcgctcttttttctgcccggaaacggagaattttcccgatgggctgcgttggtccatttccggggaattggtcatttcgacggcatagcggaatctaaggccggaaaaacgtagaaaaattccgccatacggaatgaacgcttgacgcagaccggcggagacggtatgatagagaaaaatatccgccggagaagggagagcaccatgatctactataccgccgatctgcactttcactatgcactgctgcttccctcccggccctttgccaccgtagaggagatggacgaggcactggtgaaaaactggaacgacaccgtgggtccggaggacaccgtctatctggtgggagacatcggctggaacggcggccgggtgccgggagagctgctggagcggctgtcgggccataagcacctgatccgtggcaaccacgacaccggctatgaggacgccgggcggctgtaccgctggttcgagacggtgacggacttcaacgagatcgacgacggagagacgcacatcctcctgtgccactatcccatgctgtaccacaagcggggctacatgatccacggacacctccaccacgggcggggccgggactatgagctgctgcggcagctgccccgtgtgctgaatgccggagtggatgtgaaccgctatcgtccggtgacgctggcggagctggtggagaacaaccgggccttctatgccggggagcgggacgatgaggtgccgccaccgccgcctatggagcgagggctgcccggcagcttgccggggaagccggactttcggcccatcccccggcgaaaggaggacgtatgatgccgcaggaaaagggaagcgtgcggtcgctgggcaaggcgctggagctgctggagctgctgaaccggagccgggtccccatgacccttcaggcgctgagtcaggcctccggctaccccaagagcaccatccactcgctgctggccaccctgcggagctacggctgcatccggcaggagtcggatggccggtactacctggggacaaagctgttcgagtggggctgcggcgtgtccgctgcgtgggagatcacccgctgcgcccgtccctatttggagcggctggcccaacagactcagtatacggccctgctctcctgcgtggagggcagcaacatcgtggtcatcgaccagcgggtcagcggcacagggatccatgtggcctcggagatcggcggccgtacgccccttcacgccacgtcgcaggggaagctgctgctgtcccagttgccggatgccacggtgcgctatctgatgaacggccagggcatggatccctttaccccccataccatcgtggacctggcgacgctgacggaggagctggagcgtatccgccagtggggatatgccatcgaaaacggcgagtacaagatcggcctgcggtccgtgtcggctccggtgttcgacagggaggggcagatgcgctatactctgacggtggtgggcctgtttcgccatgttgcctccggggagttcgaggaggcggtggacatggtctgcgccgccgccggaaagctcagtcgggagctgggctatcatgcgtagagcgttccgccatacggaattatgttctgctttgcgaaaaggctattttcttttgccggggcagatggtaaaatagacttacgatagaaaagactgccgccatggtgcggcgctcttttcggcgagcgtgatatgcaaatgaggataacggaggaaaagcaatgaagagaacgagtggaaagcggtggatatcgctggtactggcgctgtgcctgtgcctgctggttggctgcggcggcaagcagacgggctacgaccccctgaagggggtggagacccggatgatcaccgactccgccggacggcaggtggagatccctgccgagatcacccgcatcgcacccagcggctccacggcccagatgatcctgatgccggtggcctatgacctgctggtggggctcagcagcagccccagcacggcacagatgccctatttcccggaggagatgcggtatctgcccaccttcggccaattctacggcagcaaggccagcctgaatatggagtccctcatcgccgcccagccccagctcattatcgacttgggcgacgccaaggacagcatcgccaaggacatggacaccattcagaagcagacgggcatccccaccatcttcatcgaagcggatctggatgatatggcggcggcctaccggacgctgggggacattctggggcggcaggagcaggcggaggaactggcgcagttcattgaccgcactgtcaccatggcccagaccaacgccgcaaaaatcccggagtctcagcggctcaaggtgctcttcggcaccggctccacgggccttgcctgcaacgcagccgggtccgtacaggcggatgtcatcgaccttgtgggggcggtgaacgccatcatcccggaagaagttaccaaccggggcggcggtaccaccgtcagtctggaggaggtatacgccgtggagccggatgttattctgctggcctccggcggcccctacgataccctgacggaaggggactgggcgggcctcaccgccgtgcagcaggggcggtactacgagataccgggcctgccctacgactggatgagttccccgccgtcggtgaaccgggtgctgggcatctggtggctggggaatctgctgtacccccagctgtatgactacgatatgacggctgtggcacaggagtactaccggctgttctggcactatgacctgtcggcggaggaggcggccgggatgctgagccgatccaccctgcggacgtgaccccatacggggaggagaacctgcgaggaagaagtgcagtatccgcctgcggcggctgaccctgtggcggctggtctgcctgacggcggtatgcctgctgccgggaagggcggaggccggcggcaagccctccgccggagggacagacccctctgcccccggcggcagtcaatccgatggacagaccggcccgcagggcggcaccaccatcagcggcggcgcacgggtgctgtatttcaaaaaagagagggacgaataaatgagcaccttgtttcacaatatcctgcgggcagcagccagcgccatggagattccggtggtgatctgcctgctgctgttggcgttttccgtgttttctctgggctggtggctggcggagcttctgggagagcggcggcatatgaacgccagtctgccccggctgctggaggccatgcgaagcggcgaaaggcccctgccggactgcatcgccgctctgcgggagagtctggcggtcaacctgctggaaaagcggggggaggtgtactacgatgccaggaccggcacctattacatcgtccccaatgcggcggggaactgacccatggagaagctgatgaccgggaggacctaccggcggcgctttctcctgctgggcggggtgtgcctgctgcttctgctgggctccatgctggtggggcgctatggcctgtccgtagacaaactcctgcatatgctgtggacaaggctcaccggcggcgctgcggactggtccgtcagcgacgagaaggtggtgttcgccatccgtctgccccgcattgcggcggcagcgctggtgggtgcggcgctggccgtctccggcacggcctatcagggaatgttccgcaaccccatggtgtcgccggatattctgggggcctccaccggcgcaggcttcggcgcagcgctggctatcctgctgggggccgggtatttcggcatctccctgtccgccttctgcttcggcctgctggccgtggcggcggcgtggctggtgagccgtctgtctcgctcagaccccacggtggcgctgatcctggcgggtatgatgatctcctccctgttttccgccgggacctcctttatcaagctggtggcggatacccagcagcagctgcctgctatcacctattggctcatgggcagcctcagctccatcaaggccgaggatgtgcgctttctggtgctgccggtggcggtgggactgctgccgctgtttctcctgcgctggcggatgaacctgctgacggtgggggaggaggaggcccagtccatgggcgtgcggacgggggtactgcgtctggtggtgatcctgtgcgccacgctgctgaccgccgccagtgtggcggtgtccggcatgatcggctgggtgggtctggtgatcccccacttctgtcgtatgctgttcggctacgactaccggcggctgatcccggcggcggccctgtttggagcggctttcctgctggcggtggatgacatcgctcggctggtgaccaccggtgagctgcctctgggtatcctgacggccttcgtgggagcgccgctgtttctgtatctcatcatcacgggagggcgacggcatgagcattgacgtggagagactctccttttcctacggcgctcacccggtgctgcgggatgtcagcttccgggccgagcccggacagctggtggcagtgctggggcccaacggagcggggaagagtagcctgttccgctgtatgctgggctttctgccccactatcaggggaacatctccctgtgcgggcgggacgtgcggcatctgccccggcgggagctggcccgcctggcggcgtatatcccccagtccagccagccgttgttcgactacaccgtccgggacacggtgcttatgggcgccgccggagggctggagcctctgcggcagccgggacggcagcagctggagacggcgcagcgcatgatggagctggtgggcatcgccccgctggcagaccggggcatccgccgcatttccggcggcgagcggcagctgaccctcattgcacgggccttggcccagcaggcgaggatccttctgatggacgagcctgccgccaatctggattacggcaaccagtttaggctcctgcagcaggtgcgccgcctgacggagcagggctacacggtgcttctgtccacccacaatccggagcacgcccttcgcttcgccacccatgtgctggccctccacggcggcacggtggcggcctgcggcccggtggaggagatgctgacggaggagctgctgcacaccctgtaccgtatccctctgacggtggcgcaggtgccggtcaccggtgccacggtccgcagctgcgtctatgacccggccaagccgtgaagctgtatatcatgtcctgtggggctgcatacaaaaattttcagagaggaaggaacctgcacataaagcaacacaggaagcgtgtatcggcgctgctgctgactttgtgcatggtgctgagttggtgatgccggtctcggctctggacggacaggtgcaggaagagcagcgggaaggctatgacgttgccaccatccactatacggacggcgaaggcaatgagcgggccatcccccttaccgagacggcttccggctacgccgataccctgccggagggcgtaacggaagagcaggtcatggtggaatacttctccaccacccgctgggacggggcagtggatctctcgtggtataacgggacggataccgagttcaccatcaccactgcccggcagctggcgggtgtggcggcgctggtcaacagcaatgccgccgacttcgccggcaagaccatccgcctgggggcggacatctccctgctgcggtatgaggagacgggcaagccgggtgggacttcccggcccacccagccggagaaacccactacgcccgataccccgccaccggcgacagcagcaatgtgaccgccctgtgggttgtgttggctgtggctggcgtgggcattatcgtgctggtggtgctgcttgtcactaagcgcaagaataagaaggactaagcttcatcgggagaaagccctgcggcccacacgggccgcagggctttcctgcccccgtctgtgccgaaggggaggagattttgcgccgccggagcctttttcctattgtgcatctgccgccgacatggtatgataatatcagtaatgagcaagggtaaacacgcctgacagcttgtccttccggcgattttacgcttcgtctcggtgggcatcggcctgccggggcgtctctatccggtaaaactggcggctctgccgcctctaaagcataaggagagcgaaaaactatgaaattaggtattgtcgaaagcgagcctgtttctgaaactctccgcaaacgcacaaatgccgataaagcttgataggacaggtattttcggatgaagtcaaaacataaaagttcctatttccctaggcatccccacacagaaatggcgtaaaaatggcgtagaggaaccgacgatacgcagttgcgaaaatcgcctgctgcaacattgctaagaatattcaagctgccctgcgcaccggcgcagagagatacaaggcatttcgctcctttgatcctccaaataaaaatgagccttctccgtttgatatagaaacggaaaaaactcatttgcattgtacacgcctgtcaagcggcgcagaactttggcagcgctatgcctcatcctccgccagcatacggtatccgacgccaagctcgttgatgatgtagcgcttttcaccgggcgtcacgcccattttcttgcggatgttcttcatgttgacttgcagcttcttgacgctgccatagtccgaatacccccagaccgcccgaatgatggcggcatacgtcagcacctttccggcgtgaacggagagaaacgccatgatgttgtattccgtctgggtcaggtcgatctcctctttccctacaaaaacctgccgtgtatcatagtcgatcagcaggtcctgaagttggaattttccgccgggggaactttccttctcttcgctgtgccgatggctgcggagaacggcacggatgcgagccagcaattcctccgtgccaaagggcttggtgatataatcattcgcccccagatccagcgcctccaccttgtccctctcgttggagcgggcggagagcacgatgatgggtacggtgtctgtctcccgaacttcttgaatcaagctcataccgtctcgatccggcagaccaagatccaaaaggatgaggtccggatgatgggaggcatacatcatcatgccaagctcgcaggtttccgcacagagcacctgatagtcgctggtttccagattggctttgataaagcttcggatgttggcctcgtcctctacgattaggatcttgtacttgttattgcccatcgtcctcaccccctctttccagagcaaagcggaataccgcgccgccgcccttcctattttccgcagtgatctcgctgccgtgcgccttgacgatggcggcgcacacggatagtccgatccccatattgctgcgggttccgtccaccggcgcggcggacttttcataacttccggtgaaaatcttttgaagtgcatcatccgggaggccgcagccgttgtcggcaacctcaaataccgccttatcccccacaagagaaacggaaagcgtcagttccgtcatgccttttgcgtggaatacggcattttccagaagattcagcagtacctgctcaataaggagcgaatccatgggaatgtccacaaattcctccggtatctgtgtgatgaccttctgattcggatactttttggaaaacttcatgagaaccgagtcaatcagttcatccagaaccgtgggtgtcttcacgacttccactttcgcgccgtcgattcttgtgaccgacagaagattttcaaccatgcggatgagccattcgctgtcctcctgaatttctcccaacagcttgagctgctgctcctttggcagtgcgtcatacttggagatcagcgtggaggaggacccgtatatagaggtgagtggtgtgcgcagatcatgggaaatcgcccgcagcagattgccccgcattcgctctttttcattctccgtccgcagcttttcctgatcccgaatgcggctgttcagcgtactggtgaaaacggcaactgccagcataatgacggcagataagatgctttcccccacgaaaaagtcgaagacataatagggataggtaaaggcaaaattcaccgcaaatacgctgacgattgccgaagtgatgccatagcaatacccgtgggttttcagcgagatcaaaaacacgccgaacacaaagatcatgggtaccagcgtctgcgtggtaaagagcttctgaatcagcaaattgacggcaaaggcactgcaaaaaataaggatcgaaaatagagtgtccttttgtcgctgtcgattcttcatcatgcttctcctgaaatttattgcggcatcatacgccatgcttttcggtttcgggcgaagcccgggagaaaaacggcttaaatccagtggtataaataactgccagcagttattatatcgcataagcggaagcgcttcaagatttctcacaggaggatattgcgccgcactcgtttctttaccgaatctacaccgggaaaatgctatcatataagcacacagcgaaaaggagaaagaaatccgtggaaaatgacagtagcgacgataacggtaactgctcttatatggtctgttcgtatgtggcatatctacgccctttgctgcggtatcgggtataggtgtgtctttttgcatgaaatgatcgtatgaacagaacataaaggagtctgaaatgaattattttggaagcattttcgcaatggtggcctgcatcgccatgtccgcctatttcagcgccacagaaacggcattctcgtctctgaataagacccgcctcaaggtgttggcggacaatggaaacaagcgggcagcgctggcgctcaagctgtccgaagattatgacaagctgatctccaccatcctgatcggcaacaatatcgtcaatatcatggtggcgtctatcggcacacttctgttcgttgggctttacggcgacatcggtgcgacggtttctacggtcgtcgtaacgatcgttgttttgattttcggtgagatcacccccaaaagcgttgcaaaggacacgccggaacgctttgccatgttcagtgcgccctttatccggctctggatatgggtgctgacgccactgaacttcctgttctccctgtggaaaaagctggtttcccgcttcttcaagacagatgacgatgcaaaaatgtcccacgaggagttgcttctttttatgcaggacgtggagcaggatggcggcattgacgaaaacgagggcgaactgctgcgcaatgctcttgagttccgtgacctgacggcggcagaaattttgacccatcgaatcgacttggaggccgtggacatcggcgaaagccatgaggaaattgccagagcctttacgcagtcccgcttttcccgcctactggtctaccgggataccatcgatcagatcgtcggcgttcttcatcagaaggacttctatatcaacggcaagatgacggatcagcctattgcggagatcatgacggagccgctgtttgtctatcagcacacaaagatccgggatattttgaaaatgctccagcatcagaagtcccatgtcgccgtagtcgtggacgattttggcggaacgcttggtattgttacgatggaggatattctggaagaactggtcggtgaaatttgggacgaacacgacgaggtggaagaagattttgaaaagctggacgagaatacctaccgcgtggactgctccgtcagcttggaggattttatggaattctttggcgtcaagctggaatcggacagtgtttccgtcggcggctgggtcatggagcagctgaatagagtccccagtaagggcgattcctttaccgctcagaatttggagatcacggtctccgatctgagtgcgtacagggtatccttcatcacagtcaggcaatgtggcgtctgtttggcctgcgaacaataaagcagtcgcacgattcataaggggtgaggatgatgtcggaagaaatggtttgcagaaagcgccgcctttcgtcttttcaaattatcatattgggctttgctggggtcattctgctcggagcgctgctgctgatgctgccgctttccacaacagccgggtgcgtaacgccatttcatgaagcgcttttcaccgcaacctctgcggtttgtgtgacgggtcttgtggtgcaggataccggcagctattggtcggtctttggccagacggtgatcctgacgctgattcagataggcgggctcggtgttgtcactgtggcggcatcgtttgcgctgctgtccgggcgaaggatctctctgatgcagcgcagcaccatgcaggatgccatctcagcgccaaaggtcggagggatcgtccggctgacacggttcatcctgcgagggacatttctgatcgaactgatcggtgcgctcgccatgttgccggtgttttgccgggactacggatggcacgggatctggatggcggtatttcactccatctccgccttttgcaacgcagggtttgacattctgggaacgaaccataatttgtatccgtcccttaccggttatgtccaaaatccggtgatcaatatcacggtcatgctgttgatcgtgattggcggcattggatttctgacgtgggatgacatctttgaaaacaagtggcatttccaccgttatcgaatgcaaagtaaggtcattctcgttacgacactcacgctgatcgtccttccggcgctgtttttcttctttgtggactttgatgcccttcctctcggaacgcgggttcaggcagccctgttccaatcggtcacgccgagaacggcgggcttcaacacagtcgatctacccgccatgtccggcgcatcgctgggcgtgatgatccttctgatgctcattggcggctctcctgggtctacggcaggcggcatgaaaaccaccacgctggcagttctgctttccaatgctgccgcgaccttccgccagcgggacagcgctcaattctttgggcgcagagtcgattgcagcgccgtcaaaaccgccgcaaccgtcctgacgatgtaccttgcgctgttctttggcggaggcgtttttatcagcgtatacgaggatctcccgctgtcctcctgcctgtatgaagcagcgtcggcggtaggcacggtcggactgacattgggtattacgccgcagctgcatattccctcgcaaatggtattgatcgcgctgatgtatctgggcagagtcggcgggctgacactcatttatgcagcggtgtccagcaagaaagccggcaacgcaaagctgccgcaggaaagaatcatgattggataagcaaaggagcatctatcccatgaaaaatgttttattgattggagcaggccgcttcgggcggcatatcgccatgcagctctctcaactggggcatcaggtcatggcagtcgataccaatgaggaacgggtcaacgatgtgcttccgtttgtcaccaacgcacagatcggcgacagcaccaatgcggagtttctgcgttcgctgggtatcggaaattttgatgtttgttttgtgaccatcagcggtaattttcagaactcgctggaaaccacctcgctgctgaaggagctgggtgccaaatgcgtggtatcccgtgccgagcgtgatgtgcaggcaaagtttctgcttcgcaacggtgcagaccatatagtctacccggaaaaacaggtggcaaaatgggcggcgatccgattcactgccgaccatattttcgactacatagagatcgacgagcagcacgccatctttgaagtgcaggtgccggaggcgtggatcgggaaaagcgttggtgagctgaacgtccgcagaaagtttggcatcaacattcttggcatcaaacgagccggaaaaacggatgtttccgttacgccggacaccatattgtccgatgacattacgattttggcattgggtgagtataaagccctgcaaaagtgctttcggatttgacgggactccccataccgacggaaaggaaatacatggagaaaaaaccacaaaacacagccagtgacagaaacgaggatcccgcgccgcagggaagcaagtggccggacaagacgaacattcgctatattgcccgcacgctggtgctgctgatcgtattcgcatgggcgctggtaaaccttgacgctgttttacggtttctcggcaaggtgcttgcactgttcactccgtttctgatcggcggtgcgattgcttttttgatcaacgtagtccttcgaccgttggaatgctgctggaacaaggtgtgccgcaaaactcctgcaaagctggtccgccctgtgtgcctgacggcaagcaccgtacttgtccttggaattctgtttgccgtggcgtttatgatgatccccagcctgcgggaatccggcgaagagtttgtccaaaacattccgctctatgtggaggagatcgggcggtggtggacaggcgttgtccagtttgccgcaaaatataatattgtcctgcccgaatacaccatagactctgacctgttgatcgagaagctcaccgccttgatcagcgatgagggaagcggcatcctcaccgtaacgtgggacgcagcaacctccgtcctatccgttttggtggatgttcttttgggctttgtctttgcgctgtatctgcttgcaaagaaggaagtcgttgcggcacatttgaaaaaactcgttgtgacagtccttccgcaaaagaaggcgcagcggctgctgaggatcgcctctctgaccaaccagacatttacaaattttgtcagcggtcagcttaccgaagcggtcatcatcggcgttctgtgcttctttggaatgctgatccttgggatcccgtatgccggtgcggtctcggcgtttgtggctgttactgcgctggtgccgattttcggcgcatggctcggcggcggtcttggtgcgtttttgatcctgctggcagaacccggcaaggctctgtggttcattctctttttgctcgttttgcagcaggtggagggcaacctgatttatcccaaggtggtcggtaagtccgttgggcttcccggactgttggtgctgatggcggttacgatcggcggcgaagcattcggcatcttagggatgctgttcagcgtacccgtctgtgctgtgttgtacagtctttatctggagttcatgaagaaagcaagcgcccggcactgaatgattcataatcggataccttctgagcatcgggctgtatgccaaatgcaaagggcttgggatactcccaaaatcgccgtgtgtccggacagcggctgtgcttgctgttctctcaaatctcaatattcgcagatcgtgatgtccccgctttttcgaaagcggggacattttttcctctccgatacttaaaaaacggcagaaaaatatccgttgtatagtagaaggctttttgaaaatgtcgcacatctttttccggacaaaaggcaaaaacatgtccgtgtgttatatggaaggaaaatttttcgcgctaccccctaatttgcaagaattttgtccgttgtaaagtgagaggcaaccactcgtgaggcaaaaccgtgactctccgcatcattttgcccgttggaaagtagaaagggcaatttggagcagcgcacagagattgtttcgccgtttccgaaactttttcaagaaatctgggacaaaaccggaaaatgtgtccgttggttaagcaccacgaaaggagaattttccatggacaacattctcaccgtccccatccaccacaaaatgacgctgaccgccagagaagcagcggagtacagcaacatcggcatcaacaagatcgacagtatgctccgctcgcccaactgccccttcgtgttgttcgtcggcacaaagaagctggtcaagcgccgggagtttgaagagtacatcagccaaaagctggtgatctgacggcaaaagataatttgtaaaaacagcttgagagaaaagaacctatctgctataatcatgtcgttgcagtaggctcttttctctatgcgacgaagcaggaatcgaaaaattctgtatgcacgatttacgccatacctacgccacaagagcaatcgaaagcggtatgcagcccaaggtgctgcaaaagttgctgggtcatgccagcatcaagactacaatggatcggtatgttcatgtgactgccgaatcgctggattatgccatcaagcaatttcagcaaaatggtgtagtctgatgaaatccaataaagccaaatgcgaaaatggcgtaaaaatggcgtaagccaaacacgccggattccggaagcccttgaaaatcaagacattttaaggagagcgaaaaactatgaaattaggtatcgtggggctgcccaacgtgggaaagtccactctgttcaacgccatcaccaacgccggtgccgagagcgccaactaccccttctgcaccatcgaacccaacgtgggcatggtggccgtgccagatgagcggctggacaagctggcggagatgtaccagcccgataaaaagacccccgccgtcatcgaatttgtggatatcgccggtctggtgaagggagccagtcagggagcgggcctcggcaacaagtttttggagaacatccgccgtaccgacgccatcgttcatgtggtgcgctgcttcgatgacgagaacatcatgcacgtggtggccgatgccggtaccaacgtaccggtggacccgctgggggacatcgagaccatcgacatggagctgatcctggcggatctggagatggtgaaccgccgggtggagaaggccgccaaggccgccaagggcgacaagaagttcctccacgaggcggaggtgttcaaggcactggcggagcatctggacgccggaaaatccgcccgcaccttctcctgcggcgacgacgaccgggcactggtggagacctgcgacctgctgagcctgaagcccatcatctacgccgccaacatggacgaggcgggctttgccgaccacgagaacaaccgctacttccagctggtgcgtgatctggcccagaaggagggcgcacaggtgctgcccatctgcgccaagctggagcaggacatcgccgagctggacgatccggaggagcgggccatgttcctggaggatctgggcatcgaaaagtccggtctggaccggttaatccagtgcagctatgatctgctgggcctgatctccttcctgacctacggcaaggacgagtgccgggcgtggaccattcgcaagggtaccaaggccccgcaggcggcgggcaagatccactccgatatcgagcggggcttcatccgggcggagaccatcaacttcgacgagatgatggcctgcggcggcagcgtggccgccgccaaggagaagggcctgctgcggtccgagggcaaggattatgtggtcaaggacggcgacatgatctacttccgcttcaacgtataagcatgacctgcaagggacacggcctgccgtgtcccttttttatccccggccaattccgccgtttacaaaggacggtttttctgatatgataatgcatatctatggactatccacgcacaaaacaaagggagaacgtcctccccgtgcggatagagcgcgccctttttatgaaaggagacaactgttatgaaccaagagattcagtctattctggccaaggtagaccacactctgctggcccagagtgccacttggaacgagatcaaggccatctgcgacgacggcatcaagtatggctgcgccagcgtgtgcatccctgcctcctatgtgaagcgggcggcagagtacgtggacggcaagatcgccatctgcaccgtcatcggctttcccaacggctatgacaccaccgccgccaagtgcttcgaggcggaggacgccgtgaacaacggtgcttccgaggtggatatggtcattaacatcggctgggtgaaggacggcctctacgatcaggtgctggaggagatccgggccgtgaaggccgcctgccacggcaagctgctgaaggtcatcatcgagacctgtatgctcaccgatgccgagaagatcgagatgtgccgtgtggtgtccgactccggcgccgagtacatcaagacctccaccggcttcggcggaggcggcgccacccgtgaggatgtggccctcttcaaggcccatgtggccccccatgtgaagatcaaggctgccggcggcatcgccgacctcaacgacgcccgtgacttcgtggcccttggggccgaccgtctgggtaccagccgcattgtcaaggccgtgaaggccatggaacaggaataaaaggaggaaccatctatgcctactccccataataacgccgcccccggcgcctttgccaagaccgtgctcatgcccggcgatcccctgcgctccaagttcattgccgagacgtttctggaaaaccccgtgctggtgaacaacgtccgtggcgtgcagggctataccggtacgtacaagggcgtgccggtgtccgtcatggcctccggcatgggaatgccctccatcggcatctacgcccacgagctgtacacccagtacggcgtggaaaacatcatccgtgtgggctccgccggagccatgcgggccgatctggagctgggcagtgtggtggccggacagggtgcctgcaccaactccagcttcgccgaccagtacgagctgggtgtccactatgcccccattgccgacttcgatctgctgatggccgccgtggagtcggcccgtgagctgggtgtgaagatgcctgtgggcaacctctactcctccgataccttctatgacgccgccggccgcaacgcccggatgcagaagatgggcgtcatggccgtggagatggaggccgctgctctgtactgcaccgccgcctatctgggcaagcgtgcgctggctatctgctccatcagcgacaatctggtgctgggtaccgagcttaccgccgacgagcgccagaccaccttcaccaatatgatgaagatcggtctggaggcagcggtgaaaatggcccaataaagtcggttttgcagccgaaacatcagtttttctgaaccctgtcatggtgaaaaatgcagcagaccctgcaaatagggcttgcccttttctgtcatatctgttataatgcacctgaacgggcaagctttgcccgaataaatgaaggaaggtagaacaatcatgaaaagagttctcgctatgatccttgcgcttgtcatggctctggctctggttgcctgcggcaacaagaacacggacgatggcaagaaggataacccggatgacaacaagacccccaccgtcatcaccaaccccgataaggttcaggatgagatgacctcctccgacggcaagtacgaggtggctttcgtcaccgacgtgggtcagctgaaggataagtccttcaaccagggtacttacgacggcgtgaagctgtacgccgccaacaacggcctgtcctacaagtactatcagcccgccaacggcagtgaggccaccgatgatgaccgcttcaccgctatgaaggccgccgtggacaacggcgccaaggtggttgtctgcgccggcttcatgcagaccaatgctctgcgtatggccgcttcccagttcaccgatgtgtcctttgtctacattgatggcgatgtcattcgtgcggatgctgaggataaaaactccgctatcctgaccaacgtggccggcgttgccttcaaggaagagcagtgcggctatctggccggctatgctgccgtcaaggaaggctacaccaagctgggcttcaccggtggtggcggcggcgacaaccccgcctgctgccgttacggctatggcttcgtgcagggcgccgatgccgctgccaaggagctgaacgagaaggtagagatgaactactcctggcagtatggtgccaacttctccgcttcccccgagctgcagaccatggccgccggctggtatcaggctggcactgaggtcatcttcgcctgcggcggttccatgttcgcctctgtcgccgctgctgccggcgctgatgagggcaaggtcatcggcgtggacgtggaccagtccttcgagtccaccaccgtgatcacctccgctatgaagggcctggccgactccgtgcagtgggctctgggcaagttctatgccggtgagttcgcctccatcggcggtgtccagacctctctgggtgccaatgagaacgccgtgggtctgcccactgctacctggtccctgaccaagtggagcgttgatgattacaacaccaagctgcaggagatcaaggacggcaagatcgccatcgacaacaactacgacaatctggccagcaccgagaatgtcactctgaacatcgtcggctaagcctctgcgtgtcgaactccacagcgcccgtgctctgcacgggcgctgttttttgctccaaagccccggatgcctcccgtggagatttgcggcatcccgcttgtcaaccggcggccgtcatgctataatttccccaagaagccgggaggggggagcacacatgggactgcacgacgggcatcgccagcgcaagcgggagcgcttcctgaagcagggagccgacggtctggcggatcatgaggtgctggagctgctgctgtactatgccatcccccgccgggacaccaacgagctggcccaccggctgatccagcacttcggtacgctggacgctgtgtttcaggctccgccggaggcactgatgcaggtgtccggcatcggggagaatgccgccgtgctgctgaatctggtgccggcggcccaacgctgcgcccggcgcagcgtctccgccgagcgcatcctcaactccgtggagcgctgcggtgcctacttcatggacctgctggatggtcagcgccgggaactgctgtatcaggtgtgtctggacggcaagggaaaggtgctttcctgcaaatgcctgtcccaaggcagcgccgatatgacctccctcagcatccggcaggtggtggagaacgccctgctgtccggcgccgcaggcgtggtgctgggccacaatcaccccagcggcgtggcgctgccctcggcggaggaccgggctgccactctgcaggtgcgggacgctctggccaccatggacatccgcctgctggaccacatcatcgtggccgacggtgatttcgtctccatggaggccagcggccttctgtacggctgacccactcaaagaaaattcccccagcgccccgctccatccggagcggggcgctgccatgttttccctccacaaaatcagaacatttgtttcaaaattcatatttacatatgggatttttgtggtaaaataaagtgatatacactgaaattgcaggaggcccattccatgccccagttcaaagttatttcggaatataccccctccggcgaccagccgcaggccattgaaaagctggcggagggactggagaacggcctgcgccagcaggtgctgctgggcgtcaccggcagcggcaagacctacaccatggccaaggtcatcgagaaggtgcagcgccccacgctggtgctggcccacaacaagacgctggcggcccagctgtgcgaggagttccgggagttcttcccggaaaacgccgtggagtacttcgtctcctactacgactactatcagccggaggcgtacatcccccacacggataccttcatcgagaaggacgccgccatcaacgctgagatcgagcgcctgcgccacagcgccacggcagccctcttcgagcggcgggacgtcatcgtggtggcgtcggtgtcctgcatctacggcttgggggatcccatcgactacgccaacatggtcatctccctgcggcaggggaaggagtacccacgggatcagctgctgcggaagctggtggagatccgctacgaccgcaacgacgtggccttcgagcgcaatatgttccgggtccggggggacacggtggagatttacccggtgtacgccaacggctacgccatccgggtggagtttttcggggacgagatcgaccgcatttcggagatcaaccccgtcaccggtcaggcccagcgggtactgcagcacgtggccatctaccccgccagtcactacgtcaccaccaaggagaagatggagcgggcggtgcaggagatcgagcgggagctggcggagcgcaaggcctacttcgaggatcacggcaagctcattgaggcccaacgcatcgaccagcgcacccggtacgatgtggagatgatgcgggagctgggctactgcaccggcatcgagaattacagccgggtcatctccggccgggagccgggttccccgcccaccacgctgctggactacttcccggaggactttgtcctttttgtggacgagagccatgtgaccctgcctcaggtgcgggccatgtataacggcgaccgggcccggaaggagagcctggtggagtacggcttccgcctgccctgcgcctatgataaccgccccctgaagttcccggagttcgaggagcgcttccgtcaggcggtgttcgtctccgccacaccgggggagtacgagcgggagggagccgaccagatcgtggagcaggtgatccgccccacaggcctgctggatccccgtgtggaggtgcggcccgtcaccggccagatcgacgatctggtggaggagatccgggtccgtgccgcacgggacgagcgggtgctggtaaccaccctcaccaagcgcatggcggaggatctgacggaccacatgaagggccttggcctgcgggtgcggtatatgcactccgacatcgccaccatccagcggatggagctgatccgggacctgcggctgggggagttcgacgtgctggtgggcatcaacctgctgcgtgagggactggacctgccggaggtatccatggtggccattctggacgccgataaggagggcttcctccgcagcgagaccagcctcatccagaccatcggccgggccgcccgcaacgcagagggactggtggtgctgtacgccgataccgtcaccccctccatgagggcggccatcaccgagacagagcgccgccggaagaagcaggacgcctacaacaaggcccacggcatcgtccctcagaccatccgcaagagcgtgcggaaggtgctggagatctcccattcggcggaggaggaaaagaccaccgcccaccgcaagctgacggacgccgagcgggaggccaccatccgccggctggaaaaggaaatgaaggaagccagcaaaatgctggaattcgaatacgccgccctgctgcgtgaccagatcatcgagctgcggggtcagaagtaaaaggaggcgttatggcccatatacccaccgtggatatccgccaactgggggatatctcctttgaccgccaactggcgctggcccagcagcccaaccgggactacgacgtggaccagtggctgttcgtccccaacacctacaccgagtaccggtacattctgggtacacggggggaaaagcctctgatctgcgtgggcatcaacccctctaccgcccggcccggtgcgctggatcccaccctgaaaagcgtggagcgcattgcccgcaacagcggcttcgactccttcatcatgttcaatgtctatgcccagcgggccacctcccccgacgatatggagcacacctgcaacccggagctgcaccgggagaatatgcgggcctttgcctacattctctcccgcacaccggatccggtggtgtgggcggcctgggggaccatcatcgagaagcgggactacctgtggccctgcctgcgggatatgatcgccctgggagaggccgccggcgcccggtgggtcacctgcggcaagcgctctgcggcggggcatccccatcaccccctgtacctccgggcggacgccgtgccggagcccttcgacgtggcggcctacgccgctgcgggggagacccgtgctgccgctgcggcccatggccgtcgccgccgggtatgaggaggggagcgctatgacggagaagcgtgccgggctcagcgccatgaccctgaaatacatcgccatggccaccatgctggtggaccatatggggtacgtcctgtttccgtggatcctgtggctgcggtgcgtggggcgcatcgcctttcccatcttcgcctttcagatcgctgagggctgcatccgcacccatgacaggcggcggtacgccctgcggctgctgctgtttgcggtgctgacggaggtacccttcgatctggccttcaacggccaagtgctgtacctcggctaccagaatgtcctgtggacgctgctggccggggcgctggtgtgctgggcggcggactgggcgcagaggaccccggacgccctgcaccttctggcggccacggcggcgtttgccggagccttctggctgctggaggtctgccatacggactacggcggctggggcatggctctgattttgttgtttcacctgtcccgtgggaaccggctgatccagctggcgggactggcggtgttctgtgtcgccggcgtaggcggcgtcagcatcgaactgtacgcactggtgagccttgccttcatctggctctatgacgggcggcggggctattgcagccgccccatccagtggctgtgctacgcattttatcccgttcacctgctgctcctgtggctctatgcccggacggtggacggcatatggtatttgacataaggagatacatcatggcaaagcataaagaggaaaagaccaacgtcatgcgggtgctggatcagaagaagatcccctataccgcccacacctacgacccggagagcggcatcgacggcgtgtccgtggcccgttcgctggggcaggatccggcatcggtgttcaaaacgctggtggcccgtggggccagcggcggttactacgtgttcgacattcccgtggctgccacgctggacctgaaaaaggccgcccatgccgtgggggagaagtccgtggccatgctgcctcagaaggagctgctgcccctgacgggctatgtccacggcgggtgcagccccgtgggcatgaaaaagctgttccccacggtgttccatgagacggcggcgagcctgcctgtcatcatggtgtcggcggggaagctggggcaccagatcgcctgcgaccccaaggcactgttggcgctggtgagggccgatacggcggatatcatcacggagggatgacggatgcagctgcgttttatcgacgagcacaatgaccggggccacctgctgtgggcggaggagccggtggggttggccctgcggggcgagacgcagcaggcggcgctctccaagctcccggcggagctgacggcctatcgccgctggctgggtctgccgccggtgccggcggtgggagttgtcacgcaggaggcggccagccctctcaacgtccacgatgccgacagcgacattctgctgccctccgagcaccgccccctgacggcggaggagtatgaagcactgaaggcactggccctgcggtcggcggaggacttcctgacgctgtaccgctccatccccgacaagacacacactaccctcccccagcgggagaccttctacggggacgtccccctgacggcggaggagatgtaccggcacacgaaaaacgtcaacgcctactacttcggagagatcggggtggaggtcggcaacgagccggatatcctcatctgccgccgggcgggcttcgccgcactggagcgacagccccggtaccttcacaatgccgtgttccacggcagctatgacgaggactggacactgcggaaggtgctgcgccgctttgtgtggcatgaccgcatccatggccgggccatgtggcgcatggcctgcgccctctgcggcagccgccgggtggccgacccctatcgcttcgcataaatcggagatcaacaggagaaaaacaccatgcaggatcatatttatatcaagggcgcacgggagaataacctcaagaacatcgacgtcaccatcccacgggacaagctggtggtgctgacggggctctccggcagcggcaaatcctcgctggcctttgataccatctacgccgagggccagcgccggtatgtggagagcctgtccagctacgcccggatgtttctgggccagatggataagcccgatgtggactatatcgacggcctgtccccggccatttccatcgaccaaaagaccaccagcaagaacccccgctccacggtgggtacggtgacggagatctacgactatctccgcctgctgtgggcccgcatcggcaccccccactgccccaagtgcggcaaggagatccgccagcagaccatcgaccagatcatcgaccagatcctggccctgccggaggggactcggattcaggtgctggccccggtggtccggggccgcaagggcgagcacgccaaggtgctggaggatgcccgccgctccggctatgtccgggtgcgggctgacgggaacctctatgacctatcggaggatatcccgctggagaagaacaggaaacaccacatcgagatcgtggtggaccggctcatcgtccggcccgatcttggccagcggctgacggactccgtggagacggcgtcccacctctccggcggcatcgtcatcgtgaatctgctgcgggaggagcaggatctggtcttttcccagaactacgcctgtgacgactgcggcatcagcatcgaggagctgacgccccggatgttctccttcaacaacccctacggcgcctgccccacctgcacggggctggggatgcagctgaaggcggaccctaccctcatcatccccgacgacagcctctccattctggacggagccatcaccgccagcggctggaactccatccgctccgacggcatcagccggatgtacttcgaggccctgtccaagaaatatcagttctccctccgaaccccggtgcgggagctgccggagtccgtgcggcagatcatcctctacggcaccggcggcgagaagctggagctgcactatgaccagccccgtggcaagggcgtattataccagcccttcgagggggtggccaacaatctggagcgccgatatcaggagactcagtccgacgccagcaagcgggagatcgaggagttcatgtcccaatgcccctgcccggcctgccagggccgccgcctgaagccggaggcgctggcggtgacggtgggtggcctgtccatttggcgggctacggagttgccggtggatgaggagctggccttcttcaacggcctgaccctgacggagacgcagcagctcatcgccgcccagatcttgaaggagattcgctcccggctgggctttttgcagtctgtgggcctcagctacctgaccctgtcccgctccagcggcaccctgtccggcggcgagagccagcgtatccggctggccacgcagatcggcagcagcctgatgggagtgctgtatattctggacgagccatccatcggcctgcaccagcgggacaacgacaagctgctggccaccctctgccgcctgcgggatctgggcaataccctcattgtggtggagcacgacgaggacaccatgcgggccgctgactatctcatcgacatcggccccggtgccggagcccacggcggacaggtggtggccgctggcacgccggaggaggtcatggccgatcccaatagcctgacgggccagtatctcagtgggaaaaagcgcatcgaggtgccggccgcccgccgtcccggcaacgggaaatttctgacggtgcggggcgcacgggagaataacctgaaaaacatcgacatctccgtgccgctggggaccttcacctgcgtcaccggcgtctccggcagcggcaagtcctctctggtcaacgagatcatctataagcggctgggtgccgagctgaaccgcatgaagacccaccccggcaagcacaccgccatggagggactggagtatctggacaaggtggtaggcatcgaccagagccccatcggccgcacgccccgctccaaccccgccacctacaccaacctcttcaacgacatacgcaatctctttgccgccacgcaggaggccaaggcccgtggctacgggccggggcgcttctccttcaacacccgtggcggccggtgcgaggcttgctccggcgacggtctgctgaagatcgagatgcactttctggcggacgtgtacgtcccctgcgaggtgtgccacggcaagcgctataatcgggagacgctggaggtgaagtacaagggcaagagcatcgctgacgtgctggatatgacggcggaggaggcgctggccttctttgccccggtgccgaggatcgccgaaaagcttcgaaccctctgcgatgtgggactgggctatgtgaagctgggccagtcctccaccaccctctccggcggcgaggcccagcgggtgaagctggccacggagctgtcccgccgtgccacgggccgcaccttctatattctggacgagcccaccacgggcctgcactccgacgatgtgaagaagctgctggaggtgctgcagcgtctggtggacgccgggaacacggtgctggtcatcgagcacaatctggatgtcatcaagtccgccgactggctcatcgatctgggcccggagggcggcgccgggggaggaaccctcgtctgcgccggtactccggagacggtggcggcctgcgaggcctcgtacaccggccagtatctgaagaagtatctgttctgactgtctgcgccggttgcggcggcggagaaaatgtgataagctggcatcgagacacctgccctcccgtcttctgcatacaatgggatgaggtgatggcatggaactgatgggagacggcctcattgcctttttggcggcggtgggcgtgagcaccatcctctggctgctggcagagacgctgctgcgccgtcataggccggtggcggaggctatattggtgctgccggtccggggcgacggggccacgctggagcgggctctgcgcctgaccatggagcagcgcacgacgggggagacccccattctgctggcggactgcgggctggatgagacgggcctgcgtctggcgcagggcctgacgcagcgatacagccgggtgcagctttgcccggcggaggaattggaaaattatctgaagtgaggaacgagctatgggtgagcgctgcacggtggagggaaccgtccaacacgttatcttccagaatgaggagaacggctatacggtgctgggcctgctgacggaggagggcgagctggtgacagtggtgggatgtatcccctgcgtggcccccggtgaaaagctcaccgccgacggcctgtgggtcagccacccctcctacggtcagcagttcgccgccgagacggtggagcgtctgatgccggagacagaggaggaactcatcagctacctctcctccggcatcatcaagggcgtcggccctgccacggcggagcggctggtggagcggttcggcggcgagacgctggctgttatcgaggaggagccggagcggctgagcaccgtcaagggcatcacctccaagcgggccatggagatctccgccgccttccgggagctgacgggactgcgccgggtcatggagtttctggcccggtacgagctgccggtggaactggccatgcggctgtaccgcacctacggagctgatgcgctgccccgtctccgggcggacccctatctgctggcgggggagcgctacggcgtggcctttgccgatgtggacgagatcgccctgagtatgggcttcggcggcgacagtccctgccgcacggaggcggcggtgctgtacgagctggagcacaatctgggcaacggccatgtgttcctgccccggcccaagctgctggcggccacggagcagctcatcggcgccccgccggagctggtggagcaggccctggacacattggagagccgtggcgccgtggtggaggagcagatcgcacgggtggatgcctgctacctgcgccggatgtatctggcggaaagcgagacagcccggcggttgctggccctgcgggatgccccccggccacagggtcggggcgtagagaagctgatccgggagatggaggagcagcagagcatcgcctatgcccctcagcagcgtcaggcggtggagttggcggcccgcaccggcgtgctgctgctgaccggcggccccggcaccggcaagaccacctccacacggggcatcgtggcccttttcgagggcatgggccttcaggtgctgctgctggcccccacgggccgtgctgccaagcgcatgagcgagctgtgccgccgggaggcccagaccatccaccgggcgctgggtatgacctataacgagctcaccggcgagacggtgttcaagaaaaacggcaaagagccgctggaggccgatgccgttatcgtggatgagatgagcatggtagacctgccgttgatgcaggcattgctggaggctgtgaagcccggctgccgtctggtgatggtgggggaccccgatcagctgccctccgttggccccggcaacgtgctgggggatctgctgcgctcccatgcggtggccgccgtgtccctgacggaggtgttccgtcaagcggagcagtccgccatcatccgcaatgcccacgccgtcaacagcggccgccccccggagcttggcagcggccaaaacgacttctttttcctgtgccgccgggccccggatcgtctggtgcagacggtggtggacctatgccgcacccgcctgccggacaacatgggcatccccgccgatcagatccaggtgctgtcccccacccgccggggcctcaccggcaccgtgagcctgaaccgggcgctgcaggcagctttgaacccccctgccccggacaagcaccagaagacgtggggggagctgaccttccgggagggggaccgggtcatgcagacccgcaacaactacgacgtcctctggcagaaggacgacggggaaatgggcaccggtatcttcaacggcgacgtgggggtcattcaggaaattgaccccggcggcgagctggtgaccatccgcttcgatgaccgcaccagcgtctataccccggatctgctgagccagctggacatggcctacgccatgacggtacataaggcgcagggcagcgagtatcgtgccgtggtgctggtcagcgcccctgccgccgcatctctcatggtgcggggggtgctgtatactgccatcacacgggccagagagctgctggtaatggtgggggacgatgtgattcccggaaaaatggcggaaaacgacaggcaggcccggcgatacagcggcctgcgccgcagactcatgcagggaggtggcagcgatggcgcttcaggatgatctaaaccggctgcaaaagcagctggggaattttctctttccccggaaatgtcccttctgcgggaccgtcaccggcggccgcctgctgtgcggcagctgcgaaaggactctgccctataccggggagaacgccctgcgtcaggggaccttcgggcggtgcgcctcgccgctgtactataccggccccgtccgggaggctatccttcgcttcaaatttcagggccgcaccggcggtttggactgcttcggccgtctgctggccgactgcgccgcccggtggtatcccggcgagtttgacaccgtgacgtgggtgccggtgagccgcaagcgcctgcggcagcggggctttgaccagtcccgcctgctggcggccagcctgtgcgtggattggcacgtggccccggtggagaccctccgcaaggcggtggacaaccccgcccagtcggggcttaccgatgccgagcatcgccgggccaacgtgctgggagtctacgaggccctgccggagaacgtccgggacaagcgtctcctgctcatcgacgatatcgtcaccaccggctccaccctcaccgagtgcgtccgggtgctgcgggaggccggggccgccgacgtggtgtgcctgacgctggcccgcaccgaggaggagcactgattaaggggaatgcggcctgcggcgagacaccgccggtatggaaatgccgcaaacggcgcacaatagcaccgggacttgtctgcggcgggatgtgatttcctaaaaaactgtgaacatttgtttacgaagccataaaaccgggaaaacactcttgcaaaatgcggaaagcgcctttataattgtagcttagagaagaatcggctgcctgcagccgtgtcccataacagaagaaaacgaggtgcagcgtatgtgttcattggcaaaggatatcgggatcgatctgggtaccgcatcggtactggtctatattaagggtaagggcgtcgtgctcaacgagccgtctgtggtggccatcgacaagaataccggccgcctgctgaaggtgggcgccgaggctcaggccatgctgggccgtacccccggcaacatcgtggccatccgccccctgcgggacggcgtcatttccgactacgatatgacggagcggatgctcaaggagttcatccgcaaggtcaccggcggcttccacctgttcccgccccggatcatggtgtgcgtcccctccggcatcacggaggtggaagagcgtgccgtcatcgacgccggccgtcaggcaggcgcccgccgtgtctacctcatcgaggagcccgtggcggcggccatcggtgccggcatcgacatcaccaagcccgacggccatatggtggtggatatcggcggcggcaccagcgacattgccgtcatcagcctctccggcgtggtggagtctgcctccatcaaggtggccggcgatcagttcaacgagtccatcgtcaaatatatgcgccgcaagcacaatatcctcatcggcgagcgcacagcggagcagatgaagatggagatcggctgcgtctatcccaaggaggaggaggccaccattgagatcaagggccgctgcctgatgacgggcctgcccaagaccatcaccgtcaactccaccgagatgatggaggccttcgaggagccggtggagcgtatcctggaggcggttcacaacgtgttggagcgcacgcccccggagctggtggcggatatctccaataacggcatcgtcatgaccggcggcggcagtctggtggacggcttcgacaagctgatcaccgcccgcaccggcatccatacggtggtggcggaggacgccatctcctgcgtggcggagggtaccggcaagagtctggactctctgggcgatatgcaggacggaacagtgaatctgtcccgcagaagacagatgaactgagaagcattgactttgcaccgaaaagcagagcttcggctctgcttttcctgtaaccgggccgggggcggaacccctgtcccgcagcatcagaaaaggaggagtccccatgaagttttccagcaaagtgcagaaatgcggcctgtcgcctatgcgtaaattccacccctatgcggtggccgccgaggccaagggtcggaacatttatcacctgaacatcggtcagccggatatcgagacgcccaaggcgttcttcgatgccgtccgtagctttgaccagccggtgctggagtacgcaccttctcccggcgtccccgccctcatcgaggccatccgggactactatgctgcgctggatatgcacttcgccgctgaggatatcctcatcaccaacggcggctccgaggcgctccagatcgccatgaactgcattctcgacgacggcgacgagatcctcatcccggagcccttctaccccaactacaacaccatggcccgcacctgcggcgccgtgatccacccggtgtccacctccccggaagaggggtacttctacgccgaccgccgccgcatcgaagcagagatcaccccccgcacccgtgccattctggtgaccaaccccggcaaccccaccggcaccgtcctgacccatgaggagatggagatgctggtggacgtggcccggcagcacgacctgttcctcatcggtgatgaggcataccgggagtttgtctacgccggggagcctctccagtccttcggtgagttcatccatgcagcggagaacgtcatcctcatcgacacggtgtccaagcgcttctctgcctgcggcgcccgcatcggctgcctcatctcccgcaaccgggagctcatggcccacgctatgaagtatgctcagtgccgtctggcggtgcctacgttggatcagttggcctccgccgcattgtatcaggtggggccggagtatttcgccgccgcccgtgaggagtataagcgccgccgtgacacggtggtccgcaagctccagcagattcccggcgtggtctgtaaatgtcccaagggcgccttctatctgatggccgctctgccggtggacgatgccgacaccttccagcagtggctgctggaggagttcgaggatcacggcgataccgtcatgttcgcccccggtgagcccttctacggcactcccggcaagggcaaaaatgagatccgcattgcctacgtcctgaagcagcaggatctggagcgtgccatggatctgctggcgctgggtatccgtgcctatcagcagcgataaagaaccacagccggagcgtttcgctccggctgcccttccgtcaggaaagcgaggatatgatgatgtttcaaggctatgaccagcagacggtggattttctctggggcatccgcttcaataacgaccgcagctggtttcaggatcataaagagcagtaccagacccatctgctggcccccacccgtgcgctgggggaacagctctacgacggcctccatgccatgctgccccatgagccgctgatactgaaggtcagccgcatctaccgggatgcccgccgcctccatgggcagggaccctataaggatcacctatggctctgtgtccgcaccggcgatcaggactggaccggccgccccaccttctactttgaaattgccccggactattacagctacggcatgggcttctggtgtgccgccccggccctcatggccctgtaccgccagcgcatcgacgccgaccccaagccgctggagaagctggtgcgccgctttgaccgccagcagaccttccggctcaccggcccggagtatgcccgcagcaagggacaggtgtccgacctcctgcgcccgtggtatcagaaaaaatccctgtccctgcaatgcgaggccccgctggacgagcgtattttcagcccccagctgccgcaggagattctggagagtttccgggagctgctgcccttctaccgctgctttacagatctctgcgccgctctgtcccgtcaggaggggaaggacgaatgaataaaagcccggcagaccttcggtctgccgggttttttgcggagcggtaaaatgcagtaaaaacccccggaatttgcagaaagtacttgaattctgtcaagcacggtgctatgatacaactatcaagcgtgcggccaaaagcccgtgggctttttatcgtttctaagaaacgataaagggtgttcaaagggcgtgtcattctgaggaagggcgcagccccgacaggaggatccgtatcccttttgcggcgtcccgctacaaaagcctgccagccaagagccccacacgcaaaaaataggaggagatacttatgacaaaccgcaagagcaccaaacgggccttgctgggcagcgtcatggccatggttctgtgcctggctatgctagtaggcgctaccttcgcatggttcaccgacaccgcatccaccggggtcaataagatccaggccggtaagctggatgtggcgttggaaatgaaggatgccgctggccagtgggtctctgccgagggcaagacgctggacttcgtcaaggctgctgcgggcgagcaggttctgtgggagccgggctgcacctataccctgccggagctgcgtgtcgtcaacaacggcaatctggccctgaagtacaaggtgaccatcaccggcatcaacggcagcgccaagctgaacgaggccatcgagtggaccatcggggatgtggcgatgggtgccgaacagcacctgaaggccggtgagagcaacgagttcaccatcaagggccacatgaaggagtccgccggcaacgagtacatgaacgagtccatcgacggcatcgccatcaccgttgcggctacgcaggacaccgtggagaacgacagcctcggcaacacctacgataaggatgcgaagtatccgattgttgccatggatactctccaggagttgattaataacgccactgaacctgtgtctgcgaagctggaaggcaatattgctggaagtcttacggttccccaggataaagaggtcacgctggatcttaatggctttacgctgaccggcggcgactcccatgcgattttgaaccatggtacgctgtgcataaaggacagcagtggcaatggaaagatcgttgcgtcaaaagctaatacatctgcgcttcgtaacgctgctgtttgcgtgatagacggcggtaccttcacccgcgcggctggggtggacaacaagtggcacactgtggaaaactttggtaccatgaccttcaacggcggtaaagtgattgctgaagacggtcaatcatttgccattgtcaacggttggaattatataaatcccggcgaacaaaaagctaccatgacgatcaacaacatcgaaatggaggccggtccaaacggttttaaaaactgcgctggtggcactctgacaatgaacaatggtacattacattgtaccggttactggggattgtccaatgactcaaccggtgttgcaacgattaacggcggcaaaatcatttctgacaaatacgttgccatttccaacggcggtgcaaagatggagatcaacggtggtacatttaccggccctcagggaagcctttatgtgcagaattatgcgcagggtacagtcgtaatgggcggtagctatgggaatgagacagtggagtttatgcggaattattgtcctgaaggctatacagctacgcttaaagacggtatggttgtcgtaagcaaggattgattattgtataagtccaaacccctttccaagtcctctcactcctcggagtgagaggcaatcaaagggcatatcgtcgacacaagctttgtatctttccgcccgccgtaagcggcaggcgtcaatcacggtgctgtgtctcctctccccaacaaaaccgctttgcttgttttgtcggggaccccggatgaatatgccttttgattgcctatacaaattccatcaaaaactgagcgcaatgcaatgaaggtgtaccccgtcttcctccaccgggcgaagcacgcagcaaaggaggtgcagaaaccatgggtttctgccggcgttctttggaaaccacctcgctgtatccgccacaggcggatacagcgaggtggtttcggggaagtgtcccggtttccatgccacaacgtggctggagatcggctgacacgacggtgtagactttctgccgctattggcagaaagctacccaccggagacaaaatataaaaaacgcccc

SEQ ID NO: 12373 - DNA, 5503 bp, Unknown
  gut microbiota DNA sequence
aagggccagttctttttctgccatagggttcaccagtcccgttcccggatggcctcctcggtgtcaataggaatgccaaaccactccagaatgtaggccacggttgccgcgatacattcccgtgccaccgtttcgatctcgctgtcgtgctcgtcaaactcctcctggagatcattgatgccgcagaccgcctcatccagcgtttcctgcaccacttcggtatcggtttcgccgttctccagcaggtcgatgaccttctgaagctcgtcctttaccttgtctaccaaaaaagcaggatagtaattgtcctgatacatctcgtccagcagtttgtaattggggtcaaatgctttcatagggattgctcctttctcattcaaacatcaagccgtatgattcggtcaagctgccatcatcctcatggaaaatacactgatacagaggctggcgctgtgttgctttgcggaatcgctccagaaccggagccagcggctcaccagtagggatgccgagggcatcagctacccgccgccagctgtccatatccatatcttccaagttacagttgcgctgtctctgcccatactcctccagtgttttggaatccacatactgctttgcatcacagtagtcgtgccagcagatacagctcacaagcagggaaaagagatcatccatgctctcagccagacggccagcctccccttcgctgctgtaatatccaatggaaccatcttccaacaggtggtattctccgccggagccatctctggcaaaggccatgccgggcattgaaaaggtgcatcggccttccgcgtcatcccgcggggacaactcatccagcaggaagaagtcaaacagcgaatcaaattcatccgccaaatcagggttttcgtgcaatatcttcaaatagtccatagccgttttcctccgtttacggttcttgggtcatttcgtgcagccgttccagccacagcgtttcttcgatcatctcatcattctggtaaaaatggtctttgtcgcgggccagatgatcagcaagtggagccgcgtccagaggggtacataccacaaaactgtcccgatccgcccccttgatctctcggttgaggtagtacacccgcttggcatcgcgggaataccagtgactgagcaattcccatgagggcagatccgccttgggaagctgcttaccgtaagcatagatccgtttctcgtccctggcaaaataggtgtcgcccaacgagcggaaagaggaaacttccgcgcctttgatgatcttcaccttgccgtccccgttgtggaagtagacctgccggctgtcctttgcatatccctggggcgcacccgaatcgttctggccattgtctaatacctggaaggctgccagctctacatccgggactctcccgctggtggtgtagacggctgttttgtccatggcgtaggcatagtttaacacccgaaacgatgccgggtctgccccacgcaggcgaatcccaccgagaaagcaggccgtagaagatttgccccagtaacgccagcagcagaagtctttgggcaaaacaccattcaacaagccgttttcatataggccggagaaatagaccgctccatcccgaaggaaaaattcgttgtccaccggctctgtgttggtgagcggttggagcatttctccgtgctcggctgtgatgcttaactcaatctcatcgtcgctgtaaactaagcaaagtccatgaggagcctttctatcgaaatgcagttcaatgtcatgatatttgagtatcaaaggtttcccgtggcttctcatggtggaaacagcatcgggattcccgaagatttctatgacctcatcctgcgatattccgaatttcagcggtgaaatgtcccgaggattctgcaatatttgattgcgccaaatagtaaagtcctgtttcatggttttccgtccagtgccccaacggttttcatggcagcggaatcaaatttacactgccgcaggtcccgttcgatcagggtaaacacatctggaaagcactcgatctcatcctgatactcatatttcgcatacagtttcccgtactcggagatccaaacctccgccgggtagtagtagccgatatgaccgatgggctggcatttttcaccggcagcctgttcgatctctgccagttcacagccggacatatcccgaaaataggcttcttccaaatggtttttgatcccgttgaccaggtaaggaaacagagcgaattggaagtcagccgcccagttcagttttttctgctccagataccactcacagcacaggccgaaatacttgcggtaaaaccgctgggtggtcttcatcatagggacaccatgatcggcgtaatattgctccgcaatggagatgtccacttttcgtccttcccgccatccggcgtactccatcagctgcttgaccttgcttttgagatcgccggaaatggggatgcgttctttcgtcacggtggtcacctccattatttttcaagtgggtaataccaatcctccaggccattgtaactgacctcaaatgcttctgtatcaaccttcagttctgatttggctgttcgataagctacagcggcgacctgtttcagaatgggggtagcctcctcccagtagacgcatgatgcttcatcttccaactcagaatcttcgtcttcctgttcctcctcaaaattcaaagaaaaggattcattttgaatctctgcgtagaatggaagttcaaagtccgcaggattggtaatccggatttctccggtaggggcatacatctcggccatactcagattgccagcctgtagatatttctgatactgttctgcttcctttttgagataccgttccgaggaggcccggctgtcaaagtggacggcgcttaccccggaggcgaagtccgttgtcaggctcatggtgaacacctcgtaatccggatgctccgctttcagttttttgatggcggtattcacaagggacaacatttcaagctggtaaatgaccgtattgaaatttgtatccatagttgcgttctccaattattccatcatagttcatgtggatacccgatcttatccaggcccgtcttgatttcttcccattcattgcgcttagggttcaacgcagcgaccagttcttttgttaccggaaccccatcagcaagctggcgcacagcctccaaaggcaggtctgctgggtaaaaccacttcccgtaatccacatagctctgtggattaccatcaatcgtggagagcagatctttggatgcgtcctcgccgtccatgggattgcagtgccatgtggtgccatcttccgtccagacgcagaaggtacttttcatctttttgacttcacggctgcttatgagcttttgcaaagcagagggcattccatccgtcaggtcttcgatacggggaagtttttcctcccagtcgtagagttcggaatccacaccgttgattacacagccttccggcgcaaacatgacgatcatgctctggtcactgccatcagtggcaaagaatgcctctttgccttttcgccatgcggggttgtatgtatagtggcggatgaagctccattcctcctccaccatgatgatgtccagagccgccagccctttgcagaagtttttcaggcgctccgcgttgggcaggccagataaatcttttgtggaaatcatgtggttatcctcctgtctttcgtcaccacagtcggtcaatctgggtatatatcttattaggctctctgtccgtaaaactggtcaatgagtcagtgagttctgtaagcggcattacattcaaaatatccagtacataataccagattcctgtatcccagtcccggaaccgcccattgcagacagctctcccatactcgccgggagccaaatccaatgccagctcattgagaggctgtttctgcccggtcttatcgtaggtatatcgctccggcatcgccccgatgtgccaatcattgcggtagcgcacatggattccgtgctcctgctgaatcagttcaaacgggtgaagccgcattgtgccattcggcttccattccatcagcctacgacagtccctatcgatctgaaatccatcgggcctctgtacgatagatgcaaagtgagtaggcagaccaaaaggataataggagaagaagtctttcggcagccgcatggctctgggatactggttccgctgtgcggtcgcatttccgccccggcagtctttataccattgcaggcggatctgctgaaccagaagtgtgggcagatatttttctcttttttgctcctcagctctcatgtgtgatacagaaaatctccttgttcaagtcaaagtagaccaccatcagctcgtcagtgatctccgggttgaaggacagatccataatgaaaacttgttgattcatctcgtcatctaccagactgccgaaccgcttgagcctcaaaaagtccaccatctcggcaaaggacagcttggccgggtcggttcccggaaagagttccgccgcaatatccgggcctacatcgtcccggtggaactccatgaaaaatgtcacaacgctatggtagcggctgtcctcgtccgccagcgccgctttgatggcggctttggctttttctgccagtttttccgtctcatccagcatttctcccaccgcatccatggcagcaggatcagcagtcagttcttcctctacatcgaaaagaaagggcagtccagtgtcctcgggaaaggtgaagatctcctcaccgggcgtatatggtaaatcaatgcgtttacaattcagtttcatagatatccctcctcattggttttccagatggggcaatggaattggtgaatagactactgtatctccatcatgatccatcttgagaatgacagcaaattccgctatattgctctcttgtccctttgggagaggaaagatcattggaggacaacgcagggcagcatggttcgtggttttattccaatcctccatggccgcagataaaatggcgtcaatgtgtgtcaataccttctcaatggagcccgctgagatgttgtaaaaagcggggtttttatgatactgctctgtgatgaagtttttataggtttgcactggcataaagcaaaattcccaatcaaggggatacaacccaagccaatattcatacagtttcataggcgtctccttatccctcaatgttggcagttttgaggccctttttcaaggagccgtagacagtcaccgcatggtcggtgaacatctcgtcgcagtcaaaccaggcggtgaagctgccgccggaggtgacggataggctcgtcatgctgatccgccgggccagttcttcctctgtgatggggtctgtttccgggtcacggggattttcttcatcttgggagagccagttgttggccagctcggtcaggttcttggctgcaagctcccgcatggccttgtcccaggtttcacagtcggccagcagctt

SEQ ID NO: 12374 - DNA, 117763 bp, Unknown
  gut microbiota DNA sequence
cttttttcggccaagagaaggaatacttcgacttgacgcagggcaacttttgtattatggtaggcttaccattgctgtcaggcgtggttgcccctatccattggcgatatcgatcgaggtaccaaaaatggacgtttacaggacagagttcctgtcagcgatgggtgagaaaagtgtccggttcgtgtcagaaatcggccagatcgggggagaccttgttgtgaccgtttcaccgcacctgctgccaagagcatttcgacagcagagaacatttcagcagcagaggacatttcagcagcagaggacatttcagcagtgaaggatatttttagtaaggaggattttccatgcctaccatcaaaaccggcatccgcttctccaaaaagcagccgctgagcgagcaggagctgcggcagcttcacgcctactggcgtgccgccaactatctaacggcctgccagctgtatctgatggataaccccctcctggagcgcccgctggtcaaaagcgacctcaagcagaccatcgtgggacactgggggacctgccccggccagaacttcatctatacccatttggatcgggtcatcaagcgcaacgatctggatatgatctatctctccggtcccggccacggcggcaacgccatggtggcgcaggactggctggacggcagctataccgaggtctatcccaacattaccagagacaaggagggaatgcaaaagctcttcaagcgtttctccttccccggcggcatccccagccatgtggcgccggagacgcccggctccatccatgagggcggcgagctgggctactcgttggcccacgccttcggcgccgtggcggataaccccgatctgatcgccgcctgtgtggtgggcgacggcgaggcggagaccggcccgctggccacctcgtggcacggcaacaagtttgtcaaccccatcaccgacggcgctgtgctgcccattctgcacctcaacggcttcaagatcgccaaccccaccatcttctcccgcatgagtcacgaggaggtggagtgcttcttccgtggctgcggctgggagccgtactttgtggagggcgacgaccccatggtcatgcaccagcagatggcggcggcgctggaccgggtgatccgggagatcaagcgcatccagcgggaggcccgcaagaccggtgaggccaagcggccccgctggcccatgatcgtgctgcgcacccccaagggttggaccggccccaaggaggtggacgggctgccggtggagaactgctggcgagcccatcaggtgcctatctccatggggacagacactgaccggcacctcgcccagctggaggcgtggctgcgctcttataagccggaggagctctttaaccccgacggtacgccggtggagctcatcgcctccttcccgcccacgggccgccgccgcatgggcgctaaccctcatgccaacggcggactgctgctgcgtgacctgcggacccccgatttccgggactacgccgtggacgtcaaggcccccggtgccgtggaggcgcaggatatgtatgtgctgggtacctacgtccgggacgtgatgaagctgaacatggagtcccgcaacttccgcatcttcgcccccgacgagacggcctccaaccgcctgcaggcggtgttcgaggtgacgggccgccgcttcctggaccagcagatccccggcatcgacgaccatctggacccggacggccgggtcatggattccatgctctccgagcatttctgcgagggctttttggagggctatcttctgacgggacgccacggcttcttcgacagctatgaggccttcatccgcatcgtggactccatgttcgcccagcacgccaagtggctgaagatgtgcagcgagctgccgtggcggcaggatatcgcctcgctgaactatattctggcctccaacgtctggcagcaggatcacaacggctttacccatcaggaccccggctttttggatcatgtggccaacaagaaggccgacgtggtgcggatgtatctgccgccggatgccaactgcctgctgtcctgcttcgaccactgcatccgcagccgaaattacgtcaatgtcattgtggccagcaagcatccccggccccagtggctgaccatggagcaggcggtgaagcactgcacccagggcatcggcatctggagctgggcctccaacgatcaggggcaggagccggatgtggtcatggcctgctgcggcgatacgcctacgctggagacgctggctgccgtgagcatcctgcgtcaggagctgccggagctgaagatccgtgtggtgaacgtggtggatctgatgaagctgcagccccacacggagcatccccacggcctgacagacgaggaatacgacggcctgttcaccaaggataagcccatcatcttcgcctatcacggctaccccacactggtgcatgagctgacctaccgccgccacaaccggaacctccatgtgcggggctacaaggaggagggaaccatcaccacccccttcgatatgcgtgttctcaacgacattgaccgcttcgatctggtcatcgatacggtccgtcggctgccccagttgggcaaccggggggcgtatctggtgcagaagatgcaggataagctggtggagcatcgtcagtatatccgggacaacggcgtggatctgccggaggtccgcagctggaagtgggacagcagtctgaacgctgccgaataaggtttgctatacggaaaagacctccgcagaatctagtttgtgaaggttatagcacgacacaagggcatctaacagggaagcgccgtcttggaagtgattccaagacggcgcttttctgttgcggatcagagcgaacacttcacggcgaaaccgccgctgaagaaataggtgttcgtccaatacctgtttggtaaatagccttactttaatagaatgaacccccggacgcttggggggtgcattttcaatttaagggaaagtagtgatttttatcgttgctctttgcttatggcacaggcaaggatatacacagtcatcgaccacaaagaatttcggaaaagtttccttttaagaaatgccgatactccggatgattggatgcgttctcgtattcttccaaaatcgtctttttgttccatgctttcattttgtcattcatttcttcatatcggataatagtaagcaggccttctcgctccgcctgcaaaattgcttcataggcatcagggataaactccacaccggatatatcgaccggtatgctactggtagcgacatccggtatttgaaccgaaaaaccggaatctgaaattgtctcggcagaataaatataaccggatacgcctttgtatgtgcttatcagagcattgggataatactcttccaaccgttgccgcccatctttaccaaaaccgtacggcccccatttttggcattttccattataagaaaaaccggtttccacgcaatacttttcaatggaattgctcaaatagaccaatacgttttctctttttgtggaaaaataaaccaaagggataccatgattcgagctctgcggcgttagttgtgtaatacccttaacagatgatgcgtgatagtacattagctttcttccctcctaacgcaatttgctccaagcgttttcgacggtgtacaggtgctctgataattctcgcataggcatatttcatcttagcagataactggcgccgaagcaacagaaagatccaccgtaattctatcagaattacggtggatcttatggtggacctgatgggattcgaacccacgacctctcggatgcgaaccgaacgctctcccagctgagctacaagcccggatatgaagttgtagagccataatatatggagcggatgctccgctccatatattatacacacttctttataaaatgcaaccattttctctccggcgtcgcaaaaaattgcccctgcagatggaaaacgccgtccggcgggccttattccgccgtcgggatgcgggtatacgacaccggctgaccctcccggaaggtcacctgaaagccctgaccgggggagacggagtagtcataccgcccgccgccgaaccaggccatcatcagccccgccgtgacaccaccgtggatgacacagacggcgtcctccgtcccctgcaccaccggggcgatggccgcaaggctgcgccgcagcacctgcggggtgctctccccgtgggggcaggggttgtgctctacgtcggtgatccacgcctgataggccggggtgtccttcagctcctcgtagctcttcatctcgaagtcgccgaagtccatctcccgcaggcccggaagccgggtgtggggtacgttgccatagatggccgccagcgtctgctccgtccgcagcatcccgctggtatagtagcgctgggccgtgggatagtccccggcccggcggtgcagctccgacagagactccggcagggcggggatatccgccgccccgtaatacaggttccgcaggctgccctccgtctgggcatggcgcagcagggtcagcttcatttcagcacctccgtcagtccacaaaatacccggcgcacgctgccggcctgctgggccagctgtcgcagcaggcggccatggcgctcccgccaggcgcgctctccggcgtccatggggaccacgccgctgccgatctcccgtgcgatgactacctctgccgccgccagcagagggagatacggctcagtgtcctcctgccaccgggtcagctcctccagatggatatagcaccgggcgcccggcaccggctcacctgccgccagatcgcagatatcccccggcgtcaggccgtactcccgtgccgccagtgtcagctttccctgatatgctccgccgatgatcaagtccatatcctcacctcaccaaagtccatacggcggctcccgccagctcgcccagtgtcagggcaaagccggagatgtcaccgttcatgccgtccagctgccggaagccgtaccataccgccagcccgtagcccgctgctgccgccaagggggcgaagctgcggtccatgaccagcggtacggcgatcgccgccgccagcagcaccgccagcgccgcggcatagccgccgtggcggcccatggcggcgtattggctggtacccatgggccgcagcttcagcactgccagtcccgcacaggcccgtgtggccaccgggatcagcagcagcccccacaggctttcgccggcgctgccggagaggaatacgctccactggcacagggccagcagcaccatgccgatgacggcgaaggctccgcaatgggagtccttcaggatgcgctggcgggtggccagctcccggcgggacagcacggcgtcgcatacgtccatgtagccgtccagatgcatgaagcccgtcaccagccacgggagcgccgccatgaggaaggcgtacagcccgccgatggcggcatggcgcagcagcagatacaggcccagccagatgccgcccaccgccagtcccaccagcggcagacacaccagcattttctcccgggccttctcgttccaccgccgcagggggcaggggatcgccaaaaacatcccccaggccatggaaaacccgtccagccactcactcaaagcgccacgctcctttccacaggcggggcagtcccgccgtcagctcacataccacgtcaaattccgccgccagcctgcggcaaatctccgcaaggccccggcggtacgtctccgtccacgtctcataggtcacgccgtcccgccacagctcgtcgcagacgcagacaaagtgggccgggtgacggctgatgaccagcagctcctccgccgtgcggggagaggcctcaccgtccggctccggggcggagaacatctggcaggccaggcacgccgtaatgctgtcaaaaagcaccgtccccgccggggatacccattccagcgcctgcggcagctgccgtccctgctcgatggtctcgaagccccagccgtcccgctccgccagatgccgccggacgatagcacggtcctctccgtctctgggctccagcgtggcccagtagtacatgggcgccccggcggagagccgccgggccatatgctggcccatcatgcttttgccgcttttgctgccgcctaacagaaggattctcatggcgtcaccgtaaagctgtcctgcgcccggatgggggtcaggtagtcgtcctcaatagctgcctccgggaaggtggccatgccgtccatgacggcgcaggcggcccgcaaaatctgaaacatcaccgggcagccgctgccctcgcccagccgcatccccagcagcaggcagggctcctgccccagttcctgtgcggcgatgcggtagccgatctcataggaggcgtgggagaggaacagatactctcccgcagcggggcagagacgcaccgccgtcagcgccgccacgatggagatgtagccgtccaccaccgccgggacatggttctgggcgcagcccagaaaggcccccgtcatggcggccagatccagcccgcccacggcggccagtacccccaccgggtcggcggggtcggggcgatgcagggccagcgcccggtcgatgacctgttttttcttttcaaaggccgcatccgtcagcccaccgccccggccggtgacggcctgcgccggggcgtgggtcagggctgccagcaccgccgccgaggtggtggtgttgccgatgcccatttccccgatgcccagcgcctgtacgccgtccgccgctgcctgcgccgccagctccatgccggtctccagcgcatgaagggcctgctgccgggtcatggcgggttctctggcgatgttgccggtggagcggcgcaccttccggtccagcacgccggggatggggcgatccgtgtcgatgcccatgtccgctaccaccacctcgttgccgaagtagtgggccagcgccgacatccccgtcttgtggcgggtcatattgatgacctgcgaaagagtcacggaggtgggggcggaggagatgccctccgccgtgacgccgttatccgccgccaacaccagcacccggcacttctcgacatgggggcgcacctgtccggtgatgcccgccagccggatggagtagtcctccagcttgcccagactgccggggggcttggccagttccgcctgacggcggcgggcagcgtccatgatctcccgatccgggacggtgacggcctcgcagtactgcttcaattcctgatctgtcataggttactcctcactaagatagccctgccgcaccaaccatgcaagggacggggtgcagtcctgattttcgatggtccatgtggacgccggacattgctccagcagcgccgccagtatctgctgcatggggatgctgccttctcccagactgctgtggagatcccaatcccctaaattgttgtgcagatgtacgtgccgcaggtagggggccatgggggcgatccaatccagaggaggtgttcggctggcacagctattggcgtggcctacatccaggcacagacccagccgggggtcgtccacctgacggacgatgtccgtcatcagctgcggcgtctcgtccatgacgttttccagcgccagcaccatatcctccgggacctccggcaggaactcccgccagaaggccacggactgctccgtgaaccactccggaaagtacaccagcgggatatagccgctgtggatcaccagacggcggatgcccagctgccgggcggcggacaaagcctgacgatagcgccgggccgtcacctcccgcaccagcgggtccactgcacagggagccagctccgcaaacggggcgtggagccagaaatggtcgatgcctgccatcttctcccgaaccgccggaagggtggcggggtcgtccagcatgggggcgtagcagaagtccgtgacctccagccccagcccccatttccgggccagttccggggcgtggctgtccatgccggagaggtgtaagcgctgcctgatgtccatagggtccctcctgttttttactcgctttcgccattatacactatctccgccgcattttccagtgggtacggcagggaagtgcgccgaaaaacccccgtctgccacgcagacgggggttggggatcgctttatcaatactgagacagctgggactccagcgccggattggccaccgtccactggtaatcctccagtccggtgtccacctccgtccacagcagccatgtggccatgtcggcggtgccgacctgctcctcgccggggccctgatgggtcagcgtcaccacggcggtgtggtcatccttcaaggatacggactcgatgcccacctccacggagccggagctcaccgactcctgcaccagcaccagcgcatggtccttgaagaacgcatcgtcgtaggcggacagctccgggtagtccggcagctgggccgccgaggtgacgtacagggcggagctgacgttgccgttataggtcagccgcagtcggttcacctgccccggcacgtaggagccatcctcccggacggtgccgttgccggtatcgcctacggtctgggtgccaccgggggcggcggtgggggtgtccgtcttggtgggggtatcggtgccgggcgcattgttctttgtaccacaagccgctgccacgatgcacagggccgcggccagcaccagcgtcagtagtcgtttatatttcatgggtcctgcctcctttcgcagggaacgggtcacttatgctcgttttcctccgggtcacgatccggctgggcttcctccggggtctgctcctccggggtctgctcctccggggacggcaccggctcggatacgatgtggatgtgcttggcaggggcctcgatgacctccggggaggagggacggaacaggggctgcttctcctcacgggtagcgccgtagttgtccaccgtctccgggtcacggccctcgatgatagccatcatctcctgaccggtgatggtctccttcttcagcagataggcggcgatcttgtccagcagctcccggttctcctccagcatccgtctggcatcctcatggcactgacggatgatggcgatgacggcacgatctgcggcggcgtaggtctcctgagcgcagctcatggagtacgtgccgtccagatactggttctgtacgctgcccagcgccatcatgtcgaactcctcgcacataccgaaccgggccaccagattccgggccatctccgtggcccgctcgatgtcgttggcggcgccggaggtcatggtgtggcacaccacctcctcgctggaccggccggccagcagcgtgcggatctccgccagaatgtcctcacgggacatgaggaacttctcctcctccggcaggtgcagggtatagcccagagcgccctgcgtatgggggacgatggtgatcttgctgacgggctgggcgtttttctgcttggccgccaccagcgcatggcccacctcatgataggcgatgatgcgcttttcctcgtcggtgatgacggtacccttcttctcggagccggcaatgacggtctcgaaggccgccagcaggtcattctgattcacggcgctgcggcccagccgcacggcccgcagggccgcctcgttgacaaggtttgccagatctgcgcccacgcagccggcggtggcctgagcgatcttctccagattcacgtcctcagccagatggatgctccgggtgtggacctgcagagtggccagacggcccgccagattggggcgatccacggtgatgcgccggtcgaaacggccgggacgcagcagggccttgtccagcacctccgggcggttggtggcgcccagaacgatgatgcccttgccgggatcgaagccgtccagctccgccagcagctggttcagggtctgctcccgctcgtcgttgccgccgccgaagcggccgccgtcacgggatttgccgatggtgtcgatctcgtcgatgaagatgatgcagggagccaccttggcggcctccttgaacaggtcacggacacgggaggcgcccacgcccacgaacatctccacaaagtccgagccggagatggagaagaaggggacgttggcctcgccggccacggccttggcaagcaaagtcttgccggtaccgggagagcccaccagcagagcgcccttgggcagtcttgcaccgatggccgtgtacttctgaggattgtggaggaagtcgatgatctcctccagcgactccttggcctcgtcctgaccggccacgtccttgaaggtgacaccggtggacttctccatatacaccttggcgttggacttgcccacgctgccgatgccgccgataccgccgccgttttttgccatgatccgcatcaccagcatgaacagggccaccatgacgatcaccggcaggatataggcgatcatgaactccagaatggggctcatctgggtctggacggggctggtgtacttgacgttgtgctcctccagcagaggcaggaggctggcgtcgttgagagcggtggtatacaggatcagaggcgttttctcgctctgggtatagctcttgggttccttgttcttatcggcggcctcctcggtgtagacgtagccgtccacgggggtggcatacaggacgcccttctcgatcttcagctccgccacctgatcctcctgaatgaggtcgatgagctggctgtacgggatctcatggctgctggcccgcttggtgagattgttgctgtaagcgttgatatagttgaacaccaccgtcagcaccagcgcccagatgatgagggtcaccaccccccgcatattgcggttgcggttttggttatttttctggtctttcttgttgttgggatccatgtcggtctccttccatgcagccccgccgggcggggcgcagaagtgctttaatttccgtgtagtatatcacaattcggatatcttcacaaggcgaacggcgggaattttcctgtaaaatttctatgaatggcgctttatctcccggccagagtatggtatactgaaaccaattatgtatgcattgcgaggaaaattcctatgagagacaacgaacagagacggccggaggcagaggcggacggcatcatcgagggccgcaacgccgtgatcgaggccctgcgggccggaacggccatggataagatctatctggccaagggggagacggacaagaccttgggccacatcgcctccaaggcacgggcccagggcatcgtggtggtggaggccgaccggcggaagctggacggcatgagccgcacccacgcccatcagggggtcattgcgctggccgccgtgcgggagtatgtgacggtgcagagcctgctggacgctgccgccgccaagggggagccgccgctgctggtggtctgcgatgagatctccgacccccacaatctgggggccatcctccgcaccgccgagtgcgccggagcccacggggtcatcatccccaaacgccgcagcgccggtttgacggccattgtggccaagacctccgccggagccgtcagctatatgccggtggcacgggtggccaatatcccgtccctgctgaaggatctgaaaaagcaaggcgtctgggtgttcggcactgccgccgagggaacgacccggctctatgacgccgatctcaagggcccggcggccattgtcatcggctccgagggcgacggcatgagccgcttggtggcagaaaactgcgattttctggtgagcatccccatgcgggggaggatatcttccctgaacgcatcggcggcggctgccatcttgctgtatgaggcggtgcggcagcgcaccgtgtaaggacccggagcatctaaaagagaggtaccatggaacaccgagaggatcacaacgaaataccggagtttaccctggaggatattctggcggagttcggcagcggcagcgacctgtaccggacggaggatctgcctgcggaggaaaactccccggagcctgctccggcagaagcccctgctcagcaggaagcttccgcagagccggagccccacgctgaaccggagacctctgctgcggtgaaaaccacccaacagccggaaggactgcgattcacccccgacaccgacccggtggatatggatttcccggcggaggtgctggaggaggtattttcctccggcggcccgctgctgccggaggaggaccagccgtccgaaacccagatcatccacttcccgcaccaaccggtaccggaggaggacgggaaaccggcggcggagaccgcccccgaagaagtacccgcagaggagaaggccccggagcaggaaacggcggagcagccgcagggatcagcggaaccgccggaaccgcaggaggcccctaaagtctccttggagcggatcatgaacgacacggtctcctctgtgctggaggagcaggaggacggcattctggaggaacgcccacccctgcgagaggtgctgcggcactggtgggagaagctgacaaggccacgcaccgccacccccatcccgcaggatacggagactctgtgggagcagccgcaggagcctcagccggagccggaacccgatccggagccggatatggacgtggccgtccgggccgagaagcgccgctgcgcccgcttaaaacgccagtgctggtgcgtgctgccggaggcggtgttgctgacggtgctgtccgtgctggacgggctggaactgtatgttccccagctgtgggcggcattgcccgtgctgcgggggatcatccccggcggattgctgctgctggcactggccctgtcgggccgggtctggcgcagcgcccgcaagcagctgtcccagcgccgcatcacctgcgagacggcggcgctgctggcatcgctggtgtgtttgggggactgcgtctacgccgccttgggctgcggggagcagctgccgctggcggccgtcccggtcatctccctgctgctgtgtctgtggggccagctgctggcggccaaagcccggctcgcaggcttccggctggccgatctggggggtgagccgccctataacgtatccgtgactcccgccggggcctgcaagcagcagggaacggcggagggcttctaccgcctctcccaccagccggatgtctcctatcgctggcagatcatcctgacaccgctggcgctggccgctgcctccattctggcggcggtggtgtgcttcggcggggaggggcagccggtgcggcccctgtggatctggtcggcattgctgtccggcggactgccgctggctctgccggtggcgggaacgctgcccctgtcatcgctgaaccggcgtctgaaccgcagcggcagcgccgtggcaggttatgccggggcctccgccatcaccgccgcccggcggatggtggtgacggatgacgacctgttcccaccgggaacggtgagcctcaacggactgaagctgtacggcgaggagatcggcaaggtggtgtcctatgccgccacggcggcacaggccgccggaagccagctgacgccgctgtttgaccagctgctggccagcgagggcggcacccacctgcatttggaggacctgcgtttttacgaggacggcggcatcggcggtaccatccgtggggaatctgtcaccatgggcagcgcctatttcatgaaaaagcaccatgtgtccctgcctcgtgacctgaagctcaagaccggcgtttttctggcggtggacggtcagctcatcgccatctttgccatcaaataccagccctcccgcaatgtggagtgggcgctgcgggccatgcgccgcaaccgcatcactccggtgctggccacccgcagcgccaacatcactccggcgctgctgaagcggaaattccggctggacgcccggcccctgtacccggatatctccacccgtctggccctgtcggagttgacggagggccgtggccggccccacgccatcatctaccgggacgggctgatggcctttgccgaaacggttatcggcagccgccggatgcggcgtgccgtccgggacggaacggtgctgtcgtggctgggcgggctgtcgggcctgctgctggcgtattatttcacctccgtgggggcctttgccgctctgtcggccctgaatttcctgtgctttttgctgctgtggctgctgacggtgctgctgctggcaggactggtgcgccactactgataccattccatacccatgccgggagagccaaaggctctcccggcatttttcacaaaaaagacgctgaaagttgtatttgtcaagtgcaaaaaaatagtatatactctccttattgactggctgcgccggacggcgcattcgtaccaaacgaagggagaatactgtatatgactgccaatgacattcgcaacatctgcctgctgggtcacggtggctccggcaagacgacgctggccgagcagatgctcttcatgaccaagggaacggatcgtctgggccgtaccgccgacggcaacaccgtctgcgactacgacgccgaggagatcaagcgccagatctctatttctctggcctttgccccggtcaaatataaggacgtccgcatcaacgtcatggacgctcccggcaactttgatttctccggcgaggccatttctgccatccgtgctgccgagtgcgccgtgctggtgggtgccgccaaggacggcctgtccgtgggtatggagcgcagctggaagctgctgggcaagaagccccgcatgatcttcgtcaaccgcaccgacgaggacaacagcgactatcaggcctgcctggatgctctgaagggcaagttcggccagtccgtggttcccattgtggccccggtcattgacggcaacaagaaggtcacgggcatcgtggatctgctgcataacaccgcttacgaggtcaagggcggcaaggtcgctgcctgcgccattcctgccgatatggccgacgaggtggaggccctgcgggccgaactgatggaggccgccgccggctctgacgaggagctgatggagaagttcttcgacaccatggagctgtccgccgaggacatggcccgcggcctgaagctgggcgtccgggacggcagcgtttgcccggtgctgtgcggctccgccgtcaccggcttgggcgtggagatgctgatgcagaccatcgtggatctggtccccgtggccacagatatgccggctgagacggcgcaggatgacgacggcaacgacgtcgaggtggcctgcgatcccaacggccccaccgctgccatcgtctttaagaccatctctgaccagtacggtaagtactccatggtgaaggtgctccgtggcaggatcaccagcgatatggccctgtataaccccgccaccggcaacaccgagaagctgggccgcctgtacatcatgaagggcaagaagggcgaggaggtcaaggagatctgctgcggcgacatcggcgccatcggcaagatggataaggtcaagaccggcaacaccctgtgcgaccccaagcgcatcgtgcgtctccacggcatggattatgcccagccctgctacagccgtgccatctcccccaagaccaagcaggaggtggagaagctgggtaccggcctcaacaagctcaacgaggaggaccccaccttccatgtggtcaacaacgccgagacccaccagaccgtgatctccggtgccggcgatatccagatcgacgtgctgtgctccaagctcaagagccgcttcggcgtggatgccgagctgtccgctcccagagtggcttaccgtgagaagatccgctccaccgtccgcaagcagggccgctataagaagcagaccggcggcagcggccagttcggtgacgtgcatatcatcttcgagcctcagaccgaacaggaggatatgatcttcgctgagaacgtgttcggcggctccgtgccaaagaactacttccccgccgtggaaaagggcctgcgtgagagctgcctgcacggcgtgctggcgggctatcccgtggtgtacctgaaggcgacgctggtggacggctcctaccacccggtggactcctccgaaatcgctttcaagctggccgccaatctggccttcaaggccgctctgccggaggccaagcccgtgctgatggagcccatcggtgagctgaaggtcacggtgcctgacaactacgtgggcgatgtcatgggtgacctgaacaagcgccggggccgtgtcatgggcatgaaccccaccggcgacggcgagaccgtgctggaggccgaggttcccatggccgagatgatgagctacgccatcgatctgcggtccatgacccagtcccgtggtaccttcaccttcaacttcgtccgctacgaggattgccccgctgcggcgcaggagaaggccattgccgaggccaaggctctggccgatgccgagtaaagctgctataaaaatacgccggaggaccctcctccggcgtattttctctgccgcaaaaaagttcatggaaagtttttctaaatgttgcatttgcaacttataatcctctggattccgtgctatacttagaccatcccaagggggaacgcccccggagagtaaaaaaccatcaacgaatgataaaaatatggaggtaatgattatgaagaagtgggtatgtcctgtttgcggttacgttcacgaaggtgagaatcccccggccgagtgtccggtgtgccacgtcagcggtgacaagttcaccctgcaggcagaggaaaagacctgggccgccgagcacgtggtgggcgtaggcaaggtgttcggtgaggatgttcccgctgaggtccgtgaggagatcatcgccggtctgcgtgccaacttcgagggcgagtgctccgaggtgggtatgtatctggccatggcccgtgtggctcatcgtgagggctatcccgagatcggtatgtactgggagaaggccggtctggaggaggccgagcacgccgccaagttcgctgagctgctgggcgaggtggtcaccgattccacccagaagaacctgcagatgcgtgtggacgccgagaacggcgctaccgccggtaagttcgagctggccaagctggccaagaagtacaacctggatgccatccacgataccgtccacgagatggcccgtgacgaagcccgccacggcaaggcattcgagggcctgctgaagcggtacttcaacaagtaattttacagggaatttcagaggggaagcggaaaaatccgcttcccctcttttccttaaatcgtttatttacctgattccgcatggtagttcttatagtcccccattagctcctcagcattcggtgtttccgtttccctgcgacgttgtttctgtctgcttgttctcattcgatgtattttccgtgttctgtccctgcgaatgatttgtattttccgtcttgccattgtcgcaagccgcaaggctcaggcacattaccgccgccagaagcagcgcaatcagcttttttatgcgctctttccgctcatttcttttgaatacatgaaaaaatgggacaggatgttctcctgtcccattttgtttggtgcagttactgctccttgtggtcgttctggttgccggaaacggcatccttggccttgttgaccacattctccaccatgtcgggctgggtattggtatagctaccatcccgatactgctcaccgccgaaggccaggatcaactggaaaatgaagggcagcagcagaaggccgataccgaagccgacgccctgattgaaggccttggcccagtcgatgttcatcttgatgacgaaatagatgttgtagatggggatcagcagcagaaggaacttccagccgttgccgtacagctcctgacacagcacgtaggtgttgtagaaggggacgatgccctcccagccctgacggcccatcttcttgaagatcatccactctgccaccagcgtcaggatgccgataatcagttccaaaatcataccatactctctccttttgtttttttgcagagcgcacaaaatacaccgtacgtctcttcatcgagtatatcagattttttgcaaaaatcaaccgatttcttgaaaaaccggcaaaaatttcactgctcgctctgggcctgacagaactgccgcccggcgtggtcgatggtatagttctcccgatagatcagctggctgatgggcagcagggaatacccctcacgggccatgtggtccagaatggccggcagcgcctccggcgtgtggagggcggcgttgtggaatagcacgatgctgccgggagagagcttggaggtgacccgctggcagatggtgtcggcgtcatagtccttccagtccagactgtccacgtcccactggatgggctccatgcccatggagcggatggcagagatcacatggtcgtcgtactcgccgtaggggcagcggatgaggcagggggtcacgccggtgatggcggcgatcttctcgttgcaggcggtgacgtccgccaccacctgatcggcggtgagggcgttgtagtggtcgtggtggagggagtggttcatgacctcatgcccggcgtcgtggagggccttcacggactccgggtacttatccacccagtcacccaccacgaagaaggtggccttgacgttgtatttgcccagaatctcgatgagggtctgagtgtcctcgttgccccatgcggcgtcgaagctgatggcgcagaccttctcctcccgttccaccgagtagatgggaagctgccgcttggcggcggaggcgctgacgaagctggggcctcccacagccatgaaaataccggcggccaccagcgccgtcaggatcagcagcagcgtgccacggcgcagcagtaagacttttccccgcataatgcatcccgtcctttcacggacagtgtatgcgccccacccctccggatatgaaagaaaccgccgcaggagatgcggcggtttctgagccagccaaaagagcgggaacctttcgtcaacagggcggaagggtgtgtgcgggaaacccggaaggggtgtcctgcacgatgatgatccccatctttcagagctttttgaagctctgaaagatgtttcgtcgtggcgaaaagactttttcgacacgacgaaaccgccgcaggagatgcggcggtttctttcatcatacctcatcccacaccagcggcagggccacctgtgtgacgaactttgccttgtccttgtggtggggcgggccctccagatagatgttgcggcaggtacccttcagcttcaggccctgctgcctggcgtaggccaccagccgctcccgaacctccgggatctcgtcatagtccccgtggaagaagaggcacagagccttctcctccggccagtcctgcacataggggcccttgctgccatccggcaccgccacacagaagttgatgtcgttgggctcgtcgatagggtaatcgatgaagtacatccgcttggcggagtccgtgccgtactggcgcatggcggcggggatcacgtctcggaagatctccttgcggtcctccaccgtgggggaggcgcagtggtagacgtacaccgtctggggggggatggtgcggatgatgggggtatcgttgctgttctcccggacccgcagctgcagcttctcaatgcacaggttcagctcgtcccgtagtgtctccagccgggcgatgatatcccgcaggtcggcggcatcctcgaaatagagcttgatctcatccagcgagatacccagcgtctgcaagcgccggatggcccggatgcgggtcagggtctccggggtgtagtagcggttcccgccggagccggtttttacgtcgggcagcagaatgcccttgtcctcatagttgaggatcatgcgtcgggtaatatgcagggacttggccacctcaccgatggacatcagacggctgttgtgctcactcatgacgaactctccagattttgccatattttcttaaaaagtacttgcatcgtacattggtgtacggtatatgctcagtatacagaaagatgcaggtcgttgcaagtggtaattgcaaaatacaaaagacctgccagggaggaaatctatgaaaaagcgaatcgccagcgtactggtagcgttggtgatggtactgagtctggtccccaagacgtcatgggcgtggacctcgacggtgactaccctcgagcagctcaaaagcgccatgagtgagctctcttacaacaataccatcgaaatcgttgtaagcggtaccatcgaaatcagcgaaactctgaacatcagacccacccgcaccaccaacggcagcatggcttggtatgagtattacaaccagcgtgtggtcatcagcggcgccgatgccaatagcaagctggtgcgtgccgagggcttcaagggcagcctgttcaatctgatgggtgagcaggggtatagcggcgcaggcggctcggatcatcccgcctatgccgccctgaccctgaaggacatcaccgtggacggcggcggcgacaagacgactgccacaaatcctgccatctatgtgagccggtacggcacgctgacgctggatgacggcgctgtgctccgcaactgcaagagccagtattacgccggcggcgctgtgggcctgtttgctggcacgtcggaatttgtcatgaacggcaccgcccgcatggaggataacgaggccgattacggcggcggtgtgtatgtggcgaatatactggctgccttcaccatgaatggcggcaccatcgccaataacaccgcaacgaagtacggcggcggcgtatattgcgaggccaacaagcagtatggctccaacgacaccgccaagatcaacctcaacggcagcacgattaccggcaacaccgccgggatcgccggcggcggtgtgtacttcggtggtatgaccacctgcaaggtagccggtacagtgaatatcaccggcaatacgcagggggacgacaaggccgccagcaatctgcacgtggctgcctcggcggaggatcaggccgtccttgcaggcaatgtttcctccgactcccgcatcggcctcaacgccgatctgatccccgcctatcgcatcgtgcggggctcctccgataccaatgtgtttaccagtgaccgcgccaactgcgccgtcacgaagaacgggtccgtcagcttcaatctggacctgctggccaatgaggagcacactcactgcgtgtgcctgcagaaccagaactatggcccctaccacgaccacgataagaacaccaagtgggtcggcatcagcagcctgaagtccgtcaagagctacggctgctactatctgctcaatgatgtaaccaccaccgatgaggggtggggcagcaacttggatgatgtgcggatctgcctcaacgggcataatatcattctggaaaacgggtattatcgcccatacattcatgtgacgaactatcataccctgaccatcaccgactgcgccgaggaggccggtcagatcacccgcaaggacacggcggatcccaagggtgcctgcatcgtagagatcgatgccggctgcaaatttaatatgttcggcggcgagatcaccggcttggacacctccgaaaacagcgccccttaccccgccgctgtgttcaacaggggtacctttaacctctgcggcggcaagatcaccggcaataagtcccatgccgtgtataatgagaacgccactatgaatctgtatggcggcgagatcagcggcaatgataccacctacaccgatgcttccgccggtgctgccgttgtcctggtttccggctccaccctgaatatgagcggcggcaccatcaaggataacatctccaataccctcggcggcggtgtatacgccaagggcatccagagccgcagcagcacgctgaacttctccggcggcgagatcagcggcaaccgtgtcaacagcaccaatgacgacctgggctttgacggcggcggcggtgtgtatgtggatctgtatgcgactctggacctctccggcaccgcccgcatctccggtaactacgcctgtgcggtcgactataaggagagcgccaccttcggcggcggcttcggcggcggcgtgtacgtggcaggcaccttcaacatgagaggcggcgagatctgcgacaacttcgccggtctggccaactataagaacaaatacgggaacgatgatcgccgtggcggcgatggcggcggcgtgtacctctattccaagagcgacttcagcatgagcggcggctccattcaggataacaccgtcgatgaccgtggcggcggcgtgtttgtccgtggttacgaccataccatcaccctgtccggccgctccatcatccagaacaacgtcgataaggacaatcaggacaacaacctgtatctggagaactcgtcgcagcaggtcagcgccagaagactcagcagcggtgccgatatcggcatcagcagcggcagaactctggccagcggacagaccgtccagatcagcagcgacgcctgcacaggcagcatccagtacgtcagcgccgaccgggcgggctacgagacctatctgaactctgagggcctgatctatctccgcctcaagacctatcaggtcagcgtcaccctgccgaacggcctcacctataagaacggcggccggctgacgcaggattgtctggacctgacgcccatcaccatcagcgttaccgatcccgacaattactacatccccgacgggtacagcgtgactctcaacggcatcaccgccgccaaggtcgacagctataccatccgtgtcacaggtacggccacggcggataccgccatgacactcaccgcccccacggagaaaacggcccagacccagccccccaccggccttaccgtgacccatccccagagtcggacgggctacggccgcatcaacggcaccaacaacagcatggagtatcgccccgtgggcggcaccagatggagccagtgcggcagcgccttcacctccgctctggccggcacctatgaggtccgctatgcggctaccgagacccggaagccctctccgtccactactgtcaccctgaaccagtatctggaggccatcccggttcccacggtctacggccccttcacctataacggcaactggcagtacggtctgctgcccggcgaagtctacggctacgagcttttgggcaacggctatagagcctgccgcgtgggtacctataccgttaccgtccgccccgcagcgggcttcaagtggagcgacggcaccaccggcgaaaagaagctccggtgggagatcgtgaaacgcactcccgcagcgggcgacttcaccttcaccgctccggaaaatctggagtatgacggcaccgccaaggaggccaccgttcgctggagcaccggaggcgaccggaccatgggcatgggctattggcccgacaacacctttaccgtcatctataagcaaaacggcaaggccgtggccgctcccacggatatgggtacctatcaggtctacgtcaccgttcccggcaacgaggacatcaacgccgtcagcgagttgaccgatcccagctggacctttaccatcacccacaccggcaaccaccagtggggcgattggcagcacgatgacacccagcactggcggtcctgcgccgttcccggctgccaagtgaagggctctctgggcagccatgacggcaccgccacctgcaccgagaaggccacctgcagcatctgcggcgccacctatggcaccacggatcccaaccatcatgacctgacccatcacgacggaaccgccgccacctgcacccagccgggaagtctggagtactggcagtgcagcgactgccacaagctgttcgctgacgcaggggctacccagcccatcaccgataccgtcattccggctacccaccacgccaatgcccagcgcacggcaggcgaccccgccacctgcacgcaggacggctgcgccgcctattggtattgcccggactgcggcagctatttcgctgacgttgacggaaagctggacgagagcaagacctacactggcccggaggatttctatcaggaggccatgggtcacagctttacccactatgtctacgacaacaacgccacctatgacgacgacggcacggagacggctcagtgcgaccacggctgcggcctgacggatacccgcaccaaggtgggctctaagctcatcgacgaggcggctcccacggtggagggcgtcatggacggcggcacctactgcctgacggcagagatcaccgttaccgaccccaatctggagagcgtgaccctcaacggccagcccgtggagctggtggacggtaagctcaccgtttccgctgccgagggcgtccagaccctgacggccaccgaccgcttcggcaacaccgttaccgtcaccttcaccgtgaacgcccagcatacggagggcgagggcaagatcaccacgcctgccaccacggagcatgagggcgtcaagacctacgcctgcaccgtgtgcggtcaggtgctgcggaccgagtccgtggccaagctgcccgctcccgcagagcccaccacccccgccgttcccaccggagataccggcgacaccggcctgtggatggggctggcggccctgtgcggcatgagccttgcagccctgctgcgtaccggcaagcgcaaagaacagtaaactccctatcacgcaccataactccctataaaaaaaccacgggccctccccccaagtgggggagagcccgtggctggcgacacaaaaccaaccggagccgcaaatctccggcagattttgtcacagctctgtttggtaggttacagactgcgatggtcgctgagtacctggagcggctccaccgaggagccgcccaggtcggaggagacgttgacactggggcggagctcataatcactgccgcttgtgcttcgggcgccctgcgtggagcagcggtcgtattccaccttcatcaccgaagcgatggtgtggcggccgtagtcgtccaactgggcatactgatccagcagctgctgggtgtcctccgtcagatagaaggaggcatcgctggagatggccttgatccccagcgtctggcagatctgcactaccgtatcaaaggaggaacctccgatgccgttgtgcagcgcactgttgatggtagatagggggatattgaccgcaaaagcaaactgccgcacgctcttgtactgacgggaaatttcagttttgacgattctcgttaagttatccatagtttagaccctctttacaaatttttccatgcacgggagacaactccgatcgtacgtattataacacgcttttttttaaatgccaatactaaatagtgaatagtttctaaattttcagcggaaaaaacaaaattttacaaaaaagaaacacttttggaatatttatgataaaaaacaggtgggagatttccgtgtaatggaaaatctccttttattttgctcacagctgtgctacaataataagctgaaacagagaggagcgaactatgcgtaaaggtacccacccccgcacggcgctggggcaaacggcggcgcagatgatccgccggtactatctccatgacgtggcacgggacagcgcagccctgacctactacctgctgttcgccattttcccgctgctgatcttcgtcagcaccctgctgggtattctggagctggatgtggacagcatcgtcaccggcctgcggcagatcgtgccgggggacgtggcggaggtggtgcggggctatctggaatacgtttccggcaacgccagccgccagctcatgtggttcagtctggtgttttccatctggttccccatgcgggccaccggctgcctgctgcactcgctgcgcaaggccttcggtaagggccagcccaagaacatcctgctggatcagctgaaaatttttctcttcgccatctggctcatggtatccatcggcctgacgctgctgatgatcaccgtgggccgccgggcgctgtactttgtgtcggggatcatcaccgtaccggacggcttcatcaacctctggagcaagctccgcttcgtggcggtggcgctgctgatgttcgtgctggtgacggtgctgtatatgctggcgctgggccgccgatgcccgttgcgggaggtggcaccgggcgtggccgtgtcgctggcggcgtggatgctgctgtcgctggccttctcctattatgtggaaaatctggcacactatacccagctctacggctccatcgccaccattgtggtggtgctgctgtggctgtatatgagcgggacggtgctgattttaggcggtgagctgaatgcggtggtgctgcaccggcgcacccagcgccgtcgtgcggcagaggaaaaggcggcggaaaaggctgcccggccgacacggcaggaagctgcggcgaagaagccttccggggcgacgcagccgccccgacagccacagccgcctaaaccggcagagcagccgggaaaggcggatccacccaaaccggcggagccacttaagcagacgcaggggcagccgccgcaagaagcaatacctccggaaaaagagcagccggaacgaccgggaaaggaacagtcaggctcatgaagatcatcattgtaggaaacggaaaggtgggctacgctatcgcccgccagctggcggtggagggccacgacatcaccatggtggactcctccccggtggcgctggcccgtgccgacagcaccctggacctcatgtgcgtggagggcaacggcgccagcatcagtgtgctggaggaggccggcgcccggacggcggatctggtcatcgctgtcagcaatctggacgagacgaatctggtgtgttgcctcatcgccaaaaccatgggggccaagcacaccatcgcacgggtgcggaatccggactaccgccgggacgccgccctgctgaagcgggagatcgggatggacatggtcatcaaccccgatctggcggcggcacgggagatcgcccgcatcctcagcttcccctccgcctcctccgtggagcccttcgccggaggccgtatcgacatgatcggcatacaggtgacggagcgggaccggttttacggggtggccctcagcgagttccatcgtatccgctcggcggaggtgctgatctgcgctgcccagcggggggacgagtgcatcatccccaacggcaactttgtgccgagagagggcgacaagctctacatggtgggtaccaagtccgagctccagaagatgctgcgggctatgggccgcacccagcagcgggtcaaaaccgtgtccctgctggggggcagccgcatcgccatgtatctcacgtgggagctggcggtgagcaataccaaggtctgcatcgtggagcagaagcacgataagtgccttcagctggcggcccagctgcccacggccatgatcatcgagggcgacggcacggaggaggaactgctgaccagcgagaatatcttcgaggcggatgccttcgtctccctgacgggccgggatgaggagaatctgttgatggccctgacggctcggcgggcgggcgtccccaaggtgctggccaagatgacccgccccaactacatggatctggtccgggatatgcgggtgggcagcatcgtcagtcccaaggatatcgtggccaaccagatcacccgctacgtccgggcattggccaattccgagggcagcgccgtggagagcttgtataagatgctgggcggcgccgtggaggcactggagttcaccgccacggcccggagccgtgcggtgctgaataagcccctgcgggcgctgtccctgaaggacgacgtgctggtggcggccattgcacggggcagcgagatcatcatccccagcggcaccagcatcattcaggagggcgaccacgtggtggtggtcaccaatgcccataccttcgacgatctgggggacattctggcgtgaacacaaaagccgtggcccgtggccacggcttttttcgcaaggaggggagactgcatgacacgggatcgtgagacggcccgccgcatcgcacagcaggtgcagccgctgggcggcagcgtctactatgtgggcggatgcgtccgggaccgcctgctgggccgggagagcaaggatctggatatcgaggtccacggcgtcaccccccagcagctggagatcgtgctggatcaaatgggcggccgccggacggtgggggccagctttggcgtctacggactggcgggctgcggactggacatcgccatgccccggcgggaggccgccgtgggtcgggggcaccgggacttcaccgtggaggtggacccgtggctggggccggagagagccgcccgccgccgggatttcaccgtcaacgccctgatggaggacgtgctcaccggtcaggtgttggacttcttcggcggccgggaggatctccgccggggcctcctgcgccatgtggatgaccgctccttcccggaggatcccctgcgggtgctgcggggagcgcagttcgccgcccgcttcggcttcaccgtggcggaggagacggtggccctgtgccgcaccatggatctgtcggccctgtctcgtgaacgggtggagggggagctgcaaaaggccctcctgcaggcgccccgcccttccatcttcttccgcacactggataccatgcaccagctgcgcccgtggttcacggaggtgcagcgcttacagggcgtcccccagccgccccgctaccacggggagggggatgtgtgggagcacaccatggcggtgctggataccgccgccgagctgcggccccaagcagcccagcccatggccctgatgctggcggcactggcccacgacttcggcaaggtcaccgccaccacggagtccggcggcgtcatccacgcttatggccacgaggaggcgggtctgccgctgacagaggacttcctgcatcgggtgatcggggagaaggccctccaccggtgcgtgaaaaatctggtggccctgcacatgaaacccaacgccatggcactgagtggggcctccgtcaagtccaccaaccgtctgctggacgccgccatagagccggaggacctgatcctgctggcgctggcggatcaccgtggctcccggtgcgacccgccccgtccggacccggagcccttcctgcggcagcggctggaggtctaccgggccaccatggcccgccccatggtcaccggcagcgacctgatctccgccggactgaccccggatcgggacttctcccagctgctggcctacgcccgcaagctccatctggcggggctcgaccgggaggcagccctgcggcaaacgctggcctacgcccgcaagcttcaaaaaacgcatcaaaaagaaggctgagcggatgctcagccttctttttatggagttttttacagcaggtggaagttcaccaccagaccggcgaacacgatggagaccatgctcaacagcttgatgaggatgttgatggcggggccggaggtatccttgaagggatcgcccacggtgtcgcccaccacgcctgccttgtggcagtcggagcccttgccgccgaagtggccggcctcaatatacttcttggcgttatcccacgcaccgccggcgttggccatgtagatggccatcaggaagccggtgacggtagcgccggccagcatacccacaacgcccatgtagcccaggatcagacccaccacgatggggcagaccacggcgatgatggtgggcaggatcatctcgtgcagagatgccttggtgcacaggtccacgcagcgggcatagtcgggatcggccttgccgtccatcagaccggtgatctcccggaactgacggcgcacctccagcaccacactctgggcggcacggcccacggagttcatggtgagggcggcgaacacaaagggcaggcaggcaccgatgaacagacccaccagcaccacggggttcatgaggctgaaatcctggaaggtgacgtcagcgcctacctccttgaccttctcgatgtaggaggccatcagggccagagcggtcagagcggcggagccgatggcgaagcccttaccggtggcggcggtggtgttgcccagagagtccagagcgtcggtgcgctggcggacctcgggagccagaccggccatctcagcgatgccgccggcgttatcggccacggggccgtaggcgtcggtggccagcgtgatgcccagcgtgctcagcatacccacggcggccagagcgatgccgtacaggcccatgccagtggaggcggcgccgccggagcagaggtaggccaccagaatgcagatagccacgatgatgatggggacggcggtgctcagcatacccagacccaaaccgccgatgatgatggtggcggcaccggtctgagacttggaggacagatcctgcgtgggcttgaaggtgtcggaggtgtagtactccgtggccttaccgatgagcacaccggcgatcaggcccgccagaatggcgaagtacaggcccagatgctccttgcccagcaggaggatcaccagcgggcaggcgatgatggcaatgaggatagcggacaggttggtgccacgggacagggccttcagcagcgtgcgctggtcggcctgctcgtcggtgcggacgaagaaggtgccgatgatggagcagatgatgccgatggccgccatgaccatggggatggccatggccttgaaggcctgatcggagaaggcggccacgcccagcgcagaggcagagatgatggagccaacataggactcgtacagatcggcgcccataccggccacgtcgcccacgttgtcgcctacgttgtcagcgatgacggcggggttccgggggtcgtcctccgggataccggcctccaccttacccaccagatcggcgcccacgtcggcggccttggtgaagatgccgccgcccacacgggcgaacagagccatggaggaggcgcccataccgaaggtcagcatggcgctggtgatggcggaggcctccagcttgaacacgaagcgcagcaggaagaaccacacggagatgtccagcaggccaagacccaccacggtgaagcccatgacggagccggcggagaaggccacccgcagaccacggttcagcccttcctggcaggcattggcggtgcggcagttggaggcagtggcgatcttcatgccgatgaagccggacaggccggagaagaagccgccggtcaggaaggcgaagggtacgaaccacgtcagcagaccgcaggctgccatgacgcacagcaccaccaccatgcaggcgaagaacacgcctaccacggaatactggcgcttgaggtatgcgttagcaccctgacgaatggactgggagatcttctgcatgaggggggtgccctccgagaagcgcagcaccttctttgcggtgatgaccacaaagagaagcgcaatgatggagccaacaaatgtggctaggaccaggtacttttccataaagacttttcctctcttttccttgttttctcccggatccggcagagggacgggagattctttttgtcccactgcacattataaaaaacgccgtccgctccgtcaaattttcaaactttttttcgaagtacctaaaaattagtttggagtcgttcgtcatttttatataatatttttcttgcaaagaaaaccgcttaaaatggaaaaacggggcaaaaatcggcggcagcggcggaacgcttgcggaatttgtgacaggattttcttgcgagaagctggggaaaatgtttttaaaaatttttttcaaaaacatttttccttcaaataaaagcaaattcacaaaaaatgcacaaaaagactcccattcactttttgcgggaaaaatgatgaatcaaaaattggatacagaaattctttcgtcatttttcacaatcgcggaaaatggctttaaatgtcttgaaaagcgcccaaaacgggagtaaaatagccccatcaatctctgggaggtttcaaacatatggaatatcaggaagttttgcaaaacgcccgcacctgtatgggaccctactgcaaggcgtgtcccgtgtgcaacggtcaggcgtgtaaaaataccatccccggcccaggcgccaaaggctccggcaccggctttgcccggaactatcagaagtggcaggagctgcgggtgaatctggataccatcggggaaaaccgtcccgccgacacgtccttcgacttcttcggccaccggctggccctgccggtgatggcggctcctgtgggcgccatgcagctgcactacggagataagtacgacgatctgacctataaccggctgctgctggcggcctgtgctaaggcaggcatcgtggccttcaccggcgatggtgtggacccggcggtgatggagggcgccacgcaggccatccgggcccagcagggctgcggtgtgcctacggtgaagccctgggaccgggagaccctgatgcagaagctggacttggccctgaccgccgatcccatggccatcgccatggacatcgatgccgccggtctgcccttcctccgcaaccggatgccgcctgccggcagcaagaccgtggcggagctgcgtgaggtggcggagcacgcccgaaagcccttcatcctcaagggcattatgaccgtccgtggggcggagaaggcggtggaggccggggcctccgccatcgtggtgtccaaccacggcggccgggtgctggatcagtgtcccgccacggcggaggtgctgcccgccattgccgacgccgtgggcgaccgggtcatggtgctggtggacggcggcatccgcacagggctggatgtgttcaaggcactggcactgggggcggacggcgttctcatcggccgtcccttcgtcaccatggtctatggcggcggcgaggagggcgtggcagcctacgtccgcaagctgacggatgagctgtcggataccatggccatgtgcggcgcccacagcctgaaggagatcaaccgggagatgctctggcagggctgatgcggactgatgcacacatcattctattcggctatcatgggaacatattctgctgctatgacattttggccggatttgttccgatattctaaaaattcgtgacaggaggcgcttatgtacattacatggttgggccacagctgctttcggctggagtcggcgggctacggactggtcatcgatccctatcgggttgtggcgggctatccgccgctgcgggtggaggccaacgccgtttatatcagccaccaccactttgaccacgactgtctggaggcggtgacactgctgcccggcggggaaaatccctttacggtggagacgttctccaccttccacgacgactgtcagggcgctctccggggcgataacaccgttcatatcttccgggcggagggcatgaccgtggtacatctgggagatctgggctgcgctctgacagcggcgcaggaggagaaaatttcgggctgcgatgcgctgatgctgccggtgggcggcacctataccatcgatgccgctgcggcggcggagctggtgggtcggctgcacccccgactggtgctgcccatgcatttccggagaggggagcagggcttcccggagctgaccacgctggaggactttctctcccgcctcccggagcagccggtacaccgactgacggaggagacgctggacctgaagtccaataggacgtcaggcatcgtgatcttcccccgtcggtaagggaaaattctgtccggtttttgtccggaaaatgtccaaaaaccagagtaggtataagcccctccgttttcgtgtacactgaggtatcaggtacatggaaacggagggcttttacatggcagaaaaacggtggcgcacttgggagacggtgggcctgctggtggtgctggcggcggggaacctgctgcactttatctacgactggacggggcagagtcccatagcggcgccgctggccgccgtcaacgaatccacctgggagcacatgaagcttttcatcactccgtgggtgctgtggtcactggtggaatgcatcgccctacggggccacggcgccctgctgcccgcccgtggattggggctgctgacgggccttgcggccatcccggcgctgttttacacctatcagggaattttgggccgggggatcatgtgggtggatgtactgattttccagctggcggtgctgctggccttttgggtcagctggagcgttcaggcccggcgggtgctggacgggccggtgtggcagatcttaggcggcgtgacgctgctggcggtgtggggactggccatctggtggacctacgcaccgccccagctgccgctgttcgtggatcccaccgacggaagccggggcatcccactgcggtaggtctgcgggtgggggagacggcttgcaaaatgtgataagcgggcaagggcaggcacgccggggggcatgcctgcccttgccgatttgccgcatccgcttgccggtgggagagcatcgtccgggttttggcgaccggaggggcgatggcccggttggatgtcccgatattgggattttttcttgaccggggggagcgcatggggtataatcgaagcaactgtatatgacaggtcagaaacggaggcgtgcaatgaaaaagatcgtgcataaatcggctgcgcccatatacgcagcggcggtggtatgggtgctgtatgccctgctgctgcccctgtacaagccgggccactttatcatggcggctgcggcgtcggtggtggtatttctcatcgcccgcatcttctgcaaggacgttgtggaggaggtggaggagaagccccagcccaccggtaacccggagctggataagatggtctccgacggtgagctggccatccgggagatgaggcgcctcaacgacagcatcaaggacgagaccatcagcagccagatcgatcggctggaggaggtctccaacaaaatcttcgactgtgttaaggcagatcccaagaagctgccgcagatccgtaaattcatgaactactacctgcccaccacgctgaagctcctcaatgcctatgaccgcatgagcagtcagggcgtggagggtcagaacatcagcggcaccatggagcgggtggagagcatgatgagcaccattgtcactgcctttgaacggcagctggacagtctctttggggatcaggcgctggatatctccacggatatcacggtgctggagaacatgatggcccgtgagggactcagcgacgaccccatccaccagacccagaaggagactccagcggcggaggagagggaggacgacaacggcatccagctggagctgtaaaaagaccctgagaggagggcggcccatggggcagcgtctttcgggaaatgcgagtaaacaaacaatatgagatagaaaggaactatgaccatgacagacaacatgatgcctgaactgaccctggagcctacggcggcggccgaggccgttccccagctgacgctggagcctacggctcccgaagtgccggagccggaggagaagaagatcgagccggtggagatggatgaaaagctcctgaccgacgaggagaagaaggcggtggaggagttttcccacaaaatcgatgtgcgggataccaacatgatcctgcagtacggcgccgccgcacagaagagcgtggcgggtttctccgagagcgccctgaataacgttcgcagcaaggatctgggcgagatcgggcaggacctgagccgtctggtggtggaactgaagggcttcggcgacggcgaagaaaagaagggcctcatgggcctgttcaagaaggccgggaaccgactggagagcatgaaggcccagtacggcaaggtggaggccaacgtggagaagatcgcccagtctctggagcagcaccagatcacgctgctcaaggacgtggccatgttcgaccagatgtatgagctgaacctgaagtactacaaggaactgacgatgtacattctggccggtaaaaagcggctggaggaggtacgcagcggtgaactggaggagcttcgcaagaaggcggagcagtccggtacggcggaggacgcacaggcctataacgatctggtgaacctgtgcaaccggtttgaaaagaagatccacgatctggagctgacccggatggtgtcggtgcagatgggcccccagacccggctgctgcagaacaacgacacgttgatgatcgagaagatccagtcctcgctggtgaacaccatccccctgtggaagagccagatggtgctggcgctggggctggagcacagccgtcaggccacggcggctcagagcgccgtgacggagatgaccaacgagctgctgaagaagaacgccgacaccctgaagatgggaaccatcgccaccgccaaggaggccgagcgctccatcgtggacatcgagacgctgcagcacaccaaccagcagctcatcgagtctctggacgaggtggcccgcatccagcaggagggcgccgccaagcgcaaggaggccgaggcccagctgggccgcatcgagggcgaactgaagcagaagctgctggagctgcgtggttaagctgagagatacgacttctccgtgaagggagactaccatgaaattttatcaaaaacgtggctttgcgctggtggtgctggtgctggccattctgggctcctgcgtctacggcatcagcaaaaagcccgccgacctgccgcaggtatcctacggcaactggctgcgggacgacgccgatctgctgacggacgaaacggaggcctccctgcggcagtatgaccagagctgggacagcgactatcgggccatcatcgccgtggcgacgctggacacgctgaacggctggacctatgagaaggcggcggcggagcttggctcccagtgggggctgggcggcaatgatatgctgctgctgttggtaaaggacagcgactactacgtggcgctgggcgacaacgtgctggacgccatgacggacacctatcaggcgggcctgcagggcgctgtggagactccctactatcagggggactacgacgcagcggcgctggccttcttccggcaggcggatgtgttctatgcccagacgctgggccgtcagcagagcggcggcagctattccggttatgaggataacggtgcgtggcagggcaatgactccggctctgtggcggctgtggtgctgctggtggtgggcatctttgtggtgtggatcctgctggatggcctgcggtatcgccggtatcgccgccgcccggtggtggtaggcgggcctgtgtactatcccgtgttctggggacggcatccccgtccgccccggcggcctgcaccgccccgtggcccccgtccgcccatgggcggcggccctcggcctcctatggggggcggccccagaccgccgatgggcggcggtcctcggcccggtggatctcggccctcccggagcttcggcggcgggagccgcagcggcggcttcagcggcaagggcttcggcgggagctcccgttccggcggaggcagccgtggcggcggcttcagcgggaaaggcttcggcggaggcaagagataagctaaataaaaaaatagcggcaggaacgaagttcctgccgctattttttcagctggttatgattcccggaataattcgtcataggtggtgtgcagggcgtctcggatgccccggagctgggtggcttcaatatgtcggacaccacgttcgatcttcaccagtgtctcacgggtcatgttgatgccctccagctgcagcagctgcaccagctgggtctgcttgatgtgttgagccagacggatgcggcgtatattctctccgatgcggatgctgtcctgcttgattttctgttccacgggtttacctcccataaaattatggttcggggtactctgatatttgctgctcaatttgccggacgatatcgctgggcggaatatccagcgcctgtgcgattttgaaaagggtatcgagggtgggactccgcagtccacgctcgattttgctgtaatgggtgcggtccagaccggccagaccgctgaggacctcctgtgacattccctttcggagccgatagctttgaatcacctgccccaccagagcggcgctgaccatgacctcaccttctttccctgttatcataacaggaagcaaagaacggaatgaggtcacttgaccccgacgacaaaaaggtgtagaatggacctatctaaattggggggtggaatagatgaagcgggtggagatactggtggaggagagcctatacgaattctaccggaaggtaggggcgcaggccgggggcctgccggcggagcgggtcatggcggatgcactgctgaagctggcaggggagttgtcgctgcaggcgctggagaaaaagcggcggccgtgagaaaggaaaaaaccgtggaagcacagcttccacggttttttgaacgtaaattttactcggcggggtaaacagaaacctgcttacgatccttgcccagacgctcgaagcgaaccacaccgttggccttggcgaacagggtgtcgtcggagccacggcccacgttggcaccggcgtggatgtgcgtgccacgctggcgaaccagaatgttgccggccagaacgtgctgaccatccgcacgcttgggacccaggcgcttggactcggaatcacggccgttcttggtggagcccataccttttttgtgggcgaagaattgcagaccaatgttcagcatatttcagtaccatcctttctgtaagggtagagaagaggagggcggtcagccttccataacttcaatgttatcgggatattcgtcgtgaagctgcgccagatagaccatcagccccgtcagaagattctgacaggtggactcggccgtgttggccagtccgccggggagccgaagggagatcgaggcatccgcttcccgcacctttaccgcagcacacagacccatcacgtcgtttacggtggcctccaccagacggacggcgctggtaatggcggcgcagacgatgtcttcgccggattctccccagccgctgtggccctgcacgtcaaacccgatgatgcgtgcatcctccgtgaggaatgtaacggtcgtcatgccttagaaagagatcttgccgatctccaccttggtgtagggctgacgatgaccctgccgtttgcggtaacccttcttgggggtgtacttgaagatacggatcttcttgcccttgccgttcttcaccacggtggcatccaccttggcgccctccaccacgggagtaccgaacttggagttctcgccgtccacgatggccagcacctgatcaaagaccacggcgtcgccggcgttgacgtccagcttctcgatgaaaagcgtatcaccctcggaaacgttgtactgcttaccaccggtcacgataattgcctgcattacttgttgcacctgcctttcctttataacggactcgctgtcgggggcgtcggctgcgggagccgaaacttctacccattcaaagcggcttataaagtataccagccgggcgcaactttgtcaacgccttttggggagattttgcggcgttttcttcggaatattcaaaaaaatgtcatgactttttccgtacaatggggtacaatgaatgaaaataagtgtttggaggaaatttcccttgagaaagctctatgacgccgcagaccggttctgcgcccggcatccccgcttcggcgtgccggatctgatgcgctatatcgttatcggcaatgtggtggtgtttttcctgatcatgctgaccagaggcaccaatgccagcgccctgaacttcctgtattttgatccgcagatggtgctgcggggtgaggtgtggcgcatcgtcacctacattttcgtacccagtaccaccagtgtgttctggctggtggtggagctgtatttctactactggatcggctccacgctggagcgggagtggggaacggcacggtttaacctctactattggagcggcgtgctgctgacggtcatcggcgctctgctggccagcgccattacgggcggcaactttgcagtggcggggacgagctacgtgaacctgtccatgttcctggcctttgcgctgctgttccccaatacgcaggtgctgctgatgttcatcatcccggtgaagatgaagtggctggcctacatcgatgtgggactgtttgcggcgggcatcattcgggccattttggtgcggaactggggcggcgtgattttgccggtcatggcgctgctgaacttcctgatcttcgcatggcccaccctgcagggctgggcgcagcggcagcagtatcagcactcccggcaggcggtgaacttcaagaaggccgtccatcagcagcagaagcagcaggggtatcaccacaagtgtgccgtgtgcggccgcacggatacggactatccggagctgcagttccggtattgcagcaagtgcgtgggctatcactgcttctgtcaggatcatatcttctcccacgttcactttacggagtgaggaaaacagaagaaacagagcgccggtccatacggatcggcgctctgttttttgactttttgtgcgctttatgtatccagctccagcaggtggaggccgtagtcgttgaggtagggcttcaccagatcataggggatgaagaaggtctgctcaccggcggaatagggggcgatgtcgtaggtgttgaagacgatggtcacacccttagcgttatagaacacgctgcgctcgatccagtccagcaccgttttgtcgtagtcgctgaaataggaggtgtcgccgctgtcctgaatctgacggaggatcagctggtacacggcctcctccagttggttgatgtcggtggccagatccgtgacggacacggtcttgccggtggagaggtcgaaggagacggcctgccgccaggtgctggggtgggcgccgccggtataggagacataggacagggtgacgcacagcaggcgctcattctgccaccaggagatccctgcctcatcccgataggcgaagtcctcggttttccagcgctctccgccggtgatcttgtactcctcacgagccatctgctccatctcgtccagcatatccacctgctgatcccgccagtcggtgaaccagtcgttgatgcgctgcacggcggcctgccggttcttggcggcggtgtcgctgttgtcagggctgccggtgagggtcagcacggggatctgatatcgggcggtgagcagcactgtctcgtcctgctcactgacggtatattgccgctcggtccactccgtggagatgacagggacgtccggggaggtcacagtcactttcggggtgtcgtctaccatcatggtgttggcggcggagaccttgcagccggtcagcaggcccgtcaggacggtacataagaccagcagcatggccagagccagtagctttttcatgggggttcacctcacagaaggatggggttcgtgcgccagtcgctgccgcagacgctgcgggaggactggggataggtcaggacatagagatctgtccagagagcctcccggcggaaaagagtctccgccgcaggccccaggcgggacacgtcaccggggcgggtcagtaccggtgcgccctgccgctgcatctgccgcagcagatcccggccccgctcgttggcagccagcacacggagataggggataccgcccgccgggggcgtgacatccagccacgccgacagcagcatccgccgcagccgggaggtggggtagcgcttggttttggcggtctccagcaactcctccggggagcaggaggtgcgtaccgcctgatagaatcggtggtacaggccctccttgccgccgtcgtaggggaggaagtcctcctcccgcagctgccgaagccgggctaaaatggcccggtggcaataggagaggtccgccggggcctgtcccagcgccagttcccgccgcagcacctgcgccgcgggggcgggaagataggagagggcttcgtcggtacggccggagcgcagcagcgtccgcagataggaggcggaggccgtgtcaccggagggtgcgccgtcgtggccggcaccctgacgctgaacggccagcggctccatgggagccttctgccgccgcagagccttcaggtactcgatggccagaatgtcgttaggacgggagagcatccgggggggagcgcccagctcctccgccgcctgctgccgggccggggcataggccatgccttgggccagcagctgccggatgcggggcatcaactccgggcgggagagggccgcctccgccgcctgtaaggcagtcaggtcaccgcactcgctgccgaaggccagatgggacaccacgccggtggaggtcagcagctccacaccgccgtcggcaaaccgctccgccgaggccatggcccacggggtgggcagctccagtaccagatcggcgccgcagcggacggccatctccccacgggcgtgcttgtgcgccacggcggcgtcgccccgctggacaaagttgccgctcatggcgcatacaaggggggcgtcgtactgccgccgcaggccctccagcatccgggcatggcccagatggaagggattgtattcacatatgataccaatggcgttcacgatgttcccccttaaaatgttacaaaaggttacaattcagttgcgggatgcacggatttgtggaaatttctctggtttcaacggagaaataaacaatttatcgggtatttacgagatcttgccagaatcataccatacatccgcagattttgcaacggaacacttgggcgttgcttttttccggcggtgtgatacaatagggccaactgataaatgaaaggcggtaatcgcaatgaacagcgctgaaaagctccgactgctgcggcagcggatgcaggagcagggcatggacgcctatgtggtggtaacggatgatttccacggctcggagtacgtgggtgactattttaaggcccgggagtacctgtcgggcttcaccggctctgccggtacgctggtggtgctgccggacagcgccgccctgtggacggacggacggtactttttgcaggcggcggatcagctggccgggagcaccatcgacctgatgcgggcggggcagcccggcgttcccaccatcggggcttttctggcacagagggtgccgcagggaggcaccgtgggcttcgacggacgcaccgtcagcagtctttttgcccggacgatggccgctgcgctggaggggaagaacgtccgcttcgcctatgagcaggatctggccggggctgtgtggccggaccggccggcgctgtcggcgcagccggtgtgggagctgccggcggagtgcgccgggctgacccgtgaggagaagctgcgtctgctgcgggagaagatgcgggagaccggggcagaggtactggtgctgacggcgctggacgaggtggcgtggacgctgaacctccggggcgacgacgtgcgctgcacgccggtgttcctgtccttcctgctgctgcggcaggaggaggccaccctgtgtgtgcaggagcagatcctgtccggggaactgaaggagaagctggtggcctgcggcgtggcactggccccctatgagagcatttatgaccggctgcgggccatcccggcagggacggcggtgcagacggacagcgccacggccaactactgcgtattgcagagcctgtccggggccaaggtgctggacagacccagcccggtgcagctgatgaaggccatgaagaccccggcggagcaggagaacttccgggccgcccacatcaaggacggtgtggcggtgtgccggttcatctgctggctgcagagccatgtgggcaaggaacccatcaccgagtgcagcgctgccgccaagctggagagcttccgggctcagcagccggactatctggggccaagctttgactccatcatggccttcggtccccacggagccatcgtccactatgaacccacggcggagacggatgtgccgctggagccccgcagcttctgcctggcggataccggcggacactatcttcaggggaccacggacatcacccgtaccatcccgctggggccgctgacggaggaggaacgccgggcctatacggtggtgctgaagggccatctgcggctgggagcggcccggttcccggagggcctgtgcgggcagaatctggatattctggcccggctgcctctgtgggagcaggggatggactacaaccacggcaccggtcacggcgtggggtatgtgctcggcgtccatgaggggccgcagcggctccactggcggctgccggagaaccagaaggtcacggcgctggcagagggcatggtggtgtccaatgagcccggctactatgccgccggacagttcggcatccgccatgagaatctggagctggtgcagcgggacggcgagaacgagtatggccgcttcctgcacttcgagccgctgaccatggttccctttgaccggacggcgctggagctgagcctgctgtcggaggaggagctggcgctgctgaacgcctatcatgagaaggtgcgggctgccatcgcaccccatctggatggggaggagctggcgtggctcatggctgctacggcacccatcctgcggtaagagaagaatagaaaaagccgtccccggccactggccggggacggcttttttatacgggaagctcaccgtttcagcagggcttggcggcgccgccagtccggcaggtaacgctccacctcggcgtagaaggcggggctgtggtttttatggcggatatgggccagctcatgcaccaccacatactcgatggcctccggtggataggccatcaggtacagggagaagcagaggctgtttttcccggagcagctgccgaaccgtgtccgggcggaggtgatcctgatcccggtggggcggacgcccatgaccccggcccaataggccacccgctgcggcagaagggtcttggcctgctggcgaagggcctcctgctcctgaggggtgggctccgggtgctccgcccgataccggccctgacgctgctgctggcgatggatccatgtctcgtgcttttccacgaaggtgcggatctcctccaccgggagagtcatgggcgcccgtaccaccacgctgccggactggtccacctgtagggccacggtgcggcggcggctccgcaccacccgatagtccgtcatcgctctgccacccaaatgaatcgggggccgtgatagccgtcccggtctattatttccgtccacatggacgcagggcgcacccataggccgccgtcgccgtagagggcccggtacaccaccagctcctccagcgtctccgagtggcgggcgatgcccagcacctgatattcattgcccttgaagtggcgataccgccccggttgaatgtccgccatatactccacctccgtttttgggaacagtataccacatcggttcccaaaaggcaaaaactgtgttatcatacaggaaaggacatatgctgaaaggggagactgcaccatgaagaacaccaccctgtgctacatcgaaaatccggccggggagtatctgatgctccaccgggtgaagaaggagaacgactgcaaccacgacaaatggatcggtgtgggcggcaaattcgaggacggagagagtccggaggagtgcgtcctgcgggagacgctggaggagacggggctgactcttaccgactatcggtatcgggggatcgtcacctttgtctccgaccggtgggagacggaatatatgcatctgttcaccgccaccggctggacgggccgcatccgggaggattgcgacgagggcgtgctggagtggatccaccgggatcggctggcggccctgccccagtgggagggggaccgcatctttctggagctgctgcggcgggaggtgccgttcttctccctgaagctgcgctatgagggggagcggctggcctatgccgccctcaacggaagggagatggagcgatgaagctgctggtcagtgcgtgtctgctgggagtggcctgccgctacgacgggcggagcaagctccacccgctggcgcagaagctatgccgccgccatgaggtgatccccgtgtgcggggagatcttcggggggctgcccacgccccggctcccctccgaacgccgggagggcggcgtgtttgcaagcgacggcggtgatgtcaccgatgccttccgccggggggcggaggaggtggtgcgtctggcccggctcaccggggcacaggcggccattctgaaggagcgcagcccctcctgcggctccggggagatctatgacggcaccttcaccggaacggtggtggagggctggggcgtgacggcggagctgctgcgccgggagggcatcccggtgctgggggagtcccggatgggagaactgctgacagagggcgaggcgtgtttggtcaaaatcacaagagacccggcgaaaaaactgtgagattctgaaaaaatggtccggccccattgacagcctatgtataagttgctaagatggtagcgtcaacaaaccgaaaacgttaccggaaaggtttccaagttttcggtactatctccggagggattaccgatgaccatcaaagatattgcccggctctgcggcgtcagcgtcagcacggtatcccgtgtgctcaatgaccgacctgacgtcagcgaagagaaccgacgccgggtgctggaggtcattgaaagctccaactacatccccaacaacaccgcacgggatctggtcaagaccaagtccgacgccattgggctggtggtgcggggcgtgtccaaccccttctataccgacatcatccgggccgtcgaggacagcatcaccgccgagggctttaccatggtgatgcagcagatcggcacctgcgatgacgagatcaagcggggggctatgatggagcgggagaagcggctgcggggcatcgtgtttctgggcggacgatccgactatacgccggaggagctgaccgtgctgaacgtacccttcgtctgctgctcctacgccaatcagtacggcacactgccggagggctcctacgcatcggtgtccatcgctgacgaggaggaggcctatcgggccgtgacggagctgtaccgctgcggacaccgccgcattgcggcgctggtggcccgcaccgatgaccgggccatcagccagctgcgctatcaggggtatctccgggcgctggcggactgcggcctgccgacggaggaggaactggtgatccgcgccgggtcctttgacatcggggacgcctaccgggccacggcggagaggctgcggcagggggcggacttcacggcggtgttttccattgccgacaacatggcgctgggcgccatgcgggcgctgcgggaggcgggacgccgggtgccggaggactgctccgttatcgccatcgacggcctgaccatgtcggagtatttccatcccatgctgaccaccctctgccagcctatggaggagatggggcggcgcagcgtggagattttgatggacatgatccacggccggggacggcctcgctgcgagacggtgcggaccgtgctgcgccggggagcgtctgtgcggcggatcaactgagtttttcccatcccaagggatgtgaaaaataataaatgaaggagaaatgaaaatgaagaagtttcttgcattggctctggctcttgttatggcgctgtctctggcagcctgcggcaagaaggcagatgacaacaacaagggcaatggagacgaagcgaagggttccgtgtactacctgaacttcaagcccgaagccgacaaggcctggcaggatctggccaagacctacaccgagaagaccggcgtggaggtcaaggtcgtcaccgccgcctccggccagtatgacaccatgctgacctccgagctggacaagtccgctcctcccaccatgttccaggtgggcaatcagggcgccgtcaactcctatggcgatttctgctatcctctggataacaccgacgtcatgaaggaaatgaccacccaggacttcaacctgaagaatgccaacggcgagaccgtgtccatcggctactgctatgaggcctatggcatcatcgtcaacaaggctctgctgaagcaggccggttatgagatcaccgacatcaccaacttcgagtctctgaagaaggtggccgatgatatccacgcccgtgccaacgagctgggctttgacgccttcagctccgccggcctggagggctcctccagctggcgcttctccggtcatctggccaacatgcctctgttctatgagttccgggatgacaacgtcaccgctcagcccgccaccatcaagggcacctatctggacaacttcaagaacgtctgggatctgtacaccactgactccgccaccaccggcgctgctctgaccaccgccaccggcgacacctccgaggccgaattcggtcagggcaaggccgtgttcttccagaacggttcctgggagtatgccaacctggtcaccagtgatgacaagggcttcaagatgaaccccgaggatctggccatgatccccatctactgcggcgttgagggcgaggagaagtccggcctgtgctgcggcaccgagaactgctgggctgtcaacaagaacgccaaggaagaggacattcaggccacgctggacttcatgaagtgggtcgttacctccgacgagggcaccaccatgctggctgagcagtttggcccctgccccttcaagaacgccaagacccccgagaacgtgttctttgccgatgccaacacctataccgctgccggcaactacattgtgacctgggccttcaactggactcccgccgtgaatgactggcgtgcgggcgtggtggacgctctgacccagtacaccgtcaacggcggcagctgggacgacgtcaagaccgccttcgtggacggctgggccacccagtatgccaaggagaacggctgagctataagcgctccgttgtaacgcaataggaccgggggcgggcttatcgcccgcccccgattttctcacctgcggcgcacagagctgttggccggtatggaccgggcaagagctccgggcgccgcccggaaaaaacatagataggagagaggcgtcatgaaacttccgaaacaccgccgggatgaggccgcgctgaattcccggctgatccgccgccccatcaagcgcatggtgtggctgtttttgctgcccacctttgccgccttctgcatcggcttcctgtaccccttcttcaaggggctgtttctgtccttctgcaacttccgcattaccagccagtggacatggacggggctggaaaactaccggaaggccttccaggaccccggctatatgcacgcgttctggtacacggcgctgtttgccctggtgagcctgatcgttatcaatctgtttgcctttaccattgcctatgcactgacccagaagttcaagggtaccaacgtgttccgcacggtgtttttcctgcccaacctcatcggcggcatcgtgctgggctatatctggtccatgatcttcgacggcatcctcatcaagtacaacacctccgtgatcctggagacgaaatacggcttctggggtctggtgatcctggtgtgctggcagcagatcggctatatgatgatcatctatattgccggactccaggccgtgcccgaggatatgctggaggcggcccgcatcgacggcgccaaccgctggcagaccctgtggcgggtcactatccccaacgtgatgccctctatcaccatctgcatgttcctgagcctgaccaacggcttcaagctgtttgaccagaacctggccctgaccgccgggcgtcccttccagcagctgggcaacggagagaccatcaaaacaacggaaatgctggccctgaacatcgtcaacgccttcggcaccagcggcggcggcaaccgcggcgtgggtcaggccaaggccgtgatcttcttcatcgtggtggcggccatcagcatcatccagcttcaggccagccgccgcaaggaggtgcagcaatgatcaaaaccgaagctctgcgccgcagagagcgccgtcaggcgctgctgacggtggtgttcaccatcatctccgtgatctatctgatgccggtgctcctggtgctcatcaactccctgaaggccaacgcctttgtcaacaccgagaccttcaagctgcccacggcggaatcctttgtggggctgaagaactatgtcaagggcatgaccttcggcaacttcgccttctataaggtggtattctacagcttcttcatcaccattacctccacggcgctgatcctgctgtgcacgtccatggcggcgtggtacatctcccgggtggggagcctggtcagcaagatcgtgtactacctgtgcgtattctccatggtggtgcctttccagatggtcatgtacaccctggcccggacggcggaccgggtgcatctgaacaccccctggaccatccccgtggtatacctgggcttcggcgcgggccttgccgtgtttatgttcacgggctttgtcaagagtctgccgctggagatcgaggaggccgccgccatcgacggctgcggcccggtgggcaccttcttccgggtggtgctgcctatgctcaagcccaccatgatctccgtgggcgtgctggagatcatgtgggtatggaacgactatctgctgcccagcctggtgctggacatcaaccagtaccgcaccatccccatccacattcagtacctcaagggcagctacggcaccgtggacatgggcgccaccatggccctgatcatgctgagcatcctgccggtcatcatcttctacctctgctgccagaagcacatcatcaagggtgtggcagccggtgcggtgaagggctaaggagcatagagcctccgctcggagggcggggctgataagtatttcaaagcatttctataagtaagtgagtgactacctatgaatcgaagcagcggcattctgatgcccattttctccctgccgtccccctatggcatcggcacgctgggcaaagcggcgtatgactttgcggactttttggcggaggcgggccagcactactggcagatgctgccccttggccccaccagctatggggactccccctatcagagcttttccacctttgccggtaacccctatttcatcgatccggacctgctggtggaggacggccttttgacgaagcgggaggtgaaggcctatcgctggggggatgatccccgccatgtggactacggcgctgtgtataacagccggctgaagctgctggccaaggccaaaaagcggggctgggagcgtgaccgggaggaggtcacggcctttgtggcagagaacgcccggtggttgccggactacgccctgttcatggcctgcaagcgccatttcgggatgcgctcctggacggagtgggaggatgaggacatccgcctgcgccgctctccggaagtgctggagcagtaccgcaccctgctgcgggaggatgtggagctgtttacctatatccagtatctgttcttccggcagtgggaggccttgcggacctatctccatgagagggacatccacgttatcggtgacctgcccatatacgtggccatggactccgccgacgtgtgggccgagccggagaatttccagctggatgaccgctgtgtccccacggaggtgtccggtgtgccgccggactacttcagcgccgacggccagctgtggggcaatcccctttatcgctgggatcggatgcaggccgacggcttcggctggtggattcgccgcatcgacggcgccgggaagctgtatgacgtcatccgcatcgaccacttccggggcttcgagagctactgggcagtaccctacggcgagacgacggccaaaaacggccggtgggtcaagggccccggcatggcgctggtgggtgtgctcaccggttggttcccgcagctggagtttatcgctgaggatctgggctatcccaccccggaggtggcgcagctgctgcgggattccggtctgccgggcatgaaggtgctggaatttgccttcgattcccgtgataccagcagctatctgccccatagctacggggagaactgcatctgctataccggcacccatgacaacagcccgctggccctgtggcggcaggaggcggatccggcggatatcgcctttgccaaggagtatctggggcttaatgacgaggagggcttcaaccggggaatcatccggggcggcatgagttctgtggccaagctgtttgtggctcagatgcaggactatctggagttgggggcgggacaccgcaccaacgagccggggactcagtccggcaactggcagtggcggatgctatcgggagagctgacgccggagctggcgcagcgcatccggaagctgacccgcatctacggccgattggcctgagagaatagcgagagggactgagcaaatgcccagtccctttttctttcctgcggaaggagaagactatgatccgtgtgcatgagacgggactgcggcgtggaggaggtcacagtgaacaaaccgaatcctcagtctgtgggcctttaccggcatatgggggcctatcggaggatcgattgcggcgaggaggggcccctatccactgctttataggggggcgccggaactgaaaacagcacatgaccccggcggccattggccgccggggtcatggagactgtcggaaaaacccggagggtttttccgacaaaaggttgcagtctgctgtgcgcataatttgtgtgccataggcgcacaaattccacacttgcagcctgagaagtattttctctcacgcacatgtcgcgagagaaaatgattttacttctttgcgcctgcgatcggcaaactctgcgaggctttttttgacacgctgcatgaccccggcggccattggccgccggggtcatgctatggaaaggaaggggatagaatgatttaccgctgcacccggccggagccgtcgccgccggccagcttctccacctcagagacggtgacccggttgaagtcaccctcgatggagtgcttcagggccgaagccgccacggcgaactcgatggcgctctggctgtccttgccgttgagcagggcgtagatcaggccgccgccgaagctgtcgccgccgcccacacggtccacgatatgcaggtggtattccttggagaagcagtaattctcgccgtcgtacagcataccggcccagtcgttgtcgctggcggacagggaggtgcggagggtgatggccaccttctcgaagccgaaccgatcggccagctgcttggctacggacttgtagccctccttattgagcttgccgccgtagatgtcggtattctccgcctcgatgccgaacacatccttggcgtcctcctcattggagatgcagacgtccacgtactggcacagctccgtcatggcggcacgggcctgctcacgggtccagagcttaccgcgatagttcaggtcgcaggagatctttacgccgtgcttcttggcggctacgcaggcctccttgcagatctccaccagattggaacccagcgccggagtgatgccagtgaagtggaaccagtcggcgccgtcaaagatggcatcccaatcgaaatcggagggctgggcctcctgaatggcggagtgcgcccggtcgtagatgcacacgctgccccgctgggaggcacccttttccagatagtagatgccgatgcgatcgccgccccggacgatggagcgggtgtccacgcccagcccacggagggcgttgacggcgccctgtccgatggcgtgggcgggcagcttggtgacgaaggcggcgtccatgccgtagttggccagcgacacggctacattggcctcgccgccgccgaaggtggcctgcagctgatcgtcctgaaagaagcggtagtagccgttgggggccagccgcagcatgatctcaccgaaagtgacgatacgtttgctcatagtgattcctccttatctgcgaaccagatgaatggcgaagccgccgaattcaccgtcgatataaatggccttggtgtttcccttggcatccgtcttgcgggtctccggcaggcagcggatgccgcacaggcccagatgatacaccgcccggtccacgttgctggtggcaatggcgatgtgtccgtgggtgccacggccgggggtcttggtacactccacggcgtggagggcctgtacagaggagttgcccatctgataggagaagccgaacatatcgcacagggtacgggccagccggtcggcctcggcctcgctgccgcagttgatgcccacatgatccagagagaaacccagcatggtgcgaacggcctcccggctcaagcgggtgatctccgcccaattctcctgttggatgaggtcctttttcaccatccaggtgccgccgcaggccacgatctggtcaaaggccagataatccgccagattcttggcattgacgccgccggtgggcatccatttcagggttttgtaggggccggccagagccttcagcttggccacgccgccgttctgctcggcggggaagaactttactacctccagacccagcgccatagcctgctccatctcgccgggagtggcggtgccggggaccatgagcgcacccttggacagaccgtagcgcaccatgtcggggttgaagccgggactgacgatgaacctggcaccggcgtccagcgcacgatccagctggtcgtgggtcagcaccgtgccggcacctaccagcatttccgggacctcccggctgatggcacggatagccgcctcgccggcggcggtgcggaaggtgacctcggccaccggcagccctccggctaccagtgcttttgccaacggcacggccttttcggcgtcgtcgatggcgatgaccgggacgatgccgatatcagagatttgtttcggaacaggatgcatggatagaccctcttttctgtgtagtagtggaaatggtcagatgctgcgtgcttacacgcagacgggaacaaagggaaaaacaccgcacccggcgtcagcgccggatatcgccggaacacgctcagatgcggtggttctttcgggttttggagggggttacttgctgcccttctccagcgcctcccacaagccggataggtacacggcgcccagcgcacggtcgtaaagaccataaccggcacggccctgctcatcccagatcatgcggccgtggtcggggcgaatgtagccgtcgaagcccacgtcatgataggccttcatgatctcgtagagatccagactgccgtcgccggagaagtgggcggcctcctcaaattggccggggccggtgaatcggatgttgcggacgtgggcgaagtggatacggccctgtgcgccgaactcccgcaccatggcggggatgtcgttgcaggggttggagcccatggagccggagcaaagggtcagcccattatagggactgtccaccagcgacaggatgcggcggacattctcggcgttggtacagatgcggggtaggccgaagatatcccaagggggatcgtccggatggatggccagtttcacgtcgtactgctcacacacggggatcaccgccttcaggaagtactgaaggttgcggaacagatcctcgtgggacacggaggcgtattgggcgaagagctttttcagctccgccatgcgctccggctcccagcccgccatctcgaagtcaccggcaccctgttggatgcggtcggcaaaggcctgcggatcagtgatgcagtcgataatggactggtcataggccagaacggtagcaccgtcgaaccggggcttggccagatccgtgcgggtccagtcgaacaccggcatgaagttgtagcagatgaccttgaccccagcctgacccaagcgggccacggtctggcggtagttgtcgatgtattcgtcccgactgggcaggcccagcttgatgtcctcgtggatattgacgctttcgatgacctccagctccagaccggcgtcgttgacttcttgcttcagcgcccgaatacgctccgtgggccacagagccccggcgggcatatccatcaaggaactgacaacgccgctcatgttggggatctgcttgatatagcgcagcggtatgggatccatctgactgccataccagcgaaatgtcattttcatggctgatcgctccttactctctcactcagctgccggcgcaggatatcacgcaccgctcccggccctgccagcatggcacggaaatcgtcctccaccgttttggccagccctgcctcatacagatccacaccgaagatatcggcgttttgcaggatgggacgcagctgatgggtgaaggtatcgggctttccgagggttacgtccgccagcagcggctgcagctggggaagcaggggatccggactcaccggcatcgtcttaccggcatcgtctactcccagcagatagcggcaccagccggcaaagaccagcgggatataccgcagctgcaccatggggaggctgcgctcccggtaacggcgcagggtgccgccgtagcgcactggtagcttctgagaggtatcggtggcgatgcgctggggcgtgtcgggaatggcggggttggggaagcgctcatggagcacctgatgaataaactccgtgggccggaggatgccgggatcctccaccaccgggagactctcgccggcgatacgttccaccagcgttacaaggtcggtatctcgcatctcggcggaaatggtctgataatccaaaaggcagccaaacaccgccaacgccgtgtgcagggggttcagacaggtgccgaccttcattttctccgacttctccacggtggcccgatcggtgaagtagacacccgcctgctccagcggcggccgaccgttggggaaatgatcctccagcaccagatactccgtgacctcggaattgacgaagggggcggagacggtgccggtggcgctcttggtgatggccatacccgccacgcccagcgccgtcagctggtcggccaccttctgggaggggtggggggtgatcttgtcgatcatggaccaggggaagctgacgttctcctcacaggagagccagcggaggaaatcctccggcacgaagccgcccttctgccagccctcggcaagggttagacagctgtcccggagctttttgccgttttgggcgcagttgtccatgctgaccacggcaatggggcttccacctgccagaaaccgctgatacagcagtgccacggcgatggacagcgtgtgccggggccggaatggccccgccgccagatcctgcgccaccacgggcaggagcgtgccgtccatatcccggagggcatagcccttctcggtgatggtgaagctgaccatttgcagggaggggtcacagaacatccggcaaagggtttgccagtcctcatcctgccagtcggctttcagacagcctgccacgctgccgatgacctcccggtcacaggagccgtcggcgtgcatccgcaccagaagggagaggttgtcgtagggggtatagccctccgtggcggcgctgaaattatgggatgccgccgccacgatgccggtgtctgtaagaccggcgttcaaaagggactgctgggctgccgccagaaaggcgcgaaagatgttcccggccccgaagtgtatccagacgggatgccggagcgtccgctcctgcatggcggagacgtcgtagcgggggagggcgatgtgagctgcctgccagccgctcttgttccgcagaccctgaatgttcagatgaagcatagaatgccgcccttcgtatcagactctggtatccaccagatgcttaccaagcttcttttccagcttgccctgcagccaagtcagcatggtgctgaagatcaggtaaatcagtgcggcctcgcagtacagcaacatgggctcaaagcgaacggcaatgatgctcttggaagtcatgagtatctccggcacggtgatggatgccaccagagaggtatccttcagcaagctgatgaaggagttgcccagagagggcaccgccaccaacgccgcctgcgggataatgacctcggtcatggtctggagcttgctcatgcccagcgccttgcaggcctcgaactgtcccttgggaatggaagtcagcgcagcgcgaatcacctcagagttgtaagcaccttggctgacgaccaaggcaatgatagcggaaggaataggcttgagaacgatgccgatagacggcagtccaaagaatattacgaagatctgtaccagcaaaggtgtgccacggatgacccagacgatgaaccatgcaatgccctttaggggcggcaacttggacatccgcatcagtgcaatgatgaaagccagtacgaggcccaacgcaaaggaaaccagcatcagcggtacagaaaccgtcaagccggcccgaaacatgggccagaaggactcaagaaatagttccataggggcttctcctttttaagaagaggggacgccgccggaggcggcgtccccttgaatagtggccttaaagcttacttatacaggctgacgctgtcagcaacggtctgaccgaagtacttcaccgtcaggttgtagagagtcttgtccttgatcatctcgccgatgatctcagagaccttatcgcacagggcctgatcgtccttgcggaacatagcagcggactcgaccatgtatttctgatcggcagcgggctcatagatggcagcgatcttcacattgacatcgggacggctcttcatgtactcatccacggcggcgacattgttgatgtggccatccacgcgcttggtgttcagcatatccatagcgccggtgaggtcggcgtcagcggtggtggcaccgtagctctgggcgatctgaccagcggtggaggagggggagttagcgcagaccttgccgtccaagtcctcgaaggacttgatctcctcgttgtcaccgttcaccaccaggcagaaggggttctctgcataggaggcagacacggcgtacttctcctgacgctcgggcttggggttcacaccgcagataaccacatcgtagcgggcggcgtccagaccagccataacgggatcccagccgtcggagatgttgaactcagcggtaacacccagacgcttggcgatctccttggcaacctctacctcaaagccggtgagatcaccggttccctcatcgttgtagacgtaggggatccagttgccctcggcgccgatggtcagcttgccggcgtccagcacacgctgcagggagttgtcggtgttgttgtcaccattgttgttgtcgtcggccttcttgccgcaggcagccagggaggcgatcatcatcagagcgaggaccgctgcaaggatctttttcactttcattcgtttcaccttttcctcttttttatttatttttcagctgacgctgagaaatacgttggttcagtcctccagaaaacgttccaatacccggaagtttctgcggtctgcgctgaaggggtcggtaaagtagtgctcgtcggccacctcctgcaccagataaccggtgaagtggtgggcctgcatgatctgaagctggcgggacagggacgtgttgccgtcgccccatacgttgtggagccaagggtcgccgtccagaaagtgcatatggatcaggtcgtcgccgaaggcgtcgaaccagtcctccagcgtctcgccggcggcgccggtggcgatgttgtccaccatcatcttcaggttggggtggccgatctgccggtacatctcacgggcacggggcaggtcgtagaccagattgctctcgtcgtcccgcagggattccattaccagaaggatgccttccgcctccgccacacggcacaggcggtacagatgatcccgacagcggttccacatggtactctcgtcctcgccggtgtagccccagccggagttcaccaccacccggtcggcacccagttgggcggccagacgaatggcgttggaaaagtagcggaaggagtactccagcagctccggctcctgcgaggcgtactgatactggtaggcgatgctgggggcggtgacagacaccacccggacatcgtgatccagaagcttctgtttcagagcggggacgtcgccggtgccctcgtggtccagccagaagtgggaggcgccgcaccaaagctcgatctggcggatgcccagccgctgctgacagtccagaaaatagtccagcgagaagcggcggtagtgctggttcatgttcaccagctgactgcggaggatgcccattacgccagcacctccttcacagcggccacggccttttcatcaggataggcgggagagccaatgtagcgctcaccggggagatacagggagaaatcgccctgatagccgccctctgtcagctggcagaggtagcggtccaccggcagaacgccgtcgccccacgcccgccagccgtgccagttgccgtcgcacagtcgcaccagaccgatgcggccggggaagagagagagccaatcggccacggtatcgccgttggcgctcatgacgttggtatccagacacacgcccagcgccggggaatcgacccacgccagcatctgggagagctgccgggcggtattcagtaccggggcctcggcaatgaggggcgtttcagcgcccatcaccggggccagcagcagcttcacgccctccacctgcgccgtatggcacagatgggtcagcatggcggctgcgtgctccgtcagctcctgcggtgggaggtcccagcaggccccggcggcgctcagcaccagccgatggcagtccagctccgccgccagacggatgcagctgtcgtagtaaccgatggtggcgtcccgctgctcacctgccggggcggtaagagagcagcgatagggaggcggcgttaggacgctgacctgaaggtctgccccttgcagagcggcccgcaggggggcaacgtcggcgtggccccggtaaccgcagaaaaagtgcggcacctgcggcacaaagtccagccgccggaggcccagacgctgcatggactccagaaagaccggcaaagggaagcgactatattgcccattggagcctaaaagctgatccattccttacttgatctcaccgggatagccgttctcgcacagctcaaaccacacataggcgaacttctcgccgtcggcgcactcgctgccgtggtgggagccgtggggggtgtaggtgatgtcgccgccctgcacgtggatcttttcgttttcggcggtgtaggtgaaggatgcaccgggcagcatgatgtaccactgctccagctcattgtggatgtgctggccgatgtagttggggccggtgccgaagttggcacccatggacagacggcccagattgcggtgctccagcagcatcatctgctgaatgtcggcgccggtgaagtcctccttgtagtgccatgcaccggacacaccacggaagcggggcaggctcatgtgggcttccttcaggcaggtcttgtcatagtcgttgagctcggtgacaaagtggacgatctccatggtctccttggcatcggcggcgcagtggaaggtgacgctctccttgtcgaagtcggggacaaagacggagacctcggtgatgttgaatacacggcggggggtgacgatgtagcccttgccggcggtgatgaggaacacctgattgtgctgctcacgggtatacagctcggcggagaagtccgcaccgggctgcagggagatgcgctccacggtggcatccttataagcgccctccagaatgctcacacgggagacgccgttgacatagttgtgctggatatcagcacctctcgaaatcttgaccagagccatgataaattctcctttacagtatggaaatatcggtatctgcgcctaaaagaggcgtggaaagcgtttttacttgatctcgccgggatagccctcgatgcacatctcgaaccagatgtagtcgcacttcttgccggcctccacacggctgccgtgccagaagccggtgggggtgtaggacaggtcgccgccggtcatgtggacctcttcgccgccggcggtgtagatgaagtcggagccgggcagggggaagtaccactgggccagctcgttgtggatgtgctgaccgatctcgatggggccgttgcccttgacgcaacccatggacaggcggcccagattgcggtgctccagcagcatcatggaggtggtgacggagttgtccttaaagtcctcgtcataggtccagccctgagagatggtgcggaagcggggcagtaccatgcgggactctaccagacaggtcttgtcgtagtcgttgagctcagtgacgatgtgcaggaactccagaggctccttgctgtcggcggagcaggtgatggtgaagcgctcggtgtcgaactccgggacgaacacgccggcctcgttgatgttccaggcctgacggggcgtggtgatatagcccttgcccttggtgaagaagaacagctggttgtgttcggtgacggagtagacgtcgggggtgatggagtggccgggctgcagggcgcaatgggcgaagcaggcctgatcaaaggcgttctccagcacgggtacacgggcgaagccgtccttgaaatcgtacttgacgtcgctgtaccgggctacctgaatgagagacatagtaggttcctcctgtttgtttaagtctgtttttatcaaagcatcttgctgagaaaatcctgcagacgcttgttcttgggatgtgcaaagaattcctgaggctcgctgtcctccacgatgacgccgccgtcgatgaagatgacccggtcggctgcctcacgggcaaagcccatctcgtgggttaccaccagcatggtcataccttcagcggccagcttcttcataacgtccagcacctcacccaccatttcggggtccagagcggaggtgggttcgtcgaagagcatgacctccggctgcagagccagcgagcgggcgatggcgatgcgctgctgctgaccgccggagagctgattggggtaagcgtcacgcttgtctgccagtcccacagtctggagcagagccatggcacgctcctcggcggttttcttattcacgccctgcaccttcacaggcgccagcatgatgttgtccagcacggtcttgtgggggaaaaggttgaactgctggaacaccatgcccatacccagcaggagcttggtgctctccttgggcggggcggtgaccagatcggtgccgtgatagatgatgctgccgccggtgggcttttccagcaggttcagacaccgcaggaaggtggacttgccgcagccggaggggccaacgatggccaccacctcaccgggctggatctcaatatctacgcccttgagaacctcgttcttgccgaaggtctttcgcaggccctttacgctgatcatgctcatttttcatacccccgtaagtgatggtgctggaatccgaaataggaaacgctgttgcggtagcagatatcggccaccatctcctccagcaggggacggtcgtccgggtattgaccctcctccacccagcggcccagcagaccgcacaggatgcggcggaagtactcgtgccgggtgtaggagaggaagctacgggaatcggtgagcattcccacgaagtttcccagcacacctccggcagccagacccttcagctgggcctccatgccgtccttgcagtcattgaaccaccaggcagagccgtgctgcagcttgctgcggactccctcgccctgatagcagcccataagggttaccagagcggcgttatcgttgggatccagcgaatagaggatggtcttgggcagggcctcctcggcctccagcgtatccagcagccgtgccagatccggcaggtttaccgccgggccgatgctgtcatagccggtatcgggccccagctggcggaacatccgggtattattgttgcgctgggcggcgaagtgcagctgcatgacccagccccgccgggcatagccacgtccaaagtacagcagcaacgccgtcttatactgccacagctcctcctcggtgatggtcaggccggtcagccgcttttgcaggatggcatccagcgccgccgtgtccgccgtgcggaacacgatgttgtccagtccgtggtcggctacggtgcagccgtgagcggcgaagtagtccatccggcgatccagcgccgccagcagggtgtccatgttctggatctccgtcccggcagactgagagagtttagcaatgtaatcggcaaagtctggcttttccagatttaccgccttgtccgggcggaaggccggtaacaccacggtctccagcgtatcatcggcggccagctgttcgtgccagcagaggtcatctgccgggtcgtcggtggtacacagcagagtgacgttggacttcttcagaatgtcccgcacccgcatcccgtcaccgatgaccttctggcagtgttcccacaccgcatcggcgttgcgggaggtgagatagccgtcaaagccgaagtaacgctttagctccaggtggctccagtggtaaatggggttgcccacagcccgctccagtgtggcggcccatgcccggaacttctcctgatccggtgcatcgccggtgatgagacgctccggcacaccgcaggcccgcatcaggcgccatttgtagtggtcgccctccagccacagctgggtgaggttggcaaaggagcggttttctgcgatctccttggggctgacgtggcaatgatagtccatgatgggctgcttctccgccacaccgtggtacagctcacgggccgtctgggtatccagcagaaactcctcgtccataaaatgcttcattttcagtgacctccgtccgaaggatagcgtgatcttgcatcgcactgacgttatttatatatcatcgatatatctgtgatatatttcttgattacgaggataccatagtttaggaggggtgtcaagttgaaaatgcagccatttgcctaaaaagcaccgatttttgccgatttaaatgtacaaattttacgagtaaatcttgtgcaaagtgacaaagaggattgacaaatgcaggaaggaatagtaatataaggagcgtctgatatattatatgatttgaaataatggactggtgatatattacacaccaatcagggaggtatctatgccacgcattgccactgaaaaacaaaaatgtctgtcccgtgtcgcctatgaccgcatcaaagtcatgatcctgcaaaaggagctgatgccggggcagtttatcaatgagtcgcagctgcaggaaacactggagctgggaaggacgccggtgcgggaggccgtgctggcgctggcacaggaccggctggtgaccatccatccccgcaagggcatcgaggtcacacgccccacacccaaggatatccacgacatcttcgagattcgtgggatcatggagcctgccattctgcgccagtgctgcggcatggtggatccacagtgggctgtggatatgcgggcgctgctgcagggtcatgccgatgatacggcctccaacgccggcgagacagcggcaccgctgatcgatttggataaccggtttcatctggagttggtggacgtgtttcacaaccagtatgcttccaacctcatgcggagtctggtagacttcctgaacctgatccgggtcacggcgtggagcgccgatcgctatcagatcagtaaccgggagcatatcgacattctggatgccattctggagaaggatgtagatcgggcctgccgtctgatggaggagcacatccagctgtcgtatcaggaggccatccacacgatgatgcacgcctccttctgagtaaaagaaaagagaggggacagcccattgggctgtcccctccgcttgtcgaaaaagccttttcgacaagcggaagcatttttcagagcttcaaaaagctctgaaaaatgttgatcatcatcgtgcaggacacccttccgggtttcccgcacacacccttccgccccgttgacgaaggatttccacttgggggcaggctcaggggacagcccattgggctgtcccctctttcgttctatgttctttggtaggctgtgcttacagggtaacgccgtccttccagatggccagctcccggtagcccagattttcggagcaggtggccagaccggaggccgttgccatcacccggtccagcagggcctccacggcatcgtcccaagagtccccctgcaccagcgtaccggcgttgaagtcgatccatcggggcttgcgctgggccagggcggtgttggtggagatcttcagcgtggggacaggcccggcaaagggcgttccccgtccagtggtgaagagcaccatgtgcgctcccgccgccgccagagcggtggtggataccagatcgttgccgggggtctggagcacggtcagaccccggttctgcacccgctgaccataggacagcaccccgcaaatgggggaactgccgcccttctggacgcagcccagcgacttctcctccagtgtggtgatgccgccggccttgttgccgggggagggattttcatacaccacctgcccgtggcggacgaagtagtccttgaaatccgccaccagtgccggcagctcccgctgcaccgtctcgtcggcgcagcggcggaacagcaccccctcggcgccgaacatctccggcacctccgccagcagagccgtaccgcccatggataccagccggtcggcaatgcggcccaccaacggattggcggtgatgcccgacagaccgtcggagccgccgcacttgagaccgacgaccagttcgctgacggggatgctgcaccggacatccttggaagcgtggtcaatgagctggcgcagcagcgccctgccggcctccagctcgtccgggacggactggcactccagaaacgctattcgctccgggtcccaattccccagtagctttttcaactccccgatgttgctgttttcacagcccagtcccagcaccagtacaccgcctgcattgggatggcagatcagatcacacaggatacgacgggtatgctcctgatcgtctcccgtttgggaacagccatagggatggggccaagcgtagacacccgtcacgctgcctcggatatcgtgggagactatccgtgccagcgtttcggccacgctgttgacacagcccacggtgggaatgatccagatctcattgcggatgcccaccccccccttgcggcgaaagccctgaaaggtgcgggaggcagggaccactgatcgcgtcgggacggcgatggacgccgaggtaacggcctctccgtcgagggaggtggccagatcgtggctgtggacccagtcgcccacatggatggcttgggtagcgtggccaatgggaaagccgtatttcactacggcggcctcggaggggatatccatcagcgccagcttgtggccctgaggaatgtcctgccgcagagtcacggctccggcggaggtctccacgacatctccggccttcaagggctccagcgccacggccacgttgtcgtcgggatgaatttgcaggatgcggctcatagcgcagcctccttccggcaggcatccatggcggcggctatgccgtcccggcggatgcgctccagatgagcggctgcggcggctgtaaagctgggcagttggttcagatcctgcccccagaagttctcctgtgcggccaacgccgttatcagcatctgcgacgtatcctctgcatgggcggcaaagaactccagcacggccgcctcatcccgcacggggtacggctcaccgctgcgctggtcctgggtatagaaggcacacagggcagcgaaggagaaggtcagctgcaccggcagccgccccgtcttttccagataggcggtgacactgggcagcacccgtgcccgccacttggagacagagttcagggcgatatccagcagccggtgatcgatgtaggggttggcgaaccgctcctccaccgcacgggcaaaggcttcgcagtcctcacggggcagggatagggtggggatgatctcctgaaacagcgccccctccagatacgcccggacggcctcgtcctccatacactcccggacgatgttgtggcccgccagataggccgccagcaccatgctggtgtggccgccgttcagaatgcggaccttctgctccttataaggatggtggtccgccacgaacttcaccggcagccccgccttttgggcgggaaactcccggctcagggcctcgtcgccctcgatgacccacagcccgaagggctctgcggtatccagcagggcatcctcatagccgttctcggcattgagccggggagcctgagcggcaggatagccggtgacgatgcgatctaccagcgtattgcagaaccggttctcctcccggagccagtgcaggaaatcctcctccagtgcccagtcggcggcgtggcgcagcacggtgtcccgcaggacggtgccgttgtcggcaatgagctcacagggcaggagaatgagacccggttttccggcgtaccagcgctgccacagcagccgggtcagcttggcggggaaggaggcgggcgggcagtcgtcaaagcgacaggcgggatcgtagacgatgcctgcctccgtggtgttggaaatcacgaaccgcagttcatcgctgcacacaaaatccagcagctcccgccactgggtgaacacgtccagtgctcggctgatgcaccggatgagccttcgctgatcgactacctgaccgttgagccttccccgcagatacagctgatacagcccgtcctgccggttgatgcgccccgtcttgccggtggaggctggagggacgatcaccacgctgctgtcaaagtccgccttttcgttcatctgatcgatgaaatcatccacaaagcctcgcaggaagttgccgtccccaaattgcaggacacgctccggcattcgccgggacagggacgcctcggtgcctaaggttcgatagctgagcagttccatagccctacctccatgatatatctgtaatatatcatactctgcgttgcgtggactgtcaatgctcattttcaccgctataggcgatggagggaacattttccggcccattgccgtcctataaaaggaaagaccggcggcgcaaggagctgcttgggcaaaacacagtgaaattaaaggagaaatgacatgaaaaagatggcactgcttttagcggcgctgttgctgctgagcaacttggcgggctgcggaaaaagcagcaagggcaaggcgtcggtggaatccgtatctatgatctgcggcctgagcggcgtgggacaggcggatcgcttcgccggagtcgtcagcgctcagggcgagacgaaggtggagaaggatgacagccgtcaggtggcttccgttgccgtaaagaccggagacgaggtgaaaaaaggccagaccctatttacctacgaccagacgcaggcccagttggatctggagaaggcccagctggagctggaacagatgaaaagtaccctcagcgccaagcaggaggagaaagcccgtctggagcgggacaagagcaacgtctcggcagatcagcagctgcaatacgatctggagatccgggaggccacggcggccattctggagcagcagtacaacatcaccctgaaggagaaggaggtgcagcgcctcggcaacagcgtcggcagcgccgacgtcacctctccggtagacggccgggtgcaggcggtgaacgagaacggaggcaccgacagcaacggcaaagccctacccttcatgaccatcgtggagacggcaggcttccgtgtgaagggctacgtcaatgagaacaatgcgtcggccctgtccaagggggcggaggtgctggtccgttcccgtgtgggcagtgacgtctggaagggcagcgtcagttctattgattggaagaatcccaccaccggtagcaatcaaaacaccatggacggcggcagcgacgtgtccaccgccagcaagtaccccttctatgtgacgctggacagcagcgatggtctgctgatgggccagcacgtttacatcgagccggatcacggtcagggccagcggcaggagggtatccacctgcccgcctattacatcaatgatgccgacacctccccgtgggtgtgggcgcaggataagaatgggaagctggaaaagcgcagcctgaccttgggtacctatgaggagacgctggccacctatcccgtggagagcgggctgacgacggaggattatatcgcctacccggatgagacactgacggtgggaatgatctgtgttccctatgaccagcgcacctttaagccggacgacagcaatgcatcgggtggcggcgttaaacagccggagagtggtggcggtgccgtaacggacggtgctgccacagataacaccgtgacggagggctgagcatgatccttgaaatgcggaatatctgcaaggactaccccatgggcaagaccgtgacccgtgtgctgcgggacgtgagtctggatgtggccgagggagaataccttgccatcatgggaccatccggcagcggcaagaccacgctgatgaacatcatcggctgcctggatgagcccaccagcggcagctatctcctgtgcgggcaggatatcaccgcctgcacgaacctacagctggcgcaggtgcggaatcaggagctgggattcgtgttccagtcctttcatctgctgccccggttgacggcgctggataacgtggccctgccgctgctgtacggcggggtgaaaaaggcagagcgccgggagcgggcccgttcggcgctggagatggtgggcctcggcgaccggatcgaccatcgaccggaccagctgtccggcggccagtgccagcgtgtggccattgcacgggccatggtgggcggccccaagctgctgctggcggacgaacccaccggcgctctggattctgccagcggcgcacaggtcatggagctgttccgtcagctccatgaaaacggtgccaccatcatcatgattacccacgatgcgcaggtggcgcagcaggcccagcggatcatgaccatccgggacggtgtcctcagcggaggtgacaaccatgaacagtaagctcaagcggccgctgctggcggcgggtatcgtagtgggtgtgtgcgctctggtgtggggtgggctgacgctgcttcgcaacggcagccgcagcgccgtaaaggtctatcccgtgacagaaatcggcatgacggagtatgggggtgacaccacggaaaccagcggtaccgttaccatggataagctccagaaggtgtacctctccaagacccagagctctgcgcaggtctatgtgacggagggccagacggtgaagaagggagaccgcctgctgagctacgacagcaccctgacggagctggacgtggagcgggcccgcatcgctctggagcgcctgcggctgcaacaggagaacacccgcaaggaactccagcagcttcagctggccgaggacaaggagaagctccagcagcaggcggatgcgctgtccgccaagatcgagaagaagctggcggaatccaccgacgagatcatccgccgggattccaagcccatccagcccggcaagcccctgctgcgtggcagcgccgccggtacggcggaggatcccctctactgcgactggaacggcggcgacgccctgacggaacagaacctgtcggtgctgctgccggaaggggagaaggaactgtatgtggtgctggtgacccaccggggcgacgagacactgggggacatcatcggcagctggggcctgcacctgatccgtggagagaacggagccatctccgtgtcgctggcggagcttccggcggcggaggatatctccgtggacggcaccaccgacgagatacgtcagctgcgcaaggagctgcagcgggtgcaggagctgttgagccgatcctataccaaggcggagctgctgcggatgcagaacgataaactccgggagattcaggaggcggatacctccatcaaaatggcggagctggacctgcgtaaaaagcagacggaggcatccgacggcagcgtgtacagccagctggacggcgtggtcaaggccgtccgcacccccacggatgccgccgccaataacgaggcggtggtggaggtttctgccggtggcggttattatgttaccggaaccgtcagcgaattgcagctggacaccgtgaaggtgggccagaccgtgaccatcagctcacggatgaacggaagcacctgcaccggcgaaattgtagagatcagtacctatcccgcagacaacgcctcctcgtggggtggcggaaaccccaatgtatcctattaccccttcaaggtgttcgtcagcgaggatcagcagctgcaggagggggagagcgtcagcatcagctatcaggcggtatccgacagcgacggcagcagcctgtatctggagaatatgtacgtccgcacggagaacggcaagagctacgttatggtccgtggcgagaacggcaggctggagcagcgctgggtccagaccggtaaggtggtgtgggatagctacacgcagatccgtggcggcctgacgcaggaggactatgtggccttcccctatggccgggacgtggtgtccggggccaaaacggaggaatccaccgtggctgtccagtacggcggataaggaggcgatcactatgttggaaaatatcaatctggcgctgcaaggcgtgtggagccataagctgcggtcgtttctgaccatgctgggcatcatcatcggcattgccgccatcatcaccatcgtttctactatccgtggcaccaacgagcagatcaagcagaatctcatcggtgccggcaacgatatggtgcaggtgcagctgactcaggacggcagcgtcgtggatctgtcctacggggagattccggagggcatcgccaccatcacctccgccatgcgggatgaaatggacgccctgccgggtgtttctgccgtggccatgtaccaccagcgcacttgggccgacggcatctatgctggcaacaattcctttaccggcaccctcaatggtgtggatgatcactatctctccgtggcggggtatcaggtgaattacggtcgggccttcctgccggaggatttctcctcctgccgcaaggtggccgtcatcgacacggcggcagctcagagcctgtttcccggacagaaccccatcggcggcgtcatcgagatgcagggcgaacccttcaccgtggtgggcgtggtgagccagagggtcacctcccagccggtcatcaacagtgtagaggattatcagatgtacgcccgcaccacctccggcaccgtgatgatcccggagagctgctggcccatcgccttccgctacgacgagcctatgaacgtggcggtgcgggcctcctccaccaatgatatgacaaaagccggcagcggcgtggcggactacctcaacggaaaggtcgtgagcggcagcaaggcggcctatcaggcgcaggatttgctgaagcaggcatccgagctgcaaagtctgtcggagaccaccaaccgccagttgatctggatcgccgccatttccctggtggtgggcggcatcggcgtcatgaacatcatgctggtttccgtcaccgagcgcacccgtgagatcggcctgaaaatcgccatcggcgcccggaagagccgcatcctctggcagtttctgacggaggcggcagtgctcaccagtctgggcggtttgctgggcgtcctgtgcggtatcggtctggcggagatgctgagccacgtcatgggtacggcagtggccatcagcgccccggcctgcatcgtggcggtggccttctccatggtcatcggcatcgtgttcggtttggtacctgccatcaaggcctcccgcctgaaccccattgaggccctgcgccgggagtaagcactgtccccaagtcccttcggaggctccggagggactttttccctcccgcaggcgctttcccttgacacacgtccctcatcccgttacaatggagaaaaatatgcactttaaggaggaactccatcatgaccattggtctggtatacgccatgcccggcgaaatagagacgctgctgacagacgagacccgcactcccatccgcacggaggcgggcgtgtccttttatcagatccgcccccatatcatcgcctgctgctgcggcgtcagcaaggtcaacgccgccatgggcgcccagctgctcatcagcctctaccacccggatctggtgctgaacgccggtgtggccggctgcttcgtgaatgtccccatcggcaccatcgttctggcggagggcttcgtgcagcacgatgtggacaccaccgccatcggcgatcccgtggggctggtgtccaccgtcaaccagattcagttccccacggcggacctgcctgccgccagggccgccatggatgccaccggcgttccctaccgtaccggctgggtggccaccggcgactggttcgccaccgataccccccgctcccactggatcgccgataccttccacccgctgctgtgcgagatggagggctgcgccgtggcgcaggtgtgcctgcggaacggggtgaagttcatggccatcaagtccgtatcggactgcctgtttgagcaccacgacttcgcgttcaacttccccgccgccatgaaggatctgaaccgtgtggtcatggccttcctgacccaactgacaaaggaatgagagaagggaggaaatggagatgaattatacggaagcactgctgcgagcaattattgaactgattggacagtgcgatacgatagaagaacttcgtgaaagcgtgaaacgcatcatgcaggactaagttcaagcacagcgattctactcaaaaatctgctgctctgcacgaaaaaggcggcatctcacacatccaagtcagagcacacagcgtaagctgtgtgctctgactttatccttatcgccccagcagatagccccaactggcggcccccaggataccgtccacgccgaggccgtggtcggcctgcattttccgcagaccggcctccattttggccccgaacagcttgtcactgacggggatggcgtaggggtagtaccccttgtccttcatcagcagcatggcgctccggacgtcgccgccctccatgccacgcttcagcatacgcagctccacggtcacctgttcctccttcctgatggtcggcgcaggagacggcttggccgtccccggcgcccggtacgggatgccgaaatactcgcacagtccccggcaggtagcctctgcaatggcccccagatggctgtggaaccactgggcgtcggaggcgttgtcgtggaacacgtgttcctcatagaagctcaccgccgccggagcccgcagctcgtaccacacgctgctctccgacagtcggatgggctggtcgtagattttccggcgatacttcaggatacacgccgccagctttcgcccgccgccggagccgggatagatcatgggccggtagccccggacgccgccgttggcggcgttggtgtggctgacgtagtggacgtcggcaccccacgcatcggattcccgtaccgcctgcagcatcagggcgtccccgtcctcaccggacttgggcgtccgtcgtggcccccgcttatactggatgccgcaggctgccagatacggctccagcacatccagatagaggttgttgtgggtggtctcgtcgcaccccgccacggcacagggattccagtagtgatacgccggggacagatacaccttaggcatctccgcccgcctccttgctcagctgcttggccgcctgatgcagccccgtggccgccagaccgctgacgatgcccaccgccgcagcggtgatagggtcccccgccggatagtcggggatgggcagcagatagaagctcaccagccccagcagcccgcccagcaggccgcagagaatggggatccacttgttgtccatccggctggcccgcacggccatgcccatgagataggtgatgacggtgatggccgccacgctggcaatacccagattttccataaaagccctccttatgatacaatgtcccaggtcttgacctcctgatagatacgatcgatgaaggaattgccccgcagggccttataggcccggtactccagcagaaaattctcatactcatactgccggatggcggagtgctccctgttcttataatatgtatgcagcatattgctccgcaacaggcatttctgcccctcccgcaggtgcttcgtccccgtcagcgcctcccgcaccggccgcagcagcaggatcagcgccgcaccgattccggtgacgcaggaggagatgcccgccagaaccgttagcagctccataccgccgcctcccctcgtattgtctccatgttctcacacccccttctgcctgtggcgtccccgccgggaaagttgtaccgcctgttgccctccaccggacaacagggaaaaatttccgggctccccaacaaataaaaaaggagccgactgcatagcagtcggctccttgcgtcaaacaagcttacttgttcttgttctcctccacgatggacagggtgtcctgagcgatcatcaactcctcattggtggggatgaccatcacagtgacaggggcgccatccttggagataatgcgctcctcaccacggacatcgttcttctcctcgtcgcaggtaatgcccatgaactccagaccctccagaatgtgagcgcgggtggagggggcattctcacccacaccggcggtaaagaccaccacgtccacgccgttcatggcggcggcgtactcagcgatcatcttgtgtacacggtactcaaagatccgcagggcgatggcggagcggtgatggcccttggcggcagcggcctccagatcacggaagtcggaggacacaccggacaggcccatcatgccggagcgcttgttcagaccttccatcacagaggagatggagcggtcgtacttgttggccacatactcgataacgcccacgtccatgtcgccggcacgggtacccatgggcagaccggccagcggcgtcagacccatggaggtgtccacgcacttgccgccgtccacagcggccagagaggagccgttgcccagatggcaggacacgatcttcagatccttgggatccttgcccagcagctcggcggcccgcagggtcacatagcggtgggaggtgccgtggaagccgtagcggcgcagcttgtcgttctcatagtacttgtaggggatgctgtacagataggcgtgctccggcatggtctggtggaaagcggtgtcgaacacagccacctgcggcacgtcgtcgcccagcaccttgcggcaggcctcgatgccgatgatattggcagggttgtgcaggggggccagaggcgtgcagtcctccacagccttcagcacctcatcgttgatgagcacggaggaggcgaaggtctcgccgccgtggaccacacggtgacccaccgcatcgatctccttcatggaggagatcacgccgttctggggatccaccagagcgttcagcacggtctggatggcctcggagtgggtgggcatggccacatcggcggccttgatggtctccttgccctccacctggggcttgtaggtgaatttgccgtccagaccgatgcgctcgcacaggcccttggcaaagaccttgccggtttccggatccatgagctgatacttcagggaagagctccccgcattgatgacaagtactttcatgatgaaattctccttatctttttgtttccgaccccacaccatggggagtatatcgtgataatgatagcataccgccccagcctttacaagcgttattttcttcacaagagcctctctgccgccgcctcccgccggaaaaaacttcaaaaaaatccgattatcccgttgacaaagggcgtgaaacatggtaacatatcaaagctgacgattttgcggaggacccatgcgggtgtagcacaatggccagggcaccagccttccaagctggggatgcgggttcgattcccgtcacccgctccactgactttatttgcgccagtagctcagttggatagagcaactgccttctaagcagtaggccaggggttcgagtcccttctggcgcgccactcttttgctgaaggagcatcgtcagcatcccttgcggttcatatttggtgggtgtagctcagttggttagagcaccggattgtggttccgggtgtcgagggttcgagtccctttacccaccccactgaatatcagggattgggagagatcccagtccctgatcttttttcacacaggggtgtagccaagtggtaaggcaagggactttgactccctcactcgctggttcgagtccagccatccctgccaaagtgtatccggagggtcgtaccggtatgatcggctgcctgccctcatgcgaaaataaaccgtccgctccgttagctcagtcggtagagcacctgccttttaagcagggtgtccggggttcgaatccccgacggggcaccaaaaagagaagcaccgctttgcggtgcttctctttttggtgcctgtcggtttttgctgtgcaaaaaccggggccgcaagcggcctttgattaaaatcgtgagggggaaaccgcccaaggtttccccctcacacgtccctttccttgcctcatagggaagcgattccctctaacaccacaaagctgggcattccgcatggtgcgtctctttttggcatctggtggattcgaaacgagctccggcttcgcacggcccaacgggacgtcgaagccggacgcaatattccacccgcccaccggggcagcatcccccaatttttctgttggaaaaatcggcgcacctgtggtataatatcctgacatcatacagcaaacgaagatttgcggagggatcaccatgaaaaacatcattcttaccggcgaccgtcccaccggccgcctgcatctgggccactatgtgggctccctgaagcgccgggtggagcttcagaattccggccgcttcgacgagatcaacatcctcatcgccgacgatcaggccctgaccgacaacgccgacaaccccggcaagatccgggagaatatcatcaacgtcgtgctggactacctctccgtgggcatcgaccccaccaagtccaccatctgcgtgcagtccaccctcccggcgctccatgccctgaccttttactatatgaatctggtcaccacggcacgtctctcccgcaaccccacggtgaagtccgagatccagatgcggggctttgccgacgagggcctgccggtgggctttttcgcctatcccgtctctcaggccgccgatatcacggccttccacgccaacgtggtgcctgtgggcgaggatcagcttcccatgctggagcagacccgtgagatcgtggagaagttcaaccgcatctatggcgagacgctgaccatgcccaccgccatgatcccggaaaacgagatgcagcgccgtctgccgggcgtagacggcaaggccaaaatgagcaaatcccttggcaactgcatctacctgtccgacagtgccgccgtggtgaaaaaacagatcaacggaaagatgttcaccgaccccctccacctccagatcagcgatccgggccacaccgagggcaacgtggtgttcacctatctggatgccttctgcaccgacgagcattttgcggagttcctgccggactacgccaatctggaggagatgaaggcccactaccgtcggggtggcctgggggacggcacctgcaagaaattcctcttcaacgtgctggaggagacgctggcccccatccgggaggagcgggccagatgggcgaaggacatcgatacggtgtacgatatcctcgccgccggcaccgtcaaggcggcggagaccaccaacgagacgctggcgcaggtccgcaaggccatgcggatcgactacttcaccgaccgctccatcgtgaaggagtgggagacccttctccgcaaggccaaccagtgacccacagaaaggaacgacttaccccatgaaaaacaaaagagagtggggacgggtgctgaaattcaccctgttctccatctccgccggggccatcgaaatggcctcctttgccctgctcaatgagctgctgcacgggagctactggccctgctatctcatcgctctgaccctctcggtgctgtggaacttcaccctgaaccgaaagttcaccttccagagcgccaacaacgtcccacaggccatggcgctggtgctgctgtactactgtgccttcacgcccctgtccaccctgctgggcagctatctggcggataccctccattggaacgagtatctggtgacgtttttgaacatggtgctgaatctggtcacggaatatgtctatgaccggctggtggtgtaccggggcgccgtggacaccgcccgctgtccggagaaacagccggcggaggactgccaatagagcgcccgtaaggaggagcctgccatggagtatttgggcatcccgttttccgtaaaaaatgtcccctgcctgcagccggactttctgccctttgccccgtggcggacggcctatctgtcccaggcccgacagcccttccgcatcgccgtggaggggaacggcaccgtggtgtatgagacacgcatccgtggcgggagccctgccgacctgcgatatctggagcgcaccatcaagctgctgctgtggagcgtcggagggtggcgggtgacgctgcagggggacggagttctgatctcccagttgggggagatcttcagcccccacggctcccgtgcctttgacgtggccatgatggagacggtgtacggccgcccattttgcgtggagacggcgggggagcgctttccggagccccgaccggcggcccgccccataggtgggcacttggagggctgccgcatcggctttgatgccggcggctctgaccgcaaggtctccgccgtggtggatggccgcaccgtctactccgaggaggtgatctggcaccccaagaccgccgccgacccccggtatcatcagcgggaggtgctctgcgccctccgcacggcggcggcccatctgccccgtgtggatggcatcggcgtctccaccgccggcatcgtccggggggacgagctgatggtgtcggcgctgctggctgccgtcccaccggagcgccaacaggagggacgtaccctctaccgcagagccgcagccgccatggggaatgtcccgctggcggtggccaacgacggcgatgtcacggcgctggcgggctatatgagtctcggtaccggccccgtcatgggcatcgctatgggaaccagtcaggcggcgggctatgtggatgcacagggccgtgtctccggctggctcaatgagctggcctttgcgccggtggatctggcagaggcggcccccagagacccgtggtccggtgataccggcgtaggggggcagtacttttcgcaggacgccgtgatccggttggccgctgccgcaggagttcccacagatgcggccctgaccccggctcaacagctgcggcaggtgcaggagctggcccggcagggccatcccgctgcccggaggatcttccgggatatgggggtgtgccttgcccatacgctggccctgtatgctgaaatttacccgctgcgccatgtgatggtgctgggccgtgtggcctccggtatcggcggggagtggatgacggagatctgccgccgtgtgctggcggaggagtaccctcagctgccgctggaggtgctgctgccggacgatcgcttccgccgcatcggccagtccgtggccgccgccagtcttccgcaggtgcgcccgtaacgctgccatccccgaatcggcagatctttccgaacggtgtgtgccggttggaacgccttgctcaatgaggtgtcctgccaaatggtgtaccctgccgagtggaacaccctgccagatgggccgccttaccaaatgcggcaccgtgccgggtgaggtggcttgccaaatgacttatcctataaaccgtgaatttccatttttttgttctgctcccgttgccggtcggcagactatcgaatgaaaaaatatcagaatgaccctccggcaaaagccggagggtcattccgttgatcgttcttcttgatgacaggtggagttacttcgggaccgtagcgcagatcgctccagacggtccgaaatgccccatgatcggacatccggttttccagtgccgtttttgccgggtattgcagaaatctgtacggatagctgtaattgaaccggctatccggcacatttcggtattctgcgtgaggaatttcatcggcggcatagaccacatagccccgcccgtgctgtgccgcagtggacagagaaaatgtcccgaaaatgtcccgctgtccatagatgccctgatatccgtagggggaggtatccgcctccagagagtggtaggacgcccggaaggtctccccgtcccgatcgtacagaacccggccggcgacctctccggcggcgctccacagctcatccgactggtataccggcagagctgtatggcggctgtcccatggaagggcggagccgtgttccagagaaagtggtggaagatcatccagccggcaggctctcccgtcagctttacccgtaccccggttatgcacagcgggttggagccgctgctccggcagaagcctcccttctggtcgaactcctgaacgctgaccactacctgtatggccccacgacaggcctcgatctcctcccgccgcaggagccggaagcccagtagcatcagcaccagcccgatgccgggcaaaaggtagttcagtccccagagattcgtccccagggcggtcagggccgtgcctgccagcacccggcccatggcccgcttccacggagtgaccgccgccttatccggcaggcgctccggtacgctggcctgcaatgcggcctcgaaggccttttcgttcagagagccccagtcctccttaggcaccctcatcacctcccggcaatttccgcagctgccgtttcagccggtatagccgtccctccaccgcccgctccgtaagccccagctccaaggcgatctgggcggtggagggcagatagtagtattttcggtaaaacagaagccgctcaccggcggatagctgctccagcgccgcttgcagggcggtctgccgctcctgacgcaaaagcacttcctccggcgtcagctccggggaggggggatcctccgacagggcctcggccccgccgtgccgggagatccgccgggcgtgattcagcgccgcatgacgggtgagggaggtcagccagccattccagcttccccgctcctcctgaaagggatcgattttctcccagacccgcatggtcacctcggaaagacactcctcccgctcctgagggtcccgcagaatgggaacgatgacgtatcgcacagcggcccatcgtgtaccagcagggcgtgcagcccctgctcgtccccgctcacgcagcaaggcgatgatcttccgctcctgcatacggtctccctcccttcgcttctactggatcatacacggtatccggaaaaatcccacgttttttgcggcagctgtcaaaaaaggatgaaccacagagaacatggttcatcctttttcatacattattcatccgttcttacggtagactatccactccagcagccgaacggtggtgttgcccacgttgacatactgccgctccgcctgccccggcagggagaggcagtcccggctctccagtcggaacacttcgccgccgcaggtgacctccaccgttccgctgagcaccgtcaggtacacatgagagccggggacgtggtccgccgcttcataggcaccgctgatgaaaatatccatctggcagctctcgctgcggctgtcggtatcaaaggggaacaggggatagcggatgactttgccgccgtagaggcgctgcccggccacgtctaccgcccggtacagagtggcgggagcctcctcacggttttcaatgagcagctccagagggacgtggagtccggaggcgatcttgcccagcaccgccagggtggggttcacgctgccacgctctacctgcccccacatactcacagagatgccggccagctccgctgcccgatccatactcagtcgctgggacttgcggatgcggtgaatatttccggccacagcctgatgcagttccataccgtttcctccaatattctgcctgttttctctatcatattactgaaatcgggcagatttgtcaatacctgacggtggaatatacagaggatattcggcagtatccgcttgggagaagtcactctgcgtgccggtgggggtgagtttttccagcggtcttttctttttatgcctccggcgggtaactttctttcaatagcgaaagaaagttaccaaagaacgccagcagaaaccgatggtttctgcacttcctttgtcgtgtgtaagagttgcaacttaactcccgccgaaacagggaattgactcagcaacagacccgctgccgctcctgctctgatgaaggagcgttgggtctaccgccgggggatacggattcccacgaccagtctgcggactggtctcggaatgacagaattatcttatgagagaactcccagcggccgaacaagacttgtgccttcttgacgtgtcattgcggaaaccgccgaagcgccgcctgtggcggaagcagcaaggcggtttcgaggaagtgtcccagttttcatgccacaacgtggctggaaaccggctgacacgacggtgaatctttctgccgctattggcagaaagtcgccggaggcaagaaagaggctgttgggaaaagtaggccgccggaggcacgtttcctatgtaaaaaagcttattgaaagaaagttacccgccggaggcacgaaagaggctgttggcaaaaagtatgccgtcggagacaaaagaggaaagaactgccggagagtagggtgccgacaacataccatcgatgaacaagggcaagtacacctgccatcgatggtaacaacaggggaaggagaaaggctgtgcctttctccttcccctgatttattgaagcgttatctcttccagcgcacaccaccggggatgtccgtgatctccacgcccatggccttcagatcgtcccggatgcggtccgcctcggtgaagtccttggccttcttggcgtcgtagcgggcctgtagcagggcctccacctgagcatcggtttcaccgctctcgctgacgatctggaacccgccggaggccggagcggtctgcttctgctctgcctttttccgggcggcattctccagcagatccagactcagcacccggtcaaagtccgccagcacataccgcttggtggccccgttggtcttggccttcagcacgtcatacagcaccgtcaccgccatggaggtgttcaggtcgttgtccatggccgtgcggaacttctgctgcaagggcgctgccgccgccatatccaccgcaccgtcctcctccggcagggcggcgatcttggcgatgagcttgccataggccacggcggcgttgtccagattctcccagctgaacaccagactcttgcggtagtggctctggaggcagaagaaccggtataccaccggtgcatagcccttctcctccagcagggacaccgtcaggaactcgcccttggacttgctcatcttgccgttgctggtgttgaggtgggccacatggcaccactgggggcaccaggggtggcccagatagctctccgactgggcgatctcgttggtgtggtgggggaaggcgttgtccacgccgccgcagtggagatccagatactcaccgttgtacttcatggagatgccggagcactcgatgtgccagccggggtagcccacgccccacggggaatcccacttcagggcctgatcctcgaacttggacttggtgaaccacagcacaaagtcgttcttgttgcgcttgttcacgtcctcctccacgccctcccggacgcctacggccagatcctcctcgttgtggtcgttgaacacgtagtaccgctccagcttgctggtgtcgaagtacacgttgccgccggccacataggcgtagcccttctccagcaggcgggagatgatgcggatgtagtcatcaatgagccccgtggcgggctgcaccacgtcggggcgcttgatgttcagcttgcggcagtcctcgaagaaggcgtcggtgtagaactgggcgatctccatgacggtcttgtgctcccggcgggcgcccttgagcatcttatcctcgccttcatcggcatcggaggtcaggtggcctacgtcggtgatgttcatgacccggttcacatcgtagcccacatagcgcaggtacttctccagcacatcctccatgatgtagctgcggaggttgccgatgtgggcaaagtgatacaccgtggggccgcaggtatacatctccacgtggcccggcgtgtgggtccggaactcctccttcgtatgggtggcagaattatacagatacatagtcaagctccttttggctgcaaattttagctgcaaaattcggaaagctccgtgcagaacagaaaacgcctcccatgcccgcaggcatgagaggcgaagcggctgctccacggttccactctcgtttatcgctcgatggccggtgacggcggcctgccggagggcgtctgcatcccccgcactcccggacgcactttcggcccttgctccgcaggacggcttgcagccggtggccatccctctctgcccggagcgccgggcgtactctttccgatcaacgtgctatattacgatgcttatggtatcaggatttcccgccggtgtcaagtacggcttttcccggcggggtacggttgacgctgatccatattcaggtaggtgcgctgatagtgccgcaccagtccggcctccagatcgatggtcttgacggcgaagatctgcgggtccaccagaacgtccttagggagggtgatatcataccgggccaatgacagctgggcatcctccgagagtagaccgccgcagggcttggagaggtcgctccgatagatgacggcacagcgcatggagcggggcagcagccgagccagtgtggcaccggccgggccgccgccgatgatgagatcaaaattcgtaggcgcttacttacttcttctcctgaaacacatcccagtttttggcgaagtactccacgccggagtagacggtggtcaccagaatgacaccctggcacaccagattcagccagtgggggatgccgaagagcatcaggcagatgcacaccatggtgctggcagtcttgaccttgccggaccagcctgcggcgatgacccggcccttctccacggcaatgagccgcatcccggacacggcgaattcccgcagcagcaccacagccagtacccagcccaccatgtcaccggtctccacgaaccagcacagcgccgccatgaccagacacttatccgccagcggatcggcaaacttgccaaagtccgacacctgattatagtgtcgggccacatatccgtccagcaggtccgtcaggcaggccagaatgtacacccccagcgccacatagcggctgccggggaagccccagtatgcgatcacaagaaacagcgggatcataaacacccgtgcaagggtcagcttgttggcagtgttcataggcatagctttattcctcctcagaaagttcctccaccgcttcgccggtgaggtcaccgtccatggcgccggtgatacgcaccatgacaaagtctccgggctccacatcccgctccaccgtaaagaagatgcacccgtcgatgccggggctctcggcgtagctgcggcccacatagctcatggcctgagtgtcataggcgtcgcacagtacctccacggtgtcgcccatgcggctgtcgttgaactcgtccatgacctgtgtttgaatctccattaccagctccgcccggcgctgggcctcctcggtatccacccggttcagcatcttggccgcaggagttccctcctccggagagtaggggaaggcccccacccgctggagcttctgctcgcccaaaaagtcgcacagctcctcgaaggccgcctcgtcctcatagggcagtcccgtgatgaggctggtccgcagcaccacgccggggatgcgctcccgcacccggcggaacagctcctccagcccggccttggtttcccggcggcgcatggccttgagaacggtgtcgttgcagtgctggatggggatatccagatagttgcagatctttgcctccccggcgatggtgtcaatgagctggtcggagagattgtcggggtagagatagtggagccgcacccagcggaagggaagcctgcacagctcccgcagcagctccggaagccgccgctctccgtacagatccacgccgtagcgggtgatatcctgagcgatgacgatgcactcctgcaccccgtcctccgccagcgcacgggcctcctccagaatgtcctccatccggcggctgcggtagtttccccgcagggaggggatcacgcagtaggcgcagcggttgctgcacccctcagcaatgcggagataggcgtactgccggggggtggacaacacacggggcagctcctccacggggccgttgatgtcggcaaaatggcggcactcctgaccgttcaccacctgctccagcgccgtgacgatgtcaccgaagcagccggttcccatgatgccgtcgatctccggcaactcctccagaatgtccgcctgataccgctggctgagacagcccgttaccagaattttgcccacctcaccggcggccttcagctccgccgccgccagaatggtatcgatggcctcgctcttggcgctgtcgatgaagccgcaggtgttgatgaccaccacgtcgctgccggagcaatcctcctgcacggtatgtccggcctgcaggcacagggccatcatctgctcggtgttcacccggtttttgtcgcagcccagggatataaatgatacattcatgctgtgtttcctctgatgtttggtatgtggatttgtgatcttgcaaaggagcattcaaggagatgctctctggatagacgatgaaaatgtgatctgctcccgccggagacaataagaagaatgatcggcaaaaatatgccgccggaggtggttttgcataggagcaatttacctttgggaagggattctccctattcctccgccatttcctcgcccagacggttcagcaccggacggatctcctgccaggaaaagccccgccgctggagagcggcagccagcttgcgctgcgtctctcgatcaaggggcttccctttacacttgctgcggataaaacgctcgatggcctcctcgccctccggcagcagggccagcgcatcgtcccacagctcctgtgggatgccccggcgctgcagctcctgccgcacccggccggggccgtagcccatggcggcatagtgccgggcaatggcggcggcgtaggccgactcgtccacggcccccaactcctccagccactgggctgtatcctccgccagctcccggtcgccgcccttacgggtcaggtgctccatcacctgctttttcgacagcattcggctgccggtgagtcgggcgccacgggccttcatctccgaccgcttggcggactgctccacctgcgccaacagctgctccggcagctccagaccgggccgcagcccgaagaccagcagctcctgctccgttacccgcagcaggtcgcccccctccagaaacaccagtacccgatccttcttgcggcgggagggctcgatgcgatcaatccgcatcgtcgaagtcgtcggcggatacatccaccgcacggcctgcggcccgtgctgccaccttggactgattgctcatcagcttgtggaagtcacggcggatgttggcctccagtgcatcggcctcgtcgggatgatcccgcagatattgcttggcggcatcacggccctgacccaggcgcacctcgcccatgttgaaccaggagccgctcttctgtaccagatccagcttcacgcccagatccagcatctcgcccagcttgctgatgccctcgccatacatgatatcgaactccgcctcccggaaggggggcgccaccttgttcttgaccaccttggcgcgggtgcggttgccgatcatctcgccgccggacttcagcgtctcgatgcggcgcacgtcgatgcggacggaggcgtagaacttcagtgcccgaccaccggtggtgacctccgggttaccgtacatgacgcccaccttttcccgcagctggttgatgaagatgaccacggtgttggtcttggcgatgatgcccgtcagcttccgcagcgcctgactcatgagccgggcatggagccccacgaagctgtcgcccatctcaccctcgatctcggcacgggggaccagagcggccacggagtccaccaccaccacgtcgatggccccggagcgcaccagcgcctcggtgatctccagcgcctgctcaccggtgtccggctgggagatgagcatatcctcgatcttcacccccagcgcacgagcataggtgggatccagagcgtgctcggcatccacgaaggccacctcaccgcccattttctgagcctgcgccagaacgtgcagagccagcgtggtcttaccggaggactcaggcccatagatctcgatgatgcggccacggggtacgccgccgatgcccagcgccagatccagcgccagagaaccggtggggatagcctccacattgggctgcacattgtcgccgtagcgcatgatggaacccttgccgtaggttttttcgatttgctgcatggcggtctccagcgcctttttcttgtcggagaccacgggagcagctatcgaactgtctttcttcgctgccatgtttcttcctcctgtatcaatgaaaattttcgtggtaaatgggcagaggcccatcgatttacaaagtcgtttcgtcggccatcaggcgtcggcatagacctcctgatagcgcagacccgtcaccacacgggggatgcccgccggatccggcaggatctccagctcaccgaagccctcgctccgcatgagccgcagcacgtcgtcggcctgcccgatgcccacctcgaaggccaggcggctcccggtgtgcagcacgtcccgccagcggcggcagacgctgcggtagaagtccagcccgtcggtcccgccgtccagcgccagatgaggctcatagtcccggacggagacgtccagtccggcgatgtccccggagggaatgtaggggggattgcacaccagacagtcaaaatcccccagccggggaggcggatcggacagagcgtccatctttaaggacaccacctgtccgctgaggctgttgcggcggatattctggcggcagatccgcaaggccccctcgtccagctcccccagcaccacccgtgcgccggggacctgactggcgatggccagaccgatgcagccggagccggcgcacagatccagcacccggcactccggcaggggccgcagccacgctaccacgtggtccaccagcgtctccgtgtccggacgggggatcagcacgctttcggagatgtccagcggcagcccgtagaactcccactccccgatgaggtaggccaccggctcccctgccagatggcggcgcaccagatccttcgcccgctcctcgatggccggagggacatacagctgcccatcctgcaccagctgactgcaggtcttgccggaggcgaaacacatcagctcacgggcctccagcgtggcggcctcgatgcctgcccggcggagagtctgccggatatccatatacaaattgttgtaagtagtcgccataatacgctccgttgtcatattttgagcttttcaggggagaacggccgggaatttctcaccagcggtccttgcccttctcctccggcagcaccagcttcaaggcctcaatggccacctccagcatggagtcgtccggctcgttgacggtgaaattctggagccacataccgggggcagacagcacccgtgtgagggcattgtcatgccgccccaccagccggttgaattcataggtgatgcccaccaccgggatcagcagcaacagatgcattccgatacggacccagatgttctgccagttgacgtagctgaaaacgacactgctgcacaggatggacacgatgatgaccacaaagaggaagctggtgccgcagcggggatggtgcttgggctggatgcgggcgttttccaccgtcaggggcaggcccgcctcatagcagaaaatggtcttgtgctcggcgccgtggtagcagaacacccggcgtacatccttctgcttggagcagaggatcagataggccagaaagatagccaccttgatgacgccctcaatgagattgtggagggcggcgttctgagcgcggaacagcccggccacgaaggtgggcagcagcatgaacagcaccagcgtcatgcccagcgacagcagcaccgacacccataccagcacgttttggagcttttctgccggaacgtgcttttccagccacaggtccagcttggagggctgggcggcctcgtcgtcggggaagtagtccgccgagaacatcagggccttgacgccccggatcatggagtccagaaaggtcacggccccccgcaggatgggaaggcccagaatggggtatttgtccttgataagtgtcagctcctccaccttggtcacaaggccctccggggagcgcaccacaatggcctgcttttccgggccacgcatgaggatgccctcaatgagagcctgtccgccgatggaggtgcggaatgtaccgggtttgtgttccatagacgatgtaagttcctttccgtaagtatagcacttgctcgaatgaaatgcaacaactgttctatctctatcgatgctccgtgtggggcggaatgggcagggtaatggtcaccagagcgccgccgccgtcggcgttgccgatctcgaaggtgccgccgtggcgggtgatgatctcatcgcacaccgccagaccgatgccgctgccacgggccttggaggagcccttgtagaatttctgcttcacatagggcagctccgccggggggatgccggggccgaagtcccggatgcggatgacatagttgtcctcctcccgccgcagagaggcgatgatgcgcttgccggagccaccgtgcttggcggcgttgtccagtacgttgcacagcacctgcttcagccgttccggatcgccggggataggatcggtgtacagctctccgtcgtcgtcatactccagacggatgccgtcctgtcggaacagctcctgataggtgtaaacggcgtcctcgaactccgtttgcaggtccacgtcctcgatgcggagggtaaaacgaccgtcctgcatcttggagaactccagcagttcctccaccatgttggtgagtcgacgggattccttgaggataatgtgcagaccccggcgcagctgagcgggatcgtcgtcctccagcagtgtctcgctccaaccattgatggccgtcaggggggtgcggagctcgtgggacacggaggagatgaactccgtctggattttctcactctggctgattttcagggacatatcgttgatgttgtccaccagctcccccatctcatcggtgtaggggttgggcagctggatgccgtagctgccgccggagatgcgcttggcggcgtccgtcacctcagccaccggggccaccacgctgttgatgaacagcagactggagatcagcaccagacagatgaccccggcaatgatggcgctgatgatgaggatggtcagaaggatctgatggtcgatctgccgggtggcggtgacgtagcgcataaaggccaccgtggagccgttgaacttcaggggtgtagtgacggccatcaccgactcgccggtgacggggtccttgccgctgaatacctcgatgctgccgctctccagcgcccgtgcgagctccggggtctggggagccgtgcctgcggccacgccctgagtggagttatccacccggccgtagagattcaggaattgcagctcgatgcgggtgctgtcgaagctggcggcgtacagtgaggcgttgcggtagtactcgctgtagctgctcatgctgtaagagttgaagtagtcggcgccggccttggctttggcctccagcgtggagcgggcggagccgtagtagttgttggccacggttgccgaggccagaatggccgccagcaccagtatcaggatcacaggccccacactgttgaggatccagcgcttgcgcaggccctgtattcgcagacgctccttcatggaccgtcacctccttgctgcggggccatcaggcgtcccacttgtagccgtagccccatacggtgctgatgaaagtggggttggtggcgttgtcctcgatcttcagccgcaggcggcggatgttcacgtccacgatcttcagctcaccgaagtaatcccggccccacaccagatccaaaatctcctcacgggacaaggccttgccgggattctccatgaacatccgcatgatggagtactccacctgcgtcagcttcacgggcttgccgttcttttccagcgtgcggttgcgggtgttcagcaggaaggggggctgactgatctcgccggagtgctcctccatgctgccgccgctgcggcgcatgagggcgtccacccgtgccgtcagctcggcgggggagaagggcttagtgacgtagtcgtcggctccggtcatcaggcccgtgaccttgtccatctcctgtgagcgggcggtgagcatgatgatgccgatgcgggagttggtggcccggatgcggcggcatacctcgaagccgtcgatgccggggagcatcacatccagcagcgccacacggatatcgctgtgctgctgcagcatctccagcgcctcctcgccggtgcctgcctcgatgacctcataaccggcacggcgcagattgatgacgataaagctgcggatgctggattcatcctccagaaccagaacttttttcataagctactccttctatgtcgttagttggcgtcccaagagtggacgatcaggttgaaattatgacgcagcgcttcctcatccagcgaatagatctcactgagggtctcggcggcgtaaatggtgccggtgcggcgcctgagtaccacccgattgccccggagggcccgccgctcccggttttcgccggtaagggcgcagatactcagggccttctccccctgcaccgacaacgttacctgcgtctcaccgataccggcgtccgaggcgagagcggtgacatcgcccgtccaatcctccggcaggataaagtaccagccgccggacaggcagtgataggtgcgctccacggtggcaaggccgtcgggccggtactgctcccaaaagaccatgccgtcggcctgcttggtgtcggagacagagctgtcgggccggggaagctccgtgatgccgtcgccgttgatgtcctgcggcgtcagctgacgatagggaaccgtggcggtggagagccccgtgctgcggtccagcgcagcgttgacgagcccggcgtcttcctgccagacgaggatatccgtcacggcgatgccttggctgttgatgccggtgatgaacaccgccggggtgtcctgatccagcttgccggtgaccacgctgccctgattcagctccgccatggtgctggatagggtgcagcggtgggagacggacagcgccccctcctgccagctgcaaaactccgccaccggctggttgtcgctgttggttcgcagcagcagaaggctggggatgccgtcgccgttgagctcctgaaaggacaggcgggtgtagttgctctgcatcagctgcaccgggccgggccgcatatcgtagacggtgacggtctggacgtcggagctgatcttccatcctacgatcagctccttccgaccgtcgccggtgagatcctcatagtagatggagtcgatggcggtgccgctgctctcgatgatggaggccagctcatagctgtcctcacgggagtggaacacgtaaattttcaggggcttttcaccgttgctgaggcggaaaaaggccagcgcctcgtcccgcccgtcgccgtcgatgtccaccatctggagggactggatgttccgcccggaggtgggagccatgtattcatagccctccgacagcagctgatccagctggcgggagagggtggtgtattccgtgggcaagcggggcagggtgaacagctcctccacggtgctgtccatctggcatccggccagcagcaggcaggccagcagcaacagccccaacagggccgggcgtttcagatgtcgcataggtcccctccttatcaaacgacaatcatactcttatatcatagcacagttcctgtgaaaagggtagttttttttgttttatccggggaaaacttcaaaaaggccgttgacaaccgccgccgggggtgctatattctggggtataaaaaaggcatagacgaggaagctgtccgcagaaggtcacagagagggtccccccgtggtgcaagggatctgacgggaagcggaacggtaccccctccgagccgctcgccgaacggaaaccagtaggccgggccgggttctcccgttacagagatcacgagcgacggaaaaatttccgtaagcagggtggaaccgtggagtaaagctattttacctcacccctgaaccgtatcaggggcggggttttttgttgcccgccccgaccaagtaaggaggaagctatcatgagcgaagaaaacaagtacacgtttgaaaacgaggagtatcgcaagacctattggcacacctgctcccacgtgctggctcaggccgtcaagcgcctgtggccggaggtgaagctggccatcggcccgtccatcgacggcggtttttactacgatctggacgcaccctttgccttcacacaggagaatctggcccagatcgaggcggagatgcggaagatctgcaaggagaagctgaagctggagcgcttcgagctgccccgtgaggaggcattgaagttcatggaggagcgggaggagccctacaaggtggagctcatcaacgacctgcccgccgacgcccacatctccttttataagcagggcgagttcactgatctgtgcgccggcccccatctggattccaccggccgcatcaagggcaacggcatcaagctgacggcctgcaacgccgcctattggcggggcgacagcagccgccagaccctccagcgtatctacggcgtggccttccccaagaaggaggagctggacgcctacctgaaggagcgggaggaggctctgaagcgggatcacaacaagctgggccgtgagctggagtacttcaccaccgtggactgcatcggtcagggtctgcccatcctgctgcccaagggcgcacgggtcatccagcagctgcagcgctgggtggaggacaccgaggagaaggccggctacctgctgaccaagacccccctgatggccaagcgggacctgtataaaatttccggccactgggatcactatctggacggtatgttcgtgctgggcgacccctatgacgagacgaaggagtgctttgccctgcggcccatgacctgccccttccagtatcaggtgtatctgaaccgccagcgctcctaccgtgacctgcccatgcggctgggcgagacgtccaccctgttccgcaacgaggattccggcgagatgcacggcctgatccgcgtgcgccagttcaccatctccgaaggccatctggtgctgcgtcccgatcagctggaggaggagttcaagggctgcttggcgctggccaagtactgcctcggcaccgtgggtctgctggataagtgtaccttccggttctcccagtgggatcccgccaaccccaacaacaagtacgagggtacggcggagcagtgggatcacgcccagagcaccatggagaagattttgaaggatctggacgttcactactccatcggcatcgacgaggccgccttctatggccccaagctggatatccagtataagaacgtgtacggcaaggaggatacgctggtcaccatccagatcgatatgctgctggccgagcgcttcgggatgtactacatcgacgaaaacggcaacaaggccctgccgtatatcatccaccgtacctctctgggctgctacgagcggacgctggcctacctcatcgaggagtacgccggtgcgctgcccacctggatgatgccggagcaggtgcgcctgctgcccatcaccgaccgggccgccgactactgcgcccagcaggcccagcagctgcggcgcgagggcttccgggtggaggtggacagccgcaacgagaagatcggcaagaagatccgtgaggccacactggagaagatcccctatatgctggtggtgggcgaccgggatatggaggcgggtaccgtctccgtccgtacccgtaccggcgaggatctgggtgccatgaccgtggcgggcttcaccgccatgctccacgaggtggtggatcagaagctgaagaagtaagccccatccgggaatttagcgaaatgtgataaaaagagcggaacgccagtgtgaagtgccccccaaaagttagacaaaataagaattaagcgatctgaacggtctgaatcctgtactgcacagggctcaggccgtttagttttcatttgattctgcggttattgtattacgcaaaggaatgtccgcaggcaacggcatcgttcatctgcgacgaatctctccattcgcataacctcccgttcctttctgtaatcacagcagcaggaggaatagcggaaatcgaatgtgcggatagtaaaaagcgccgtcccggaatcacttccaagacggcgcttttctgctgcggatcagagcgaacactttacggcgaaaccgccgctgaagaaataggtgttcgtccaatccctgtttgatggagcaggggtctccaaggatgaacacccctctgatgctccggtttcaccctcaaaggccatttcgataggataggcgcttgcttgccagaggcgatgcaatggcgcgcagaatgtgccggcttacgatgtttttttcttcatcatagacactttctaaaaatcttgggtcagcccttatcggcggacagtgccttgtcgatctgggcttgcagtgcctccgcctgcttcggttccgtaatagcacctacgatggggtcgcccacgatattgccgttgcggtcgaccacataggtagtgggataagcaaagatgttggcagcaaactttcccgcctcaccatctgagtcaaaatacacattctgataggtgacgcccttcttggccagcacgtccttcgcctcagaaatcgctgcctcgtcgccgcccagcgtgaaggtgttgacaccgatgagtgcgccgcccttctccgcgagttccttattcagcgcatccagctcggcaagctcgcccacgcagggattgcaggtggtgaaccagaagttcaccacggtgacggcgttcttggagaacaggtcatcgctcttgacggtgttgccgttgaggtccttgccctcgaaggcggggaacttctgcgtcttgccgctgtcgccgggtgtcgtggggctgtcggcagggatgctgtcaccgttgtccggggccttgggagccgcatcggggaacttggcctcaatggcggccagggtgcgctcgatctcccggatcttctcgccgccctggcgcaggagcttcagctcgtcggcggtaaacttgtccttggcggattcaatggtgtccagcaggaaatcaccgtagttcttgccgtcctcctgcgtggtcatgcccttgtcggcggattggaacaccttctcccaaagggactggttttccgtcagaatggcattctcctgatccatcaggtccttgtacatagcggccgcctcctgggcgttcttgggctcgccgtcgggctttgtcgtgtcgtcgctgccctgtttgccgcaggcggccagagacagcaccagcagtgctgccagcagcagtgtgatgattttctttacgttcattttgtttcctccgtttttaatttatctgcaggttttacaggttcttttttgccgtctccaaagccgtagcggaagctgacggcgttggtaggacaggcgcggatgcacatcccgcagcggatgcactcggtatggttgggcgtttttgtcacgtccacatccattttgcaggccttggcgcatttcccgcaggagacgcatttgttccgatccaccttcatctggaagagggacacccggttgaacagtgcgtaaaacgctcccagcggacagagccacttgcagaaggggcggtagaataccacgctcagcgcaatcaccgacagcaggatgctgaatttccatgtaaacagctttcccagcgccgcccggatgccggaattgacaagggacagcgggatggctccctccagcacgccttgggggcagaggtatttgcagaagaacgggtttcccatgccaacatcgttcacaaggaacgccggcagcaggaaaaccatcaccagcaggacggcatacttgagatatgtcagcggcttcagcttcttcgtggagagcttcttcgtgggaattttatggagcagttcctgaaaccagccgaagggacacagaaaaccgcagataaagcgtcccagcaggactcccagcaaaatgagaaagcctgtgatataataggaaaagctgaacttggaagaccccactaccgcctgaaacgccccgataggacaagcaccggaggctgccgggcaggagtagcaattcagcccgggtacacatacggttttccctgcgccttgatacagtttgcccttgagaaagttcggcagatgcaggttggtcaataaagctgcccccgcctgtatccagccacggaagcgggacagtatctgagatacgccgcgttttttcttacccaatgcccacacactccagacataatttgatcgctttgctcagtaccgtcgccgcctcgccccgccagacgccgaagcacagcatggcgatacccacaaccagcaacatggcctgcgccaccgccttttttacatggctcaaatttatcaccccttcactttttctgccgtcatcatagcacaggggagttaaagtccctgttaagaagaaaaatttaacacaaaccttatctgtttttgctataattaagaacaacgtgaacatgaagaaatgtaaaaggagggctctcatgcaccttttggttattgaagacgaacgcgccttgtgtgaaaccatcgtccgcagcctgcggcggctggcctacagcgtggactactgctacgacggggagaaggctctggagcttttgggcgtggagcgctacgatctggtacttcttgatctgaatctgccgaaaaaggacggcatgacggtgctgcgcaccctgcggcagaccgaccgggagacaaaggtgctgatcctctccgcccgcagcgaagtggaggacaaggtgcaggggctggatgccggggcgaacgactatctggcgaagcccttccacttagctgaattggaggcccgcatccgcagcctgacattgcggcagttcacccagcaggatgtgctgctaagctgcggaggcctgacctttgacacccgctcccgtactgccaccgtcaacgggcagacactgacgctcactcggaaggaaacgggaatcctggaatacctgatggtgcatcaaggaaggccggtaagtcaggaggagctgatggatcacgtttgggacaacagcgtggacagcttcagcaattccattcgcgtccacatctccgccctgcgcaaaaaactccgcaccgtgctgggctatgaccccatccgcaaccgcatcggcgagggctatctgatgggaggcgaggaggcatgaagcggctttccctgcagtggcgcatcacgctgatgtccgtcctgctcatcggcatcacctgcgtgaccatgaatttgctgctgtgctcctccggtgtgtactatatggacaccattgcggacagtttacaaggcggcggcacggcgatcctgaatgatggcggagcggagagctttgacccgcagctcatagcgcccaacgaggagttgaccatcgtcgtcaatggggcgcaggggcgcttccgcaccaccaactggtacatcacagcggcggtaacgctgctcagcggcatcctcgcctattttgtcagcggacgcgccctcaagccccttcgcagctttgcctcgcaggtggagcaggtgcagctgaacaatcttgccgatatgaggatcgatgaagatgctatttcggagttccggcagctgagccgctcgttcaaccagatgctggagcggctgaacaacgcctttgccgcccagcggcagttcaccggcaacgctgcccacgagctgcgcacgccgctggcgctgatgcaggcgcagctggagctgttttccgcagagcatcctgatgtgcgaccggagacggcggagttcctcacgcttttgcgtgagcagacggaacggctgatacagatgaccaagacgctgctggagatgagcaatttgcagcaggtggcgcggaacgagcggatccagctcgctcccatgatcgaggagatcttcacagatcttgcgccgctctcagataagttcggcgtcacgctgacggcggagggcgacggtattatgaccggcagcgatgcactgatctaccggctgatcttcaacctgacggagaatgccgtcaagtacaaccgacccggcggttcggtgtgggtccgcgtcacgcagcagacggaaaagctcctgatctgcgtttccgacaccggctacggcattccggaggagtatcggcggagcatcttccagcccttcttccgggtggataagtcccgcagccgggagtacggcggcgtagggttggggctttcgctggtgtgggagatcaccaatctccacggcggctgcgtccgggtagaggagagctcagataagggaaccaccattgcggtggagctgccgacaggggcggaaaccgagtcctccggtgcggatatatcataatgatccttggctgtttcatggcgatcgtttttgacctgcaacattatcgcagcagttctcgatcagcgccctgccgtgaacgatcacgggaatgactctgtcgtgccgcgcttcttatggcctatagcttttcgttcaccgacagttttgcgtacaatcaatctgccatctttctcaatatcctcaaggtcaagcccccatatagcagaatcagcattcgcagcgtttactttttgcttggtttctgcataagaagagatgcttccgagccgtgtcaaacaccaattttccggtatctcaaagggcagttcatcgtcaatacagcgctccacaccgtaaatacagctccggctttacgagctcacttgagataaaaacatcgtcgcctttaaaatagaactgctcttcaccgatgtttccgccacgcagtacccttatcattttgtccgcctttatagcgagggtatcctttttgtacgcaagcccagacatatttgagaaaaggtcgcctacccggtaccactcccatgacgaaggtatctcaaaaggcgctaaatccgccagcgaccgcacttcatcgccgattttctcataaggagtattatcagaactcggctgtttaacgattatctcggtagtttaacgaatactccagcagttcaacgattaccccagctgtttaacgattaccccagctgtttaacgattacaacgacaaaaaaccacaaaacccatgtaaagcacaaaaccccgacgcagaatcgctctgtggcggggtacatttgtgctctggaatgctgaaagccttgatttcaagcggttttcgggcatagaaaaagtccaccgtaattctatcaaaattacggtggacttatggtggagctgaggggagtcgaacccctgtccgaaagcgctttaacaagaccttctccgggcgcaggacagattcaggattcccgccccgtgcaggcactgcccagactgcacggcttggtagagtcatgatgcatgggcggggcaactcttacccgccgcacgtccgccacatcaacgacgccttccccggcctgtggcctctccggttcagacggctgcctttagttaggcagcgacagcaatacgattgttgtcagttaatttttaagttgcccgttttatggcggtcaggcgccgccgcccgcttatccagcctccacacccccgtcgaaaccggtgcagccccgtatcgaagtatgggaaaagactgtatatttctaccgttccgggtgaggtcgcccccacccggacggttatttccttagctgtggaaggggtccggcagcttctccggctccgggtactccacaccttgggtatccacggtgacggacttcatcacctgcggcttcttgggcttgttggtcagcatattccggggctgggaggcgatctcatccaccacgtccataccgtcgatgaccatgccgaaggcagcgtactgtccatccagatggggggagtccttgtgcatgatgaagaactggctgccggcggagtccatatcctgcgcacgggccatgctcagcacaccacgggtgtggcgcaggtcgttgcggatgccgttggcctcgaactcacccttgatacagtagccggggccgcccataccggtgccgtcggggcagccgccctggatcatgaagccgtagatgcagcgatggaagatcaggccgttataaaaaccggcgttggcgagggagataaaattccgcacgctctgaggagcgatgtcggggtatagctccgccacgatcttcttgccgttttccatttcgatggtcacaataggattgctcatatccgttctccttctcttatcaggcgtcagcggttcttttcccgcatggcacggtccatctcccgctttgcatcccgcttggcgatggcgtcccgcttgtcgtagtttttcttacccttgcacagccccagctccacctttacccgactgtccttgaaatacaggctcagagggatcagggcatacccgtcctgcttttgcaggtcatggagcttgcggatctcccgcttgtgcatcagcagccgcttgggccgatccggatccttgttgaagatgttgccctgctcatagggggagatgtgcatactcagggcgaacagctcaccgtccttggccacgcagtaggaatccttcagattcacccgcccgccccggatggacttgacctccgttccggccagctcgatgcccgcctcatagcgctcctccacgaagtagtcgtggtacgccttgcggttctgtgcagcgatcttaatgccacgcttttccatgggaagcgctcctttcctgaagtgtggcatatagtataccacgttccgccgctgattacaagcccgaaatatgcgccacactgctgatagagaagccctcttggcacacagcctctgtcgtggtatactgcagaaagaacgcaaggaggatatcgctatgaacctgaccgaacagctgctctcccgccgggagatctaccatggccgcatcatcgacgtgcaggtggataccgtgtccctgcccaatggcaatacctccacacgggaggtggtacgccaccccggcggcgtggggatcttggcgctggatgacgaggactgcgccgtgctggtggagcagtaccgctatgtgtttggccggacgctgctggagatccccgccggaaagcgggagcccggcgaggacccgctgactacggcccggcgggaactgagggaggagaccggcgccgaggccactcactggcagccgctgggggccgttctgccttctcccggctgctacggcgaggtgctgcacctgtatctggcccgtgacctgacctttggggagactcaccccgacgccgacgaatttttgcaggtgcggcgcctccccttcgatacgctgctggcacggtgcctctccggcgagatcgaggacggcaagaccgtggccgccgtgctgaaggcgaagctgctgggcctgtaagcaccaccggaaaagaacggagcaaagacccggtatccgcaggataccgggtctttgccccttgccctttcgggcagagaggggtaaaaaaggagtaaaaggaaaaagaagatagcaaaggaagagcctcagtcggcaaacagcggtgtggagagataacggtcgccggtatccggcagcagcaccacgatggtcttgccctcgctgccgggccgcttggcgatctcaatggcggcccacagcgcagcgccggaggagatgcccaccagcacgccttcgctgcggcccatttccttacccagcgcaaaggcgtcatcgttctccacagggatgatctcatcataaaccttggtatccagtacctgcggcacgaagcctgcgccgatgccctggatcttgtgggcgccggccacgccggtggagagaacagcggagctcttgggctccacggctaccaccttcacctccggattccgggacttcagatactgccccacaccggtgatggtgccgccggtgccgacaccggccacgaagtagtccaccttgccgtcggtatcctcatagatctccgggccggtggtctcgaagtgcgccttgggattggcggcattgacaaattgaccggggacaaagccgccggggatctcacgggccagctcctccgccttggcaatggcgccgctcatgcccttggagccctccgtcagcaccagctcggcgccgtaggccttcatcagttggcggcgctccacgctcatggtctccggcatgacgatgatgacccgatagccacgggcggcggccacggaggccagaccgatgccggtattaccggaagtaggctcgatgataacgctgccgggcttcagcaggcccttcgcctctgcgtcatcgatcatggcacgggcgatacgatccttcacggagccggcggggttgagatactccagcttgcccagcagacgagccttcagaccgtacttcttctccagatgggtcagctccagcaggggagtgtggccgatgagctgatcggcagaggtataaatgcgggacataacagcgcttcctttccatacggcaagggccgatgatcgtttttgatagtactactaattcggtaggttggtagtactataccaccggcggaagaagatgtcaagggactccggaaaaaatatttgcttccggcacggttgttttcaaaatatgcgagattttccctgccgcagcgtgtataatcatagaaaatcaaaacaacaaaaggagcgaataccatggatattcaggaactacgccgggaggcgcagaccatgcagcctcagctgacggcggatcgtcgccgcctgcaccggaacccggaggccggggcggttctgccggagacggtggcctatgtcaaggggcggctgacggagatgggataccatccgcaggagctgggcggcggcctgaccgccaccgtcaccggaactgacaccggacgctgcatcctgctgcgggcggatatggacgccctccggggacaggagcagtcgggcctgtccttccggtcggaaaacggctgtatgcacgcctgcggccacgatatgcacactgccatgctgctgggtgcggcccagctgctgatgcagcgccggcaggagctctccggcacggtgaagctggtgttccagccggacgaggagggcttcaccggcgccaagtccatgctggcggcgggagtcctgcaagatccggcccccagcgaggcgctggccctccacgtccactccggcaccccctccgggacggtgctgtgcggcagcgggaccttcatggcgggctgcaccctgttccgcatcacggtgcggggaaaggggtgccacggggccatgccggagacgggcgtggaccccatcggcatcgccgcccagatctggctggccctgcaggagatcaccggccgggagcttcccgccaagaccccggcagtggtgacggtgggtcggtttcaggcgggacaggctcccaacatcatccccgatgaggcggtgctggaggggacggtccgtacctttgaccgggcggtgacggcccggatcatggagcgcatccgccagctgtcggaggggatcgcctcggccttccggggcagcgcgcagatggaggagctggcctcggccccgccgctgcaaaacgatccggctctggtggaggatatggcgacgctggcggaaacactgctgggccgggaaaaggtctaccggctgaaggagggtggtatgggttccgaggatttcgcctcctacacctacgaattgccctgcgcctacctgctgctgggggcgggggtacctcaggagaacccccgctacggccagcccatgcacaatccgaaggtggtgttcaacgaggacgtcctgcccctgggcgcagcgctgctgactgccggggccatgcaccgtctggagcagtgaagcataagtcggagatcagctgccgtgcggagagcattataattatatgtgtatgatatatggcggccgtcataaggggcagctgtaagaggcggttttaagtgcggcagccttggatcgcttgcccaaaagacccccggacagaaggagtgaaaattcctcccgtccgggggccttgtgctgactttcaatcttttatgtgcattgttttgcctccggcgggtgactttctgccgctattggcagaaagttacccgccggagacaacaaaatcgagacatatcatgacagctgaaggctatcaccatagagatagcctgtcatttcccagcggtagacccacacgccccttcacctgagtgggagcggcagcgggtctgttgcagagtcaattccctttacagcccatagcgaacgcaactcttgagagcaaaggaagttttgaaaccatcggtttcaaacggctcttttgcccacttttccagctggtgggaaaagtgggccgccggaggcacgttctcaccgaagtcacccgtcggagccaacaaagacaaagagcatcccaggccgttaaaggctatcgccacaaatatagcctgtcattgccatagccagtacccacactagctgtggcaatccgcccccttcggtagaacggcagacttcttcaaccacccaataaagcggcagcgagagtagacggaagccgattccttgcttcggcggggcctatgatgcaactcttacacacgatagaggaagccttgaaaccttaggtttcaagtggcgttctttggtaactttctgccgctattggcagaaagttacccgccggagacaacaaaagcgagacgtatcatgacagctgaaggctatcaccatagagatagcctgtcatttcccagcgatagacccacacgccccttcacctgagtgggagcggcagcgggtctgttgcagagtcaattccctttacagcccatagcgaacgcaactcttgagagcaaaggaagttttgaaaccatcggtttcaaacggctcttttgcccacttttccagctggtgggaaaagctacccgccggaggcacattccatcgaaagcacccccgcagacaaatcaaaacatcccctcacgcaagcaggatccggtcattatccagcgcatggcctgcgccgctgcggaagcgctccagcaggtcgctgaccgtgagcccctcccgctctgccccggagacatccagtacaatggagccctccgccatcatcagggtgcggttgcccagagacagggcctgtgccatgttgtgggtcaccatcagacaggtgatgcggtgctccgccacgatgcgccgggtcagctccagcaccttgtccgccgtggcggggtccagtgccgccgtgtgctcgtccagcagcagcagcttcggcggcaccatggtggccatcagcagcgtcagcgcctgccgctgaccgccggacagcagccctaccggctggcgcatccgctcctccagccccatgtccagctgggccagctggctgcggaaccgctcccggtccttggctgtgatgcggcggaagggacttccgtgagaggcccgcagataggccagcgccagattctcctcgatggtcatgtggggagcggtcccccgcatggggtcctgaaacagccgcccaatgacccggctgcgccggtgctccggctggaaggtcagatccgtaccgtccagcaggatacgcccctcgtcggtgtaaaagctcccggcgatggctccaaacagggtggactttccggcgccgttggagcctacgatggtggcgaactccccgtcctccagatgcagggagagctgccgcagagcctgccgggcattgggcgtgccggggtggaaggtcttggaaatggcagtgatgtccagcatatcaggcggcctcctttcggttatgcttctgcttctggaaagcggcccagcgccgcagaccgggggcggcaatggccagcgccacaatgacggcggtgagcagcttcaggcactccaccggtaccaccttggtgtaaaacaccacggcatagataaaacggtagaccacggagcccaccagcgccgccagaattcccttatacaccgtgcggcggcccaagacggtctcgccgatgatgagacacgcaagcccgatgaccacgatgccggtgccggagttgatgtccacggttttctgatactgtcccaccatggcgccggacagagccgtcagcgcattggacaggcacagccccacggtgacggtaaaggtggggtccagtgacgaggcccggaccatatcggggttgtcaccggtggcccggatggaaagtcccagccgggttcccagaaacagggccagcagcccggcgcacaggagcgtcactgctgcggccagcaccagctcataccagtcaccgcccaacccggtggagcgcagcagggtaaaaacggtgtcgctgcccaacaggctctcgttggagcgccagcccatggccatgaggttgatggtgtaaagccccgtattggtgacgatgcccgccagaatggaaggcaccgacagccgggtctggaggaaggcggtgatgaacccggcgcacgcccccgccagcatggccgccggaacggccagcaggggatgcccggcggcggtaagggtcacggacacggcggcccccagcacgaagcagccgtcggtggtgagatcggcaatgtccagcacccggaagctcaggaacagcgccagcgccaccggcgcatagagaaagcccagctccagtgcggtttgtatgacaagcagcatgattcggctcctttcggtaggtcagtcggaaagcatcagtccttggtggtggtgacctccaccagctgggccatctgagaaaacacggagtagtcggccttcagcacggcggcggtgtcggtgttgacggtgatgatgccgccgtccatccggtagtagtcctccatcccgtccatgccctgcgtcatggcctgataggccagcgtggcagtgcgtgcgcccagctcggtgtagttgacgccacaggtggcgaaggcaccgttgcggacaaaggagtcagccccggtatagtgggggataccggacttggccagatcgtcggcaatggccagctcggcggccatgataacattatcggtgggggtgaacacggcgtccaccttggcggagatcagggcggcggcagcggccaccacctcgtcgttggtgttggcggtctgctccacacaggtaatgccgtgctgctccagatacgccttggcctcggcaatgggcttggtggagttgggctcggacagggagtacagcagccccaccttggagacgccgggatcctgcgccagcatcatgtccagaatgtactcggtattcagcgcatcgctggtgccggtaacatagtcgatgccggtgagcttggcggtatcgggatcggagatggcggcatacaccaccggcgtccggctgtcctcagccgccacggcggacacctgagcggcggtggtggcgatgggaataatggcgtccacctgatcggccacggcctgatccgccagctgcttcagcaccgactgatccccctgcccggaggtgatggtgtagcgaatggagacgttctgctcctgagcgatggcatccagccgggcggcgatggcatcggcgatctcgtccagcgaggcatgatccatctgcttgatgatggccacggtatagccgtccttatcctcatccttaccgccatcggagggcttggcgccgcaggcggccagactcagcaccatcagcacggacagcaccagcgccgtcagggaattcatcagattcttctttttcatacgggtatcctcctaaaaaatgatctcaggcggcagatgatcccgtggccgtgccggggcctgcggaaaataaaaaaacggccttcgtcccacatgggacaaaagccattgcttctgcgataccacccaaattgacgcccagcggcgtccgctcgcttctgcgtaccatcatacgcaccccggtgggtaacgggtggggctcccgtcggtccctacttggcctgcgccgttcggtccgccctcaaaagtccattcaccggccgctcaccgccccgatcccaccatccgggactctctgaaggaattgccgcaccgactacttctctttctcacaggtttgtgctgtgtacttgttgtggagtattatatgcgtccggcacacacttgtcaagccccggcagaaaatttttctggcaaccgccggcgggacatggtataataaagccactatcagaagaaaggcaggaatgaatatgaattttgcggagctgtcggcgcagcggtactccctgcgtaagttcagtgaccggccggtggaggatgccctgctgcagcaggtgctggaggcgggacgcaacgcccccaccgcccataacaaccagccccagcgcatcttcgtgctgcaaagcccggaggccatggcgaaggcggacgcctgcatgggctgccacttccatccgccggtgctgctggcggtggcctatgacccggcagcggcttgggaccgggagtgcgacgggaagaaccacggtgagatcgacgccaccattgccgtgacccagatgatgctgcaggcggcggatctgggccttggcaccacctacgtggggatgttcgacccggagaagctgacggcggccttcccggagatggcgggccttgtccccatcgccatgctgccgctgggctatcccgccgagggagcccatcccgcccgactgcacacggaccgcaagtccatggagcagctggtgaaatacctgtaaaaaatatccgcttccactacaccggaagcggatattttttaactctgtgcctgctccagcagctgagcggcgacggagccggccacgtcggagccgctgccgccgtgctccaccaccaccacaaaggccagcggcagggtgctgtcgtccacaaaacccacgaaccacgcatgaggagcaccgtcgctgacctccgccgtgccggacttggcgcagaccgccagatccccgaaccgggactgcccgtaggtctcctgtacgttgtgggccatcatgtcccgcagggtctggcgggtctcggcggtgaaaacggcggcccgcttttccttggcgggaatggcggcgggcagccccagtacgccggtctcccggtacaggagccggggcgtggcggccctgtcgtcagaggcaatggagcccatcagcgccagcatggcgcaggggttcaccatgtcctcatactgtccaacgccggaccagcccagatcgccgccgctcccggcgatgaacagcccggagaccgtggggatgccgctgacggagaagccctccagcagccccgcctgccgggcgtaatcctgtaaaacgtcagcccccagctccaccgccagctgggcatacaccccgttgcaggagcgggcaaatgcgtcggagagatccatctccccgtgggcgtaggggcaggtgatgacctgatccccgatggtgacgctgccgtcgcaggtgaaggtgcgctcctccacaccgggcagctgctccagcgccgcagcggtggtgaccaccttgaacacggagccgggggtgtacagaccggacaggagccggttcagatacacgccctcatagtcgctgtcgtcgtcgctgatctccggcgggtcggcggggtcgaaggaggggttggagaccatgcagaggatatcgccggtctgatagttgtacacggcggccacccccttgcggccgtccagcgcctcccacgccgttcggctgaggtcggcatctatggtgagatataccttgtgaccgccggagagggtgccggtgagggggtcaaagccgatgagccgggactggaacgcctccagcgccgaggtggagatgttccccagctgatcccccacagcgtggagggtggcctgccgcagggcgctgtcctcgtgatagacgccggaggggccgtcatagaggacggtgccgttgcggtccagcacctgaccggtgcggaccacgccgtcggtgtaggcatgaccgttggcggagaaggaggcccacgcctccccccggaaggtgtagcgcaggcagaacagcgccagccccagccccagcagtacgatcagcagcaggagcaggacggagcggaatttcacttgcttcatcgggcatcctcctttccgaagatgtcgtccgtggcgactcccagttcatccagaaaaccggtggcctgcggcggcttgacggcgggagccggagccttgggggccgccttgacggatacgggcggcggcgctgccgcctgcaaataggccagcagcccccagcaggacagcatactggagccgcccatggagacgaaggggaaggtgacaccggtcaggggcagcaggtccacggaacccagcacgttgagggtggtctggaacaccagcatggcggcggtggcgcaggcggcgatggcgtaaaagctggagcgggagcgcccggcggcccgcagggcgtaaatgcccagcaggatcacggcggctgcagcacacagggccagcagcaggccgaactcctcggacaccacgccgaacaccagatccgtgttggcggcgcccacatatttcagccacgcctcctccggccctgcgccgaaaaggccgccggaggccacggcggacatggtgcgggtctgctgatagccctcctcttgggcatactcccaagcgtgccgccacacggcgaatcgggccagcacatagggcttgaagcgcaggacgatgcccccggcaaagcctgcggcggcggtgatcatcacgatggagggcaggtcgccggtgcggagaaaggcaatgcacagaaatgccacgaagaagatcagcgccgtgccgaagtcgctcatcagggccagacaccccacgcagtaggcggagaagaggatggtgaagatcaggttccgcttggcaaacaggcggtctaacgtggcggcccctgccagaatgaatacgattttcaccagctccgagggctggaaggtaatggggcctatggcgatccagtttttggcgccgaagatgcgctgcccaaacagtacgttgaaggccagcagcgctgatgcggcggctaccagcggccaccggagcttcaacgccagcggcagactctgcaagacccgatccatcagcagatatatccccatacccagcaccacggcgaccagctgtttatataaggagtgggagtcgtaggcggcggtgacggcgaagcccacggtggtcagcagcagcgccagaacctccagcccacgggagccggtgcggcgcagggagcaaaagacccacgacagcagcaccagcccaccgaagccgatgcacaccggcagcgaggctccggccgtcagaccgggaaggaattgcaggaacatcagcacctgaaacagggtcagcagccacagcgtcccacgggaggcggcggtgcggaccggccgacgggcctgcttctggtcggggaagaagtagatatccaccccgcccatggagagggcgtcgccgggattcagggcggtggggtgctccaccaccgtgccgttgagcagcgtgccgccggtgcggatggggtagatgcgccagatgccctcgctgtcccggcacagggcggcgtggctgcgggagacggatggaaaattgatgcgaatatccgcctgcctggcccggccgatcatgttctcccagtggtacagcggatagcgtgcgccgttggagaggctgagaaagccccagctctcctgtttccctccggagagtaaggcacgcccgcagcggatcaaaagcagaaccgccacggcggacagagcgatgcgcccgccccagaggagccatggcagcacgccggcaaaagaatcgttcataggatacctcacattattataatgggggatgggaaataggtgtcaggatgaatggagaacaaaaaagggatgcaaacaaagcagcgggtaagctacatggaataaggatatcatagagatatcatgatagggcatcgtggatccgcaggaggaggatgaatcggtcaaaacgaaatagatatcgtgtccacctatggcgcacactccggctgaaaacgctggtgagagaaacttctgcggggtggagggaatcggacagaaacagaacgcttttggactgtccaccccatgccgaaccctgtccaacattcgtccaatataggaatagtgtatcataaatgtcaagggaaggaaaagtgtacgatggcaggggagatataagcccagattttgacagggattacaaagcgttgaaaaaagttgaaaataaggaaaaaagtcgttgacaaggggaggggagtgtggtaaagtaaacaagctgttcgccgggaggtgagcggcgggggac

SEQ ID NO: 12375 - DNA, 12986 bp, Unknown
  gut microbiota DNA sequence
gccctgtcccggataccgccacggcgctcccaaatgtggcacggtaccaactccgccgtacccggataggggagggggtacgccgcccgatcacggacggcgtacccttactatatcagattttctccggtcttgcaagggggaaatcagccgttcagagcggccttcagagccaccacacggtcggtagcctcccagcgcacgcccagatcctcacggcccatgtggccataggccgccagctggcggtagatgggtctgcgcagatccaaatcccggatgatggcggtggggcgcaggtcaaagaccttctccacagcctcctccagcttttcatcggacaccacgccggtgccgaaggtctccaccagcacactgacgggacgagccacgccgatggcgtaggccagctgcacctggcacttggtggccagacctgccgccaccacgttcttagccacataccgggcggcgtaagcggcgctgcggtccaccttggtggggtccttgccggagaaagcaccgccgccgtggggggcgctgccgccgtaggtatccacgatgatcttccggccggtgagaccgctgtcaccctgagggccaccaatgacgaagcggcctgtgggattgacgtagatcttggtgttctcgtccatcagctcagcgggaaccgtgggcttgatgaccagttcgatcatatcccggcggatctgatccagagatgcctcggcggcatgctgggtggagaccaccacggcatccacacgggtgggcttgccattctcgtcatactccaccgtcacctgcgtcttgccgtcggggcgcaggtaatccaccagcttttccttacggacctgcgtcaggcgcttggacatcttctgggccagggagatcgccagcggcattagctccggcgtctcgtcgcaggcgtagccgaacatcatgccctgatcgccggcgccgttgtccagcgcactgtcaccggactccttggcctccagactcttgtccacgcccatggcgatatcgccggactgctcgtcgatgttggtgataacggcgcaggtgtggccgtcgaagccgtacttggcccggtcatagccgatgtccagcaccacttgacgggcgatcttggggatatccacgtagcagtgggtggtgatctcgcccatgatgtggatcaggcccgtggacacgcaggtctcgcaggccacacggccattgggatccttctccatgatggcgtccagaatcgcatcgctgatctggtcgcagattttgtcgggatgtccctccgtcacggattccgaggtaaacagtctctttgccatagcttttccatgctcctttataaaatattttccatacgggtgaaagctctctcaggttgaccggagcatgaaaaaacacgctccgccattcgacggatcgtgttagaataacgctcctcatctgtcgaaggacgaatgcgggactatcacttccgcactcagcatacgccggatttggcaccttgcttcgcaggttgccgtggcttcatcgggccgatccctccgccactcttgataaggtatgaacttgtaagagaactctacaatttcttatgatagcaagaagagattgttttgtcaacccctgatacacagattttatcgaaatgcccgggaaaaaccgacgaaaaggggaggagcggggagaaaaatacggaaaaggattgcctgtttcggggaatgatagtataatggtatgcagcacacccaaaaaaaatttacttgaggtatgaaaatgaaaactgaggaaaagctgaacatgaccatgctctgcgacttttacgagttgaccatgggcaatggctactttgaaagcggttacaaggatcatatcacttacttcgacgtctttttccgccgggtgccggatggcggcggctatgccatcgccgctggtctggagcagctgattgattatattgagaatctgcacttctctccggaagacatcgcctatctgcggggccggaaccttttcagcgaggaatttctgtcctatctggaggacttccatttcaccggcgacatctacgccatgccggagggaaccccggtgtttccccgtgagcccatggtcatcgtccgggccaaggccatcgaggcccagctcatcgagaccttcacgctgctgaccatcaaccatcagagcctgatcgccaccaaggccaaccgcatcgcccgtgccgcccgtggccgcacggtgctggagttcggctcccgccgggcgcagggggcggatgccgccatcatcggcgcccgtgccgcctacatcggcggtgtcgccggtacggcctgcaccatctctgaccagatctacggcgttcccgccggcggcaccatggcccatgcgtgggtgcagatgttcgattcggagtatgacgccttcaagacctactgccagatctatccccacaacgccacactgctggtggatacctacaataccctgaagtccggtgtccccaacgccatccgggcctttaacgaggtgcttaagcccatgggcatcaccaagtgcggcatccgactggattccggcgacatggcctatctgacccggaaggcccggaagatgctggacgaggcgggctggacggagtgccagatctccgtatccaactctctggatgagtacctgatccaggatctgctgctgcaggatgccaagatcgacctcttcggcgtgggcgagcggatgattaccgccaagtccgagccggtgttcggcggcgtgtataagctggccgccgtggaggatcaacaggggaacatcacccccaagatcaagatcagcgagaacgtggagaagatcaccattccccacttcaagaaggtctaccggttctacggcaacgacaccggcaaggccatcgccgactacatcaccgtctatgacgagacgttggacgacaccaaggatctggagatcttcgaccccagcgccacctggaagaaaaagacggtgtataacttcaccgcccggcctctgctggtgccggtgtttctggggggcaagcgggtgtacgacagccccagcctgccggaaattcaggcctactgccgccagcaggtggacaccctgtgggacgaggtgaagcgcttcgacaatcctcacagctactatgtggatctgtccgacaggctgtggaacatccagcaggatctgctccgcaatcgaaaataagcaaaaaagcagagctgtccactttggcggacagctctgcgtggtatcccaaagggaacaggaggtgacccgttgaaaacgcatcaggtacaacagaaaacggaacgtcgtatctcggcggcgctgcggctggttttcgtggcggcgctgctgctggggcagatcgctttggcattctttctcagcacggagctgcgccagcgggctgccatcatctacacggtgctggagctggcggccttcggttacgccgtgcggatctataaccgcaccgacggcgccagctataagttcggctggatcttcctcgttctgacggtgccggtggtgggactcattctatactttctctggaacggtgaccggcagcaaaagcggctggacctgaaaaagctgcccatgccggaggagccgaaagcccaacaggccgcccaccgcatccaaatggagaagctgcggcgaaaattcccccagtgggagcggctcagtgtctatctaagccgtcaaggatatctcctttacggtgacacggagacaacgtatctgcccaccggcgaggcatttttacaggatatgctggagaagctggagcaggcggagcacttcatcttcatggagtttttcatcattgcgcagggacaggtatgggaccgcatggaggagatcttccgccggaaggcggcggaaggtgtggaggtcaagattatcttcgatgacttcggcagcatgatgcgctttcccgccggacagatcgaggccctgcgggagagtggggtagaggtgcagatattcaacccggtccaccactacgtcaaccgcctgtacttcaactatcgggatcatcggaagatcgtctgcatcgacggcagcacggcctacaccggcggagccaacgtggcagacgaatacgccaaccttaccgtccgtttcggctattggaaggactgcggcatccggctggacggccccggcgcatggggcctgacacgggagttcctccatatgtggcagcgcaacggcggacagctgatgcaggagcgggactactaccgcccccacgaccaccgggaggcggcgggcttctgccagccctttgtggacgggccggacaacaaccccatctccacggcggaggacgtgttcctgcacctcatcaacaacgcccgccgctccgtccatatcaccacgccgtatctggccattgatgagcccatgcggcaggccctgtgctctgccggggacagcggcgtggatgtgcggctgctgctgccgggaataccggaccacaagttcgcctatctggcggcccagagccactacggtgagctgctggtgcatcgtgtgaaaatttatatctacgagccgggtctgctccacggcaagaccgtgctgtcagacggcgaggcggcctttgtggggtctgtgaacatggactaccgcagcttccagctgcactttgagtgcggtacggtactctacggcgtaccggccattgaggggctggcggaggatatccagcgtatcacggactgttcccgccgggtgacgtatcaggagtggaagagccgcccgtggtaccgcaagcttttgagtaccctgctgcggctgtttgagatgtggatgtgagtaacatacagccccggacgcttcggcgtccggggctgtgtttcttctggctgccgtgcgggacaggggatgcttacaaattaggcaaaagtccggcatcatggagcttttgcaggctcatgaggccccccagcttggcgtgataccacgtcaggccaccctgaaaatacacggcgtaggggggacggatggggccgtcggcggagagctcgatggaggccccctgcacgaaggctccggcggccatgataacgtcgctgtcgtagccgggcatggcccacggctccggggtcacatagctgtccaccggtgcggcggcctgaatgcccttgcagaaggcacacatggcctcccggctgcccagctccaccgcctgaatgatatcccggcgcacctcccggctgccggggaccacacggaagcccagcgcttcatagcatccagctgtaaagatagcaccctttacagaggaggccaccactgtgggagccagaaacagtccctgatagaagctggtgagcagccccagattggcgcccacctccttgccgaggcccggtgcgctgagccggtaggcgcagcggtcgatgagatcctgccggccgcagacatagccgccggtgggagccagaccgccgcccagatttttgatgaggcttcccaccaccatatcggcccccacatctgtgggttcctgccgctccaccagttcgccgtagcagttatccaccatgcagatgatgtcgggcttgcagtttttgcagaaggcgatcagcttgccgatctcctccacggagaaggaggggcgggtggcgtagcccttggagcgctggatggtcaccagcttggttttttcgtggatggcggcccggatgccgtcgtagtcaaagctgccgtccggaagcaggtctacctggcggtagctgacgccgtattcccgcagggagccgggggaggggcggatgccgatgacctcctccagcgtgtcatagggcgccccgacggggctcagcagttcgtcgcccggcaggaggttggcccccagcgccagtgccagcgcatgggtgccgcaggtgatctggggccggaccagcgccgcctccgtgtggaacacgtcggcatagacacgctccagattgtcccggccctcgtcgtcgtagccgtagccggaggagaggttaaagtgggtggcattgagacgattcttgtgcatggcggagagaactttggcctgattatactcggcaatgtcgtccacacgggacatttctttgtccagtccgtccagtactcgctgtccaaaatccagcacctccggactgatgcccagctgctgatacatttcattggtggtcatgggatcgttgctccttacttagattcatttcctgggatatgctccgggaaccggatgccccggcacttcatcagcatccggatggggtagtcccgatccaaatagttcttgctgtaccactcataggtggcggcgggcagatgctgcagctccggagcctgacaacggaacagttcaaaggtccggcggtcaccggagagcagtgccgctatcagctccagctgtccctcctgccgcagccgctccagacaggcgtccataatgacggcacaggagcgctcctcctcgtcgacgtagagctccttgttgcccagccaatagagaaattcctccgggtccagatccagcttggtggtgatctgactgagcttgtaaaattccttccagtcccgtttttgcagtacctccatcaggtactgcaccagaccgtcatccagcgctacgcagtccagaaacacctcgaaggcgtgcttgcctgcatcggggtccggggccgtctcggagggctcctccgccggggaagcctcctgtatgggggccggctgtacggcgctttgcagcagctgctgaaggcttgtggtatcgtccgcctgccggtaaatttcctccggcagcgtaacgccgtcctgatgggcgcaggcacggacaaaggcggtggcccccatctgctgaagctggcggctcagggaagcggccttctccgtcacgtccccctccggcagagtgatgccctccggcggtgagcggcgtccttccagcagctgggtcatgtattccaaatagtggtcaaaaagagtcatacattctcctcactttccccaaaactctatcacatggcggttgtaattgcaagggtatccgtgctatactgaggaaaaaggaggcgggaacgtgtatttcgtatacatggtgtactgcaaaggcgatacactttacaccggtgttgcacagaatgtttgtcgccggatgcggcagcacaacagtcgaggaacggcctgcgcccggtacacacggacccacccggtacaggcattggcggcactgtgggaggcggaggacaagggagcggccctgcggttggaataccgcatcaagcagctgacccggacggagaaggaacgcctcatccatgaggataccgcattttcacagctgctgccgcagctggaggtgtcccgctaccggcgcagaccgggcataacgctggagatgtgtttggaggggaaaatcgatgcatgagtggtatgcagcgcccatggagggccttaccggctggcgctggcggcaggtgcagcacgagatgttcggcggagcagcactgtatgtgacgcccttcgtgtcccccaacgggaatttcagcttccagcgcaaggaactggaggagatggatccggagcgaaaccggggtattccggtggtgccgcagatcctcaccaaccgggcggagtacttcgtctgggccgccaaggagtgccgcagccgtggctgggagcaggtagatctgaacttgggctgcccctccggtaccgtgacgggaaagaacaagggggcgggactgctgcgccagccggagctgctgcgtcagctgctggacggcattttcgatgccctgccggatatgaaaatttccgtcaagacccgtatcggatgggagagggcggaggagtggccggcgctgctggccctgctggagacataccctatctgccgcctgacggtgcatccacgggtgcggacgcagttctacaaggggacggcagaccgggaggtgttccgctggacggcagagcacacggcgctgcctctgtgctacaacggggacgtcaccaccgtccgtgacctgcgggagatgggggagacctttcccgacgacgccgtcatggtaggccgggggctggtggcggacccgtccctgctgcggcaggcgatgggaggcccggcagcgtctctggaggagctgcgggagtttcacgaccggctgtacggcctgtactgccgggatttttccggcgacgtgccggtgctgcaccatatgcgggagctgtggaactatttctcccggtccttccgggagacggacaccctgctgcggcaggtgcgtaaggccggggactgccgggcatatgagacggcggtgcggcagtttttctatggcgcagagctgtcccattgatgatatctgtaaaggaatcatgctttacacaaagagcccccgctttccatagaggaagcgggggtcttttttgcagagcttcagttgagaacatagacggtgcagtagcgccgaccgaaggaacaggcatcgtcgtaggagtcaaaccacagatccagctttgttcccttgatggcactgccggtatcggaggccacggccatgccgtactccagataaccgtcgttggtcagaatatagaaccgtgtgccgaaggggaacacggaggtgtccacggcgatgttgccgtaggcggtgggccgcccggaggccgtccagccgtggatggagtaggcggtggattcgcaggagccgtacacggaggagaaggccatggtgtcgccggaggcgaacagcagatagccggtgccgtcatcaaaggtcgtcacgtccaccatgtagtcagatcgctccacggaggagaccatggtgccatactcgacgatctcggtgacggcgttgtcctcggtggtgctgaccagctcggtggagaccagcttgccgtcccggtaggtgtccttgtaggtctcgatgacggtgccgggaacgccctcctgcaccacctcttccgttcccttggccagcatatggttcaccacacgctctgttttgtaaggggtggtgacggtgacgtcacgggtctgggaatactctgccataacggagacggtaggcgtctcgccggtggtgtccaccacgaccatctcgccgtcgcccacggtgacgtcggaccggcgcagcaggttatccaccgtttcccgccgggtggtcaccagataggtggcgccctgagcgtcggctacctgcacctgctggccctttaccagcagcagctgggcgtcccggctgctgttgtcggcccgaatgtccagcagacccgtggtacggtcaccgtcgggccggccgtcgatgatctgcattccggtctcgtccaggatcatgtatacatagctggggttttcgatatcctgctgacagaggatcacggtggtggccagcagagccaccagagtaattgccagcagcaaccccttcaagagccggggagatgcggatcggtccgttgttggccgggccgccgtctccattctgattactgcttctttcataaaaaacctcccaattccgcccttcatttccagggttcggggcggtggaaaatcacctcgcaatgcatttgtaacttttgttacttttttgaaatatgggaggagtatatcacttccacccacttttgtcaagttttttggatttttcatggggttacacaccacttttcacggttttgtgcgggtatctgacaggtaaaaaacggcagctgccgaggcattggttacagaaaggttaccgacggtgacaacggttgtaaataaagattgaagaatggggcagggcgtggtataataaagaaaactatcacagcggaggggttctatgcggcctgaatttatccccgtggggcagatcgtcaacgcccacggtatccggggcgaggtaaagctgaatccggccgggttcgatccggcctttcttgcggcgtttgacacgctgtatatcggcggaaaagagacaaaggtgaagagcgcacgggtccacaagtccacggtactgctggtgctgccgggagtggaggatatggatgctgcgctggccctgaagggaaagcccgtcttcatccgccggacggatgcccacctgccggagggcgaatatttcgatgccgagctggagggactgacggtgctggacgacgagaacggggaggagttgggaaggctcacccgtgtgctgaactatccggcccacaaggtctacgaggtccgggggaagcgggagtatctgatcccggcggtgcgggaggtgttcatccgtggggtggacatggagaccggcaccatgcgggtgcggaacatgaaaggactggccacggatgaggattgacatcatgaccctgttcccggacgccattgatgctatgatggggcagtccattatcgggcgggcgcaggccagaggattggtgaccatcaccgctcaccagatccgggagtataccaccaataagcagatgcaggtggatgattatccctacggcggaggccggggagccgtcatgcaggcggacccgctgtaccgctgctgggaccatatctgtcaggaggcgggggagcgggtacataccatctatctttccccctgtgggcgggtgtttgaccagcaggtggccaaggagctgaaggcgtcctatgagcggctgattctggtgtgcggccactatgagggagtggaccagaggttcatcgacgagtgcgtggacgaggagatctccatgggggatttcgtgctgaccggcggcgagataccggccatggcgctggcggactgcctgtgccggatggtgccgggggtgttgccggaggagagctgctacaccgacgagtcccactgggacggtctgctggagtacccgcagtactcacggccggaggagtggcacggccggaaggtgccggaggtgttgctatcgggacatcatgggaaggtggacgactggcggaaaaaagagagctataaacgcaccatgacccggcggccggacctctttgcccggttcgatgagaccagtcttaccaccaagcatgaccgaaaggtgctggcggaggccaaggcggaatgggcggcggagcaggagtctccggctgcggaataagacataaaaaaccgctgcgtggcgctcacgcagcggttttttcggttattcgacatcgtcctcccggaacagcagggtgatgcaccacagtccggcgatgcccaccagtgtatagatgatgcggctccataccgatagctgtccaccgaatatggcggccacgcagtcaaagcggaacaggccgatgctgccccagttcaaagcgccgataatgacgaggatcagggcgatgcgatctacgatcttcacggtcaaacctcccatctgtgagattgctccgtcagtttgcccatttgacggcggattattcagaaaattcgtcagcacggcaaaaatattttcagattctgtggaattggcgttgaaatagccggggggactattgtataatacaggaagaacaggaacgaatcaacgggcggccggcggcacagctccggcggcgtccacacacaaggaggaacaacatgaacaagacctttgaaaagctgggcttttacccggcggatatcctgctgcccaaggatcaggacatgaccaagtgggccgtggtggcctgcgaccagttcacctccgagccggagtactggcaggcggtggaggagaaggtgggcaaggcaccgtctaccctgcggctgatcctgccggaggccaacctcaaggcccctaatgtggacgagtacatctccggcatcaacgctgccatggagcagtatctgaaggacggcgtattccagacgttggaggactccctgatctatgtggagcgccagcagtccgacggacgcatccgccacggcctcatcggcatggtagatctggacgcctacgacttcacccccggctccggcgccctgattcgtgccaccgaggggacagtgctggatcgcatcccgccccgtgccaaggtgcgccgtcacgctcccatcgagctgccccatgtgatgctgctggtggacgatcccgataagaccgtcatcgagccgctgacggcggcagccgataccatggagaagctgtatgacttcgacctgatgcaaaacggcggccatattcggggctacaagctgtccgacaagcaggtggacgctgtggccaaggcactggagggccttgcctccgacgaggccatgcagaagaagtacggcgtctccggcgtggcgcccctgctgttcgccgtgggcgacggcaaccactctttggccaccgccaaggcctgctatgaggagcagaagaagggcaagactccggaggagtatctggcgctgccctcccggtttgcgctggtggaggtggtgaacaaccacgacgacgccctgcagttcgagcctattcaccgggtgctgttcggcgtggatcacgagaagttcatgaaggcatttcaggctgcctaccccaacgcctacgagggccggggcgagggccacaccattgagttcgtgtggaacggtgagagtcatttcatcaccgtccctgatcccaaggtacagctggcggtgggtaccctgcagggggtcatcgatccgtacctgaaggagaacggcggcgaggtggactatatccacggcgacgacgtgacccgtgaactgggctccaagcccggcaacatgggcttcctgctgccggccatggggaaggaacagctctttaagaccgtcatggctgacggcgtactgccccgcaagaccttctccatgggccacgctcaggataagcgctactacatcgaagcccgccgtatcaccaagtaaacagaaacgaaaaaatcttccttctatcgacgggtgtccgtaaaacagttaatcctccgtatggcttagaccatgcggaggatttgtttatgtcta

SEQ ID NO: 12376 - DNA, 54985 bp, Unknown
  gut microbiota DNA sequence
aggagaaaaacgataaagttcattcggcttggtcaaaccgtttcaaaccgtgccaaagccattatttccgaaaaggcggggcacagcattcattttttatgcagaggcgacctgctccggatgaccgcatgagcgccctcgaaaattaacccatccgttaacagtttcggggtcaaaaacggcatttagcccatcgttaacatgtaaaaatcacgtcaaaccttgtcaaattctatcagatttttcgaaaacggaacaaatgctgcggatatagaaaaatcccggaaaactctcgttttccgggattttgattgctttgaaattgcgaaatcgatcgaaatcagcgcttgctgaactggggtgcccgacgggcggccttgaggccgtatttcttacgctccttcatacgaggatcacgggtcaggaagcctgccttcttcagggcggcacggtactcgggatttaccagcagcagcgcacggctgatgccatggcgcagagcaccggcctggccggacacaccgccgccctcgacggtagccacgatatccaccttgcccagagtgccggtggtgttcaggggctggcgaaccaccatcttcagggtctccagaccgaagtaatcgtcgatatcacggccgttgatggtgatggagccggtgccgttggggaacagatgcacacgggccacggaggacttacgacggccggtgccgtacatatagggattcttagactgatacattctctttttcctccttacttgaccagctcgggcttctgagcctgatgctcatgctgctcgccggcgtagatgtgcagacgcttcagggagtccttggtgacgatgttgcggggcatcatgccacgcacggccacacgcacggcgacctcaggcttctcctgcatcagcaggcggtacttggtctccttcaggccgcccacccagccggagtgggtgcggtagtacttctgctccatcttgttgccggtgaggacggccttgccggcgttgatgacgatgacgttgtcaccgcagtcggcatgaggggtgtaggtgggcttgcccttaccacgcagcaggtcagcgacgatgacggcggtcttgcccaggggcttaccggcggcatccacgacgtaccacttgcggacaacattgccctttttttccatataagtggacatggtgatttcctccaatttatataatgtattgctttacttttccgtgctcccttgctatcatggggagagaaaacacgcaaacagcgcaaggatatttataacacacccccgcaaaaatgtcaacagcgttttaatttaccattagaacatctgcgattatctcttgttttctctgtttatctctcgttttctaaaaacgcaatttcatttcccggaggcagcatatgcagcatattttaggacaggtccgccgctgcgtggaggactatcacatgatcgaggccggggacaaggtggccgtgggcgtctccggcggcaaggacagcctgctgaccctgacggctttggcccggctgcgggacttctatcccatctcccttcagctggaggccatcacgctggagaccggcacgccgggcatgagctttgacgccgtggcggagctgtgccgggagctggaggtcccttacacccgcatccatgtgccggtgtaccagatcgtgtttgaagagcgcaaagaaaagaacccctgctccctctgcgccaagctgcggcggggcagcctgaacacagcgctgacggagcgggggatccacaagatcgcactggggcatcactacgacgatgccatcgaaacgctgctgatgaatctgctgttcgaggggcgcatcggctgcttccagccggtgacatatctggaccgcacgggcatcacccagatccgcccactgctgtactgccgggaggatgacatccgccgcacggtggaacggctccgcctgccggtggtccacaacccctgccctgccaacggctccacccgccgacaggaggtgaaggatctgatccatcagctggaggggcgctatcccgacatcaagcagaagcttttcggcagtctccagcgctatcctctctacggttggaatctggagcagcaggagcgctgaccgacggtttccgtttctatcttgcagataatatgtaatatcctgtcgttttatcacgccagcacccattgcagcagcaacagcagaccgaagccgggaacacccagcaccccgatgaagagggcgttgaacacgttaagtcccagccggatgccggtgacggcggcagtgaggttcagcagccacaccgccccgaagcccagcgccgagttcaccagcacccgcagggccagcttcaccggcccccggaacaggcgcacggcggcgaacagcaaaaacgcccccaccacgcacagtgcgccgatctctacaccggacatacaggccctcccttccctgcggaggccgccacggcggcgggtgataccgtccggcccccggagcgggccgccggttcctgctccttgatgcaccgcagcaggtagctgtatcgggccttcagggcgctgatctcgtagatgctggcctctatcagctccggctccgtgacatagttgaacttatcgtaggcgcacttcagcgccacattggtctgctgcaattcctcccgcaggatatccagcggatgctccaccttttttcccatgtccaagtcctccctgttccctttcattgtacggatattttatccggatatgccggactttagccgtgggacaagccgaaattttcaggaggtgcgccatgcacgaggaatatatgcgtcaggcgctggcactggcccaggaggccgccgcccacggcgaggtgccggtgggctgtgtcatcgtccgggagggcctgatcgtgggccggggccgcaaccgccgggaggagaagcagcacacctcctcccacgctgaaatggaggccatccggcaggccaacgaggcccttggcacctggcggctggacgactgcaccctttatgtgacgctggagccatgtcccatgtgcgccggggccatcctcaacgcccgcatcccacgggtctattacggcgcacgggatcgggagatgggtgcctgcggcggcgtgctgaacctgttcatggaggacttcccccatccgccggcgctggtgggcggggtgctggcggaggactgccgccgggtgctgacggatttcttccgaaatctccgataaatgaatttcccgcattctacttggttgttgtttcgctcattttcgtcgctttgctgaatcttcccgctaaacgtcgccttttttgtctctttagatggtatcttttccaaaatgtatatggtacaatcagaacatcccgaacatatgcaatacaaacgggagaacccatatgaaaggaaccgtttttttatggaacccaatgctattctcagtgagtctctgtctctgagcagtgatatccctctctatgcccagctggtgggcatcatcaagcgcagcatctcctccggcgcactggccatcggcgatctgctgccctccgaggcggagctttgccgggcgctgaatgtcagccgcaacaccgtccgtcaggccatcggtgagctggaggatgagggcctcgtggtccgcaagcggggcaagggtacttttgtggccgaccccaacaccaatcgccggggcgtgcgctattccttcaccactgaggtctcctcgctgggtaagacgccctcctccacactggtggacttcggcgttatcgtccccactcgtgccatctgcgagaagatggagcttagggaggggacgtcggtctactgcttcacccgtgtccgcaatgtggacggtgagcctctgattctggagacgtcctactatccccagtttatctaccccaacctcacccgtgagatggtgcagacccacagcttttacagcctgctgtaccatgtgggcatcacccccttctccgctgaggatacctatgaggcggtgatgctggatgcgccccgtgccaacctcctcagcgtggagccgggcagctgcgccttctatcaccagcgccgcaccaagaccgaggacggccgggtctatgagtacacccgcagctatatccggggcgaccgggtacggctggacgtgcatatgcagaagagcggcatgaccttctcccgcatcatcgactgaagccctgaaaacgcccccagccgcagagccttccctctgcggctggctggtttttgcaaacttccccctcctccccctttacagcccgacctctttcggatataatagaaaggctaaggaaatctgacacaagaaggagacgaccctatggcagtcattgaatacgacgaatataaacagaagcttcaggcgctggaaccgacccttcaggagctggagaaggctctatccattcccaaggcccgtgaagagctggcgcagcttcagaaggagacggagcaggagggcttttggagcgacgtggaccgcagccagaaggtctcccagcagatcaagcggctggagagcaaggtcaagaagtatgaccgtctggtgtccgactgggaggacaccctgaccctgtgcgaaatggcacaggaggaggacgacgcctcccagctgccggaggtcacctccggctatgaggcgctggaaaaggagatcaacgagcgccgtctggcggcgctgctgtccggcgagtacgacgccaacaacgccatcctcaccttccacgccggagcaggcggcaccgaggcccaggactggacggagatgctctaccggatgtatacccgctgggcggagcgccacggctacacctatcagctcatggattacgaggccggcgatgaggcgggcatcaagtccgccaccatcctcatcgagggggagaatgcctacggctatctgaagagtgagaacggcgtccaccggctggtgcgtgtttctcccttcgatgccaatgcccgccgccagaccagcttcgctgcgctggaggtcatgccggagctggatgacgacagcgagatcgagatccgcccggaggacatcgagatgcaggcctgccgctccagcggcgcaggcggtcagcacatcaacaagacctcctccgccgtccgcctgacccacctgcctacgggcatcgtggtgttctgccagacggagcgcagccagttccagaaccgggacaacgccatgaagatgctgcgggccaagctggcggagttgaagctgcagcagcacgctgagaagatcagcgacctcaagggcgtacagatgaagatcgagtggggcagccagatccgctcctatgtgttcatgccctacacgctggccaaggacacccgcaccggctatgaaatgggcaacattcaagccgtcatggacggcgatatcgacggcttcatcaatgcctatctgaccgccgccgccaacggcgagatcaagaagtaagggatagtcttccagaaaaataaccgcccccgcaggtcacgacctgcgggggcggtttcaggtacagaacttactcgcccatgggggcgccgcacttggggcagaacttgccgtcggaggactcaccgcacacggggcagaccttctgctgggtctcctccccagcgggctgctcctggcagctgcaagggcaggactccccttccttcttggcggccttggcggcctccaactcaccgatgcgctccttagaggcgatgacggcggccaccacatccttcacggcatcggggacctcgccctcatactcggacacgaaccactcaccgatggcacggtaattcttttccatttcacgctgctcggagatgatctccatgctggccttggcggaatccgaaacactcttcgccttctcggaggcgacgcccgccagatccttggccttttccgccgctacgccggcgacggcctgtgccttcttgcccagttcttcaaaaaatgccatgttcatgatctcctttcatatacacgggtgtgcttgtattatacccccgcacacttttgtttgtcaatggcggtcgaggggcggcagcgggcaaaaaatgtaaattttttatgcttgcgtcgccggtgggaatccgatataatgaggaaaaattccgtcaggaggggaagttatgaaccgcatcagcaaggagaactactacctgaacatcgcccagaccgttctggagcgtgccacctgtctgcgccgggtctacggcgccatcatcgtcaagaacgacgagatcatttccaccggctacaacggctccccccgtgggcggaaaaactgcgtggacatgggcttttgcacacgggaggccatgcaggtgccgaggggcgagcgctatgagctgtgccgcagcgtccacgccgaggccaacgccatcatctccgccagccgccgggacatggtgggcggtacgctgtatctggtgggccgcaatgcccagaccggcgagctgctgacggacgccacctcctgccccatgtgccgccgcatggtcatcaatgcggggctggcccgtgtggtgatccgccggacgccggaggagttcaccgtggtggacgtggaggaatgggtccgcaccgacgatctggctctgccggaaaaaatatgacacctgccggaggggagcggtgctcccctccggtttctttttccccgtcttttcttttttcccgccatgtgctatactggggagcaatatcacccgaaagcgaggagacaccatgaacatcggccgcatccatgtggattcccggctggtcctggcccctatggccggggtcaccgatctggccttccgccagatctgccgggagctgggggcagggcttaccgtcaccgagatggtcagcgccaaggccctgtgctatcaggaccgcaagacccgcagtctgctgcgtctggggccgggggagcatcctgccggggtgcagatcttcggcagcgacgccgcctgcatggcggaagccgcctgcatggccgccgagctgtccggcgccgatttcatcgacatcaacatgggctgtcccgtgggcaaggtggtctccaacggtgacggctccgccctgatgaaggacccggagaaggccgcacgcattgccgaggcggtggtgaaggcctgcccggtgccggtgacggtgaaaatgcgccgtggctgggacaagggcagcatcaatgccgtggagctggcccggatgctggagcaggtaggggtgtcggcggtggccgttcacggccgcacccgcacccaaatgtacgccggacaggcggactgggtcaccatccgtcaggtgaagcaggcggtgtccatccccgttatcgccaacggcgacgtgttctcggcggaggatgccgtggctatcctccacttcaccggcgctgacgccgccatgatcggccggggcagcttcggcaacccatggatctttcagcaggcccaggcggcgctggagggccgtcccgtcccaccgctgccgccgctggcggagcggtgtgatgtggccgtgcggcagatccgtctggccgccgaggacaagggggagcacatcgccatgctggaggcccggaagcagtacgcatggtatctcaagggcgtcccccatgccaactactataaggaacagatcgtgcggatgaacacgctggaggatatggagcgcatcaccgccggtatcaagagggacctgaaatgaccgagcagcagtggatcgcccgtgccagacacggtgacgcagacgccttcgagcagctggtggtggcctacgaagggccggtgtaccggctggcactgcggatgtgcggcagcaccgaggatgcccgtgaggtgacgcaggacgcctttctggcggcatggcgtggccttccggctttccggggcgacagccgcttctcctcatggctgtaccgccttaccaccaacgccgccatcgacttcctgcgccgggaaaagcaccatctggggaacctcccgctggaggaggcgccggagcggccggatccccagcagccggagcttctggcggagcagcgggagcagcaggaggccctgcagcgggcgctggatcagctgtcctcagagcaccggcaggtgctgctgctgcgggtggtacagcagctgagctacgacgagatcgcacaggccctgtcactggagagcggcacggtgaaatcccgcatcagccgggcccgccgccagctgcgggaaattctcctgcggcaggggaacttctttcccgactctgccgtcttaccaaatggaaaggaggggtgagtatgcactgcaatcaggaacagatcgaggccctgctggacggggagctggtcggcccggaacaagacgccgtactcacccatctgcgggattgtcccggctgccgcagctactaccggcagctgctggccatggagcaggccctgcgggccgataccgatcccgtcctggatgacctgcttccggatatcatgaaccgtgtccacgccacgccccagcatcgacggcggtcgccgtggctgcgggccgccatgggcatggcggcgtgtcttgtggtggtgctgggcgtctatctggtacgctatcaggtggagaaggacagcgactctcccttcagcggtattttgccggattcctccgccaacaactctgtgggcgccaacgaggatactttcagcgatgaggtcaccccctctgacggcggtctgaccttcgcctccggcggcacagagaggcaggagccttccgacccggcagactacgttctcataggctgcccggagctggcccagcaggcccgccagtggctgtcccagcaggggctggagccggacgaggacggtgtctattccctcactgcccagcaggtacaggatctgaacgccgccgtgccggagctggagctccccacggatgatgcattgcgcctgctgctggaggactgaggcctgccttgacgggccgggcaaaatgcgctacaatgaccccaaaagggctttcccacctaagtgcaaaaggaggtcatcccatgacagaacaggaactgtgccgggccgccattgccatgctggaccgttcttacagcccctattcccattttcccgtgggtgcggcgctggagtgcagtgacggcacggtgttcaccggctgcaacattgaaaacgccgcctacggcctcaccatctgtgccgaacgcaccgccatcttcaaggccatcagtgagggccatcgggatttcaaacgcatcgtcatcgctgggaagagcgaggactactgcgtcccctgcggctcctgccggcaggtgatgcaggaattcgccccccagatggaggtcatctgcctcaacgacaagggggaggccaagcacttcgccctgaaggagctgctgccctatggcttcgacgagacgtggctgtgaccgccgccctacaggcggcataggatagaccactcccctaaaaggaggtcttttccgtggcagatacgctggataccctgccggcgggccggtgggccgccatccgggctgtgacgcactcccagcgtcagcggctgctggagctgggcttcatccccggcacgatcgtccgggcggtgcagatcagtcccttgggtgatccggtggcctatgaggtgctggatgccgtcattgccctgcgccgctgtgacgcccggtgcatccatatcacggcactgtaagtgctcatgctgcacatgttaaaaaggaagagacgatggaaacatcgtctcttcctttttgtctgcagagggggctgtctgctgccaccggcggcatattttttgccatcagtttttcttttatgcctccggcgggtaactttccttcagcagcgaaagaaagttacctaccggaggcaaaaagtaggctgtcggagacagaaaaaagggctgctagtagaaaggcacccgccggaggcaaaacagtgactcatcggaggcagccaaacaaggcgaaataaaatcccagccgggcggtgctgcacaccgtccggctgggggcatctcacttctcccggtgcttgcgctcccggtagatcggctccggcgtgcggatcaccacctgagtatcctccgccaccgaatccgtcaggaatgcgttgccgcccaccacggcgtgatccccgatggtggtctcaccgcccagaatggaggccccggagtagatggtcacgtcgctgcccacggtgggatgccgcttccccggtaggctggcgtggcccttccggggggacaatgcccccagcgtcactccctgatacagcttcacattctccccgatgaccgtggtctcgcccaccacgatgccggtgccgtgatcgatgaagaagtgggcgccgatctgtgcgccggggtgaatatcgatgcccgtgcggctgtgggcgtactcactcatgatccgggggatcatgggaatctggcgcagatacagctcatgggccacccggtatacgaaaatggcaaacagccccggataggcgaacaaaatctcctccttggaggccgccgccgggtcggattcaaaggtggcgtccagatccgtcagcagcagccgctgcacgccgggcagggcctccaccacctcacgggccagcaccgacgcccgctgctcctgctcctccggcagggccaaagcgatctgccgggccagctggccctcgatgcgctccagcagcagcgccgtgtagtcctccaccggaagggtcatcagctccgggtcgccgtagtaggccggaaagaccagtcgccggatctccttcagcagtccgatcactgcccccttgtccggcagccgcaggcccttgccgtacatgggaacggggctgcgctgcatattctccgccatggaccgggctgccgcccggatgtgctcttcatacatgggatgtctcctcctgtcccgcccccgcaggggccgtctatcctatgttccctcccggtgtcaggatacaccggccggaatcttttcctccttttgggggcggctgccgtcaaagggggtctccagctggctcaggtcccggaggtagcccttgaaatcgctgtaaaacgccgcatactcatatccggtgcagatgcgctcgtccatcaccacgccgatgggcatcaccttccgggtcaggtctccgcccatgtagtccggcacgggcttgcccatgcacacgaacacgctggtggtaccgaactcgtagcagtggtgatggatatagctggtcttgatggaggccagattggtgatgaacatactggtgtggaagggcgacaggtcgatgatcttccggggcagcagcccgtgcttgtccagatgatacgccagccacaccacgaactttggcagccccggcacggagaacatgaaccgtgcgaacttgtcggtgctgttggactggtgctcatgctggttggcggcaataacctcccgaattttcctgtcaatggagaaaatatcgtccgacggctccaaatacactttcagcgctgtctcgttgaccaccccgtcggattgcttcttgagaatgacgaaggagacgcagaagtggttgcgccgataaatttttccgttcatcacgaagtagttcagctttggattatccagcaccgcccggtagtaggcggcgatgatgacactcatgtggttcaagcgtacgccctcccgccgccaatggcggatgtaggcctttacagcctcctcgtcgatgttctcggtgatggagttccacgcatcgtagcgcttgggcatgatgtaggggatggccgccaccagcggcggcaggtctttcactctggttccgtcaggtctcatgatgctttttcctcattcctatgcagatgcagtcattatacgccctcccgccatccattgcaaccgttttcccattcctttgccccgcaaaaagcccgctgcggccgcactttctgcttgtccttttccggcgaatttgttataatagttgattatagtagtatgcggaagggagcgctggcagatgaagttttccaaatggcatatcgccccagcggaggaagcggatatccgccgtctcggcgaggctggctatccccagctggtgtcgcaggtgctggcggcacggggcatctccacggcggaggaggccgccgcctttctggagcggggccgggatctgacctgctcccccttcctgatgaaggacatggaccgggcggtggagtgcatcagccgagccatcaggcagggtcgccgcatggcggtgttcggggattacgacgtggacggcatcaccgccacggtgatcctggtggattacctgaaaagccggggcgtcgatgtgctgcactatattcctcgccgcatcgaggacggctacgggctggggcaggacgccatccgctccctccatgagcagggggtagagctgctcatcaccgtggactgcggcatcaccggggtggaggaggtggacttcgccgcctctctgggcatggatgtggtcatcaccgatcaccacgagtgcaaggacaccctgccacgggccgcggcggtggtggacccccaccggccggactgcacctatcccttcccctatctggcgggctgcggcgtggcgctgaagctggtgctggcgctgggcggcgagagccgggaggaggcccttttctcccgctactgcaccttggccgccatcggcaccattgccgacgtgatgcccatgtccggggagaaccgcatcatcgtctcccgcggcttggagtgcatcacccagtcggacttcatcggcctccacgccctgctgcaggaggcaggtctcatggataaggccatcacctccgtgcaggtgggcttcgtgctggccccccgcatcaacgccgccggccgcatgggggcagcggacaaggctgccgacctcctgctgtgtcaggacccggcggaggccgcccggttggcccgtgagctgtgcgctctgaaccgggagcgtcaggcggtggagcagaccatctatgcccaggcagtggaacagatcgaccatctgccgctgcaggagcgcagcgctctggtgctggcctccgacacgtggcaccaaggggtggtgggcatcgtggcctcccgcctgtcggaaaaatacgcctgtcccagctttatgatccacttaaacggcaccgtgggcaagggctcctgccgcagttggggcggcttcaaccttttcgccgctctggagcgctgctccgacctcctgctggatttcggcggtcacgagctggcggcgggcttcaccatcgatgtcgccaatatccccgccttccgccagcggatgaaccagctggtgcgggaatatcagggtggcggagcgccggaggtatgtctggagatcgatgccgccctcacctgtcccagccgtgtcaccctgacggaggtggaggctctggggatgctggagccctacggcgccggcaataaccgccctctcttctgcctgatgggcgccacgctggagcggctgcagagcgtgggccagaatcgccacctgaagctgcggctcagcaagggcagcagccagttcgacggtattttcttctccgtctcccccgacacctgtcccgttgcggcgggcagccgggtggatgcggccttttatctgcagatcaacgaatttcggggcaaccgcacggtacagctgcaaatggtggacatccgcccatccctcaccgtcagtacacgggaggatgagtgcctgcacctgttggagcgctgtctgcggggcgaccggctcctgcccaaggaggcggtccacctgctgccatcccgcagccagtgcgtgcagctgtggcgggcgctggagcacaccgtccccccggagggactcaccgcctgctacctgccgctgctgcgggagctgtccgcccggctggagggggccgaccccttccttcggactgccttctgtctggaggtgttccgggaacggcagctgctgaccctccggcaagagggcgacaccatttccatcacactcaccggccaggggaaacacgtccgcttggaggaatccggttacttacagggcctgcatgaggtcatgcagcccaaacggggaggcgatcaccatgactgatacccagaataccaccgcaccggcgtctctggtgccggagatccgcccggaggtctgggctgatctggagcagcgctaccgcaagctggaggacaccgtccgccgctataaccccagcgccaacttccagcagatccgggccgccttcgagttcgccgccaaggcccacggggcgcagatgcggaaggacggctctcccttcatcacccacccgctggcggtggcccagatcgtggcggaggagctgcatctggactccgagtccatcgaggcggctctgctccacgacaccatcgaggatacctccgccacccacgaggacatctcccggctcttctctcccacggtggcggatctggtggagggcgtcagcaagctgacccgtgtccactatacctccaaggaggaggagcagatggagaacctccggaagatgctcatggccatgagcaaagatatccgggtgatcctcatcaaaatctccgaccggctccacaatatgcgtaccatggagtaccagaccccggagaagcagaagcagaagtccttcgagaccatggagatctatgcccccattgcccaccggctgggaatgcagaagatgaagtgggagttggaggatctgagcctgaaatatctggaccccatcagctaccgggagatcgtggaggctctgaatgaaaaggccgctcagtatgacggcttcatgtcctccatccacgaccagatcacccgccgcctgcgggaggcccacatcgacggctacgtctatggccgcatgaagcacccctactccatctaccgcaagatgtatacccagaacaagtctctggacgatgtatacgacctcttcgccttccgggtcattgtggacacggtgtccgactgctacaatgtgctgggcatcatccacgacctgtataagcccattctgggccgcttcaaggactatatcggcacgcccaagcccaatatgtaccagagcctccacaccaccgtggtgggccagaacggtatccccttcgaggtgcagatccgcacccgtgagatgcacgaggtggccgaatacggcatcgccgcccactggaagtataaacagaacggtcagggggccggggacgagggccgctatgagtgggtccgccgtctgctggagaatcaggagggcgccgacgccgaggacttcatccactccctgaaggtggatatgtttgccgacgaggtgttcgtgttcacccctcgtggcgacgtcatcaacctccccgccggagccacgcccatcgacttcgcctataacatccactccgccgtgggcaaccacatggtgggggccaaggtcaacggccgtctggtcccttttgatacccgcctgaaaaacggcgatatcgtggaggtggtcacctcccagtccgcccacggcccaagccgggactgggtgaagatcgcccgctccagcaacgcccgctccaagatacgccagtggttcaagcgggagcgtcgggacgagaacatcgtcaacggccgttcctcctttgagtcggagctgaagcgctgcggcgtcactctgaaagaactgacggcggaggaaaacctccccggcatcctgaaaaggctctccttcaagagcctggacgatatgtatgccgccattggctacggcggcgtcaccagcctgaagctcatcggccgtctgcgggaggacatccagcgcatcctgcaccagcatcaggcagagcgtcaggcggaggtgccggtggagggccagccggaggtgacccgtcccgccgtccccgtccgggaacacagcgagcagggcatcgtggtgcagggtctcagcaactgtctggtgaagttctccaagtgctgctcccctgtccccggcgacgagatcgtgggctttatcacccgtggctatggcgtctctgtccaccgtaaggactgccccaacgccgaccccgcccgccgtccgccggaggaggcgggtcgctggatcaaggtctcctggggtggcaaaacacgggaatcctaccgcaccaatttgcaggtggtgtccaaggatcggcccaatctgctggtggatatctccaccatcctctccgccgccaaggtccacgtatcctctctcaacgcccgctccaccgccgacggcttcgctctgatctctctggccgtggatgtatccgacagccagcagctgcaggctgtcatgcgccggctggagcagatctccggggtcatgcgtgttacccgccccgccgggtgaaagaatgcgcctccggcgccacacttttcccatagctggcaaagtgtgcaaaagcgcatatggtcgtgtctaccgatctccagccacattgcgacgtgaaaatcggttgacactccctcgaaattgctccaactcatcaaaatcatcgcatatattgccgaaaaaggagactatattccatgagggctgtactgacacgggtaaaaagtgcctccgttaccgtggacggcaagaccatcggccagatcgggcagggctttctgatcctgctgggcatcacccatgaggacaccgaggcccaagccgtgaagctggcggacaagctggtgggcctgcgtatttttgaggacgaggacggcaagatgaaccgtggtctggagacggtgggcggcgaaattctggtggtatctcagttcaccctttacggcaactgccgcaagggccgccgtccggactttctggccgccgcccggccggaggtggccatccccctgtatgaaaaattcgtggctctgtgccgggaaaagggcttccacaccgagaccggcgaattcggcgccgatatgctggtccaatccgtcaacgacggccccctgaccctgatcgtagacaccgaccagctctccagctgaccaatatgctccatcggcggagtatatcctggctctgcttggctgttttttctctatgcgatccccacgctatcttctacacgaccattcacatcccagcgatgcttgataaaggagaatatcccatgaaaatcgattccatccgggtgggctttatttccaccaactgctatctgctgtgcgacgaggagaccggggtctgcgccctcatcgatcccggtgacaagccggagcaggtggccgacatggtcagccgctccggctgccgtctggagtacatcctgctgacccacggtcactttgaccacaccaccgccgtccggccccttctggagaagtaccccgatgtgccggtgtacatccacgagaaggacgtcaccgaccagccgcccaagcacatggatatgatgttctcccgcctgccggagcacaaccagcgctactacaaggagggggacaccctgacgctgggcagcctcaccatccgtgtcatggagacgccgggccacacccagggttccgtatgtctgctggtgggagatgtgatgttctccggtgacaccctgttccgtggctcctgtggccgcacggacttcgccggcggcgaccccaaggccatgctggcctcgctggaccggctggcggcgctgcccggcaactacaaggtctatcccggccatgagggggccacggagctggactatgagcgccgggtgaacccctttatgacccggcggctctccctgtgacggaggggtgccatgaagctgatctttcgtggtcacgaggaccggtacgccgtggagcagagtctgctggcttttttcccggaggaacggccggtctatgagccggcggaggatggggaggatcatgcgctggtgacgctgagccgctccccccgctataacaccgccgtcaccaccatcacctaccacggccggacggcccgtggcatctcccggaccgccgtggacccgcagctggcggagtatgaggcggagcgccttcgccagaaggcggtgaagctaagcttcttcaaggcggcacgggagatcaccggcatcacccccagctggggggcgctgacgggcatccgccccggcaagctggcctcccggatgctggaggagggcatgacggagcggcaggtggaccgggtcctgcgggacacctacttcgtctcgccggagcgccgccgcctgtgtatcgagacggcggaggcctcccgcagagccaaggcggacctgcgcccggaggatatctccctgtatgtgggcatccccttctgtcccacccgctgcgcctattgcagctttgtgtcccagtccgtggagcggacgctggggctggtggagccgtatctggaggtgctgcaccgggagatcaccgacgccgcccgaatggtgcaggaggcggggctgcatatcaagtccttctacatggggggcggcacccctaccaccctctccgccgatcagatggaccggctgctgacccacctgaaccgcagcttcgatctgtcgggctgtgcggaatactgcatcgaggccgggcggccggacaccatcgaccgggagaagctgcaggtgctgctggatcacggcgtagaccgcatcagcgtcaatccccagtcactggaggatcacgtcctcaccgccattggccgccgccatacggcccgtgacgtggaggaggccatggcactggccaccggcatgggctttccccatgtgaacatggatctgatcgccggactgccggaggacacgccggagggcttccggcggacgctggacaagtgcctgtcctacggggccgacaacatcaccgtccataccctgagcctgaaaaagggaagccgcattttgctggagaacttcaccatcccctcggcggaggcggtgggcgagatgctggactacgccaacgccgccctccggcaggcggacttccgcccctactacctgtaccggcaaaagtatatgtccggcagctttgaaaacaccggatggtgcatatccggagccgaagggctgtataatatctacatcatggaggagctgcacagcatcctctcgctgggggccggtgggtccaccaagatggtggacccggtgcatcagcgcatcgagcgggtatttcacaccaagtaccccacggaatacatccagagaagcgaaaagctggaggaaaatctctccgccttccgtcaattccatgagaacatgaggggatgagcatccccggacgggagggtacatgggctttctggggggtgccgccctgctgacggcggcggtagcggtcagcaagctgctgggggccttgtataagatcccactgggcaacctgctggggagtcggggcatgggctgctttcaggcggcctacaacgtctatggcgtgctgttgactctctccaccgccggtctgccgctggccatgagccgcctcatcgcccagagcaggggcagaccccggcggcagcggcgcattttccatgtggcgctggcgttatttctggcgctggggctggtgggcagcggtgtgatgctgacctttccccggcagctggcgggcctgctgcacaatgagctggcggccccctccatccgggtactggccccggcgctgctggcggtgtgtctgctgtccgccatccggggctacacccaagggcaggggcagatgctgcccaccgccgtcagtcaggtggtggaatccgccgggaagctggtggtggggctgggccttacgtggtatctcctgactgtccggggcgtctccccggagatcggggccgccggggccatggcaggtgtgaccgtaggctcactgctggcgctgctggttctggccctgcggtggctgccctcctgcatgggcagcgacgctccgccctcccggcgggaggtgctgggtcagctgctgaagatcggcgttcccattacgctgggggccggaggcatgagcttcatcaccctgctggatcagtccgtggccatggatgccctccagagccggttgggtctggggctggaggaggccaaccggcaatacggggagtacgccttcgccctgacgctgttctccctgccgccctcctttctctatcccatcagcgtcagtctggtgccggccatcagcggagcgctgggacagggcgaccggcggacggcccgccgccacacccgcaccgccctgcggatggcgctgctgctggcgctgccgtcggggatagggctgtccgttctggcggggcctatcctgcggctgctgtaccccgctcaggtgcagaccgccgctgccgccgcccatcacctgcgggtgctggggctggctgccgtgtgcgtgtgcctgatggtggtctccggcggtattttgcaggcatggggccacgagcacatcccggtggtaacgctgctcaccggcggggcggtgaagatcgctgtcagctaccggctggtgtcggaccccgcttggggcatccggggcgccgccgtgggaacactgctctgctatgcgcttattgcggggatgaacctactggcggtgggacgcaccaccgggatagtctttcgctggggcgttcctctccggacgctggtggcagtgggggccatggcggtgacggcctccggcttttaccggatgctggtacaccgggcttccctgccgctggccgtgctgggagccgtagcggcagccgctgcggtgtacggcggtctcgtcctgctgctgggggcagtgcgccgagaggagctgtgtgccgtttttgccgccaaaaagcggcgaaaaccatctggatttttttaaggatctctcacaaatgacgaaaagtcttgcaataggagcgtaaatatgatagattttgagaggaaggagcattacggtctttcggatctgctgcgcatcgtggcgttgctgcggtcagaggacggctgtccgtgggatcgagtgcagacccatgcctccctgcggcgcagtctgctggaggaggcctatgaggccgccgaggccatcgaccgggaggaccctgccctgctgaaggaggagctgggggatctgctgctgcaggtggtattccatgccgacatcgagcggcaggccggcgatttcaccatggacgatgtggccgacggtgaggttcgcaagatgctcttccggcatccccatgtgttcgggggacaggagacggtgcaggacgccgatacggtgctggagggctgggaggccatcaagcgccgggagaagggccagcagaccaccgctcaggcgctggatgccgtggcccggagtctgccgggactgtggcgggcggagaagctccagagcaaggccgcccgtgacgggttcgactggccggacatctccggggcgctggacaagctggatgaggaggtatccgagctgcaccgggccgccgccggagacggcgacgtgacggaggagctgggagatgtgctctttgccgccgtgaaggtggggcgctttgtcggggtggacccggaggtcgccatccacggcacctgtgagaaattcatccgccgctaccgggcggtggaggagggggcagccgccatggggaaatccgtggatcagctgccgctggaaacgctggaggccctgtgggccgaggccaagcgatcttaatgcgatggatatcgttttaggatatagacgtaccaaagaaacattttttaggaggaatcaccatgaataaaaccgaactgatcgccgctgccgccgagaaggccggcctgtccaagaaggacaccgaggctgtcatcaccgctactctggcttccatcaccgaggccctgcagaacgacgacaaggtccagctggtgggctttggctccttcgaggtgaagaagcgtgccgcccgcaccggcctgaatccccggaccaaggagaccatcgagatccccgcttccgctgttcccaccttcaaggccggcaaggctctgaaggacgccgttgcgaagtaaggttttatatggtttcggtcggtgtgctgcggcacaccgaccttttcatgaaaggagcgacgtttcatgcgtctggacaaatatctgaaggtttcccggctcatcaagcgccgtaccgtggccaatgaggcctgcgacaatgagcgtgtcatggtcaatggccgggtgcagcgggcctcctacgacgtgaagcccggcgaccgcatcgccatccgcttcggccagcggacgctggaggtggaggtgctcaccgtggcggacaatgtgggtaaggccgaggccgccgccatgtaccgggagatcatggacagcccgtcataaccgaagagcccctctcatacacatatcgtagtatgtatgtgtatgaaaggagctttttttatggcatatgagatcaccggcgctcccctgcaccaccggctggagctggatggccgggagcgtctgacggtatccggagtggaggacgtggcccgattcgacgagacgtgcatcgtcatgtccacctgcgtgggggagctggtggtcactggcgaggggctgcacatcgggaagctcacgctggacggcggagagctccatgtggacggccacattgactccatcagctatgaggagcctgccgcagggcgcacctccctgctgtcccgactgttcggctgaggggatggagaactatgtctccgcccagctgctgctgttggggcaggcggcgctgctggggatgctgggtggggtggtctatgatctgctgcggcccctgcggcggggtcggctgatccacctgacggatgccctgttcaccgggggcgggctggtgctgatggtgtggttcctgacggcggtgagccggggcgaggcacggctctttttgctgctgggagcctgcggcggagcggggctgtattttctgctgctggcgccgctgctgcggccgctgtgggacttttgggccgccgctgccgccgcctttggacggctgctggcacttccgctgcactttggtgtaaagttggtgaaaaaaatcgggaattccctgaaaaaacactttcttttttggaaaaaatacgctacaatgaaacagtatcggtgggagtatcccccatctgcaaggcgcaggaaaggagaccgctatggcacggaagaaaaacacaaaaaaacgccggagcggtctgctgggcgcactggtgctgctgattctgctgggtgtgatggcctataagctggtggaagtctatggtgacctctccgccgccaaggagcaggaggcacggctccgcactcaggtggagcagaaggaggaggagaacaactccctgaaggatgcgctgtcccacgccgacgacccggactacattctggggctggcccgtgaccggctggggctggcggaggacggcgagcgcatctttccggacgtgaacaactgagcatccccatttcaacaccgaagggagtcaatagagaagtatatggaactggcggttgggacgatcatcagcgggaaagtcaccgcaatcaccaaattcggcgcattcgtgagcctacccggcgggaagtccggtttggtccacatatcagaggtggccgctgcctttgtcagcgacgtccacgactacctcaccgaggggcaggaggtcaccgtgaagatcctctccgtctccccggaggggaaaatcaatctgtccatcaagcaggcccaaccccagcaggaacgcccgcagccggcccgatcggcccggccccagggcagtcgtcccggcccccgcagcggcgggcggtctccccgtccggcacaggccgcagtggccatgcagcccccggcggagccgtccttcgaggacaagctgaagcagttcatgacccagtccgacagcaaacagtcggagctgaaccgctatatggcggggaagcggggcagcgggcgcaggagaagataattgaaaataggcaggcagaaacgtaaggcttctgcctgcttgttttttgggggcgagttttgccggtgccacattctccgtgcgaaaacggtgctctatgatcgggcagcattgtcatccatggtaaacccacagcgcaaatcattacgcagcgcaaccggggcggtcacgctgcgtaatcgggataaattacaggttttcagtcagctcctcgctgagcttcacggcgccatacagattcttggcgctgcagccagcccggccgccgccggcgcaggcgcaagcacaggcacaggcacagctggaggcgcaggcgcaatggctactgcctccgccgaagccaccgcctccaaaaccgccgccacgctttccgccgccgaagccgctgctgcggggcggggcgggcttatgcttggtgcccacggagccgggacggggatggcggccatccgggccggcgggataccacaggccgtggacgaatacgtagcgggtgccgaagccgccggcatagccgtcgtagacggcggcccggaccacgaagaaaatcaccagaacgaatatcacgaatacgctgaatacccagtcatcggaatcgtcggaatcgtcataggagtcgtcgccccggctgttatccggcagattatcccggctgttctcccaatacagggtggagggccagctggcatattccacggtgaagctcaaccggtcccccggtttcatattgctggcggtgagcacatggtctccgccggtctggccgtcggagccaacgcctgccgtggaggctgggtcgtgccacgtcagggtcatgacgtccaccggggcgctgtcgaaccagccgggggtatagtcataggatacggctccgctgtcgctgagggtatacatatactcctgcacccagcggaaagcgaagcggaaggtctcgttggcatcgtaggactgggtgaagtcgatgtaggcgaggctgttgtcgtgatcgatgctctggatgttgtcggtgagggccgtcatctcccggatggagccgttggggatgccgaccttggccccgcccttctgggagttggtggcaggcagatcctccaggggcttccagtccagcgtcacctgaatcgtcagactgccgtcctcggtgttgggagtgacatccacctgatagttgacgatctcgtcgtagatcttgtcggcgtgggcggtgcgggccgtcaagggcagcaggcaggccgccagcagcagacacagcagcgcccggcaaatggtctttttcatggtcagcacccctctctgtttccctcgcccagctggcagatatgctccagcttggcactcttggcccggatggcccgacaggtctcgccgtcccagatggtggaccagtcgtcggtgaggaggttccccagcgtggtgccgcccagccagctctggcaggggaccacctgtccgccgggcgtgactgccatgttgctcaggcaggccccgcagctggggatcaggtgcaggccaaggctccggagcgtttcctccggcagccagccgggactggtgaagtcgatctccatgcccagctcctccgctgtctccacggcctgacgcagcacggcagtcagctcctccggcgtcaggcgggtggcctggctggcctccgtctcggccccgccggagggaatgagcccggagcaggtgacgtatcgcactcccagctcatgcacgaagcggagggtagcggcataatcccgattcaggctgcacagcggcgtgttcaccgacgtcatcaggcccgccgccacggcattgcggacgccctgcaccgtgtcgtcgaagcccggtgcgcccaccagcgtattgtggacggcggcgtcggcgctgtacagcgtcacctgcacgctgtcaaggctggcctcatacagccggcggcacagctccggcgtcagcaggcggccattggtgttgagacgggtcacgaaccactgggcggcctccaccagctccaccagatccgcccggagggtgggttctccgccggtgaaggtcacctgcgggatattggcgcggcgcaggcgctccagcgcctccttccactgagcggtggtcagctcccggctctcgcccatgggctgtccggcggcgtagcagtggagacacttctggttgcagtgccatgcgccgttctgcgtcatggcgctgaccatcaggtccatgcggtggggtgccgacatatagggggcatagtcccccagacttagggtccctacctctaccggcggctcctgcccccgtgcgatggcgatgaggctctccatcagcagagcaaggtcctcccgcagctgctccggcttggtccggggataaacgctgcgggtggccatcacagcctcctccgccaggcgctcccaatccgcctgctccacctcacagtccggggcgttgtcgctctctgtgaagaagcgctccaaggccgccatgaagttggccagcagaatggcccagctgagattcagcgggatcagcttggccccgttcagcagcaggagaaagggttcgtccttcccctccgcccgtggcgggatcatgtgcagccgcaccacgcccggacctttggggtccagtgtgatatggcgaacgcagctcaggtgctgctcccagaattttttctcacgacgggtgatacgcatccgaatcagccctccctaccctgttattttctggcttacagtataccatatctgctgaaatgtgcaagaacatctatgggtggaggaggttcttctctcggctgtgatgccgcagcgcaggtgctgatgggatgattttgtggctttccataaaaaggagccgccctgcaagcagagcggcccaagcgggtgggatattggaaagcttccgatgcttatgatatacccgtccgacagttttgtaaataggagcttttggcggaaaacgggaactttttccgcttcctgtcgaatttgtcatggattttaactttttgtgaattatccacaaaaataggcaaagtaccttttcaaacagtatgcaacatggtataatgcccacaaggataaggggaaacctctccccgacccttccccctttttgcaaaggacacttggaaaggagcaagccacatgaagttcacatttgcctgtaagaaaattgcgctgaacgactctatcaaggaatatgccgagaagaagatcagcaagctggatcggtacttcccggaggaggcagacgcctttgtgaccttcgccgtagaaaaaaagaaccgctgcgtggtggagctgaccatccgggccgccaacggcacgctgtttcgggcgcaggaggaggaccccgacggggatatgcggggcgccattgacgaggcggtggccttcatcgaccgccgtatccgcaagaacaagacccggctggcccggaatctgcgccccgacgctctgacctccaatatccccgccgagttcgatgtggtggaggagccggagtaccatctggtgcgtaccaagcgcttcgccgtgaagcctatgagcaccgaggaggccattttgcagatgaacctgctggatcactccttctatgtattccgcagcgtggagaccggcaatatctgcgtggtgtatcaccgcaacaacggcggctacggtctcatcgagacggagtaaggcgctgaaagtaagcgcatggcatagagcatatggggtcccggacaaatgtccgggacccttttttgctgcaccgccggcaggcagcggaaagggtttctgccggcagggatggaaaaagggacgccccagcgggcgtcccttctatggttttgcgatcgttatggggaaattactggttctgctccggcttatcgtcctccaacagggtcttggcggaggcggccaaaccggccagtccctgaatttcgctggggatgatgatcttggtggcctttccgtcggctgccttctggaaggcctccagcgccttcagcttgatgacctgatcgttgggagcgttctcgttgagcatccgcatggcgtcagccagcgcctgctgcaccttcatgatggaggcggcctcggcctcagcggccatgatcttggcctgcttggcggcatcggccttcaggatggcggactgcttctcgccctcggccaccaggatcttactggccttctcgccctcggcctgcaggatggactcacggcgctcacgctcggccttcatctgcttttccatggcgttctggatctcacggggcggcaggatgttcttcagctccacacggttgaccttgatgccccaggggtccgtggcctcgtccagaatggcacgcatcttggcgttgatggtatcacgggaggtaaggctctggtccagctccagctcaccgatgatgttgcgcagcgtggtggcggtgaggttctcgatggcattcatgggatactccacgccgtaggtatacagcttgggatcggtgatctggaagtagatcacggtgtcgatctgcatggtgacgttatccttggtgatgacgggctggggatcgaaatccgccacctgctccttcaggcttaccttcttcaccacacgctcaatgaaggggaccttcagatgcaggcccacgccccacacggagtggaaggcacccagccgctccaccacataggcacgggactgctgcaccacatagatgttgcggacgatgatcacgagcaccagaatcaccagaatggcgatccctacgataccggggacagacagattgttggtaggcatttgttcttcctcctgtttgttttatgaatggacgggctgacccgcttcttcctccacgaagagccgcacgccctccatgcgctgtaccttcaccagcgtatccttcgggatgacccggccgctggcgctgcgggccgtccacgtcttgccgtcggcgtacactgctccggtggggacggtattgtcgatggtctcggtgacacgggccgtctggcccagcacccggtcggcgttggtgggcgtctcgtccctgtggagcatcttctgcaccagcggacgggtcgccgccagcgccgcaatgctcaccacgaagaacaggacgatctgcacccacagggccgcccccagcaccgccgccagcagaccggccacggcgcccagcacgaaccagatggagaccagtcccaccgtcaccgcttccacgatgccaaagaccacgatggctgcgatccaaatgacgatcatagctcctcctttcgggtttccccttggtttctggcttgattatatcatatccggctgcgggatgccactgttatttccatcctgttaaatttttgtcaaaatcgccaagagacgggcggcggctttgccggggatgcagcaaagagcggagataaagggagggacgcccaaccggcgtccctcataatatatcgcttcaaagcatcagaaggtgtccacgacctgaccgtcggcatcgtacagggtgccatagagcccctccggcacgccggagagccacagggggatcagcacatagggaccactgagctctacggaaaagctctccgggcagtggtcctgctccgggataccggaggtctgggaaatagcggagctgagtctataatccagcgtcagacgccccccttggaggtcactgacatcgccgctgagcaccagcagcgtccgggccgggtcaccggtggtggtgaacatcttgtcaatggcaggcgatcttccgtaccggcgggcgggatcgtcatccgtccgggccagcagaccggcctccgggcagaggtaggtgtgtccgccgaagctggcctgccgcagctgcgtcatactgacctcggtgcggtccggcgttttccagagcacgaaaatgtcatctcccacctgccgcttggcgtggatggagagggtagccgggtccaccccggcgtactccgccacctgctgatacacgacctccacagagtcgtcgtagcggacatagccggactgtgtcaggtgcagatactggcagatagccgtccccatgaaaaccagtacaaaccccgccgccagacctgccaacaggtagagatactttttcattgtccgtcctccttttctcgtcggttgaatagccagcccaaagcgccccacaggaacagcagaacgccgcccagccggacacaggggatcacctccaccagaatgtagtcgatgcaggggatagaccaataggaattgatgagcagtgccagtgcctggaggatccaacccaaaaagggcgccgccacagccacaacgaccccggcgatcataagccccccgaagggtgcaggtacactcgttttacgcatattcgtcagactccttcttattcacttgtcatttgatgaacccgcatttttcagcgacccattggtatcacccatccccttcctctccgcaaaaatctctctttcacagggtagtaaaccgttcctgcgggaacaccctcacatttgagggtgtttttctgcattgtatcacggaggaggtagggtgtccagcatttcgcacgcagtatggcaattttcagatttctgtacagaggatcgggggatgcttcgtcatttctcccaagtgagctccgggatgggggtggagatatccgcctccgggaagggggccttcttgtcctcccgcacccacatggggcggacattgtcggcggcaaactgccgctccacgctggggactctggcggtggcgtacagcagcccctccgggccgtagacctccagcagcaggacacacaccatgctgctgttgccgatgtaggcggccaccgccagcttcccgtcctgataggccatggcgaagttgggcgccacggtatacggcatggcatcctcatcgtcctgcttctccagctccggatcggtgaagctgacggtatagccggtgacgtaggcggtctgtgtggggcaggtgtagtccagatgatagccctcctccgtccgggacagcaccgtcagctgatcttcccaaagcaccacggcgaagccgtcccggatggtcagatcataagaggcgctgtcctccgccgcagggccgagggacagctcctgcagcaggcggtaggtgccgccctccagcaggcgcagcaccagctggccgtcctcctgcgtcatgagatacaccgtgccgccgagcttctcctgcttcagggtcaccacctgctggcgggtgatatccagggggtacaccagctggcggcgggacggcacgggagtgctgctcccgtcatcatccgtctgcaccgggacgtaccacaggccatagccctccggcgcccagtcgggctggggctgcgccgccggatcgatgcccagagtggtgagggtgccgccctccagcggcaggctgaagggagtgaagtacatggcggaggagatcccggtgaagtcgtagccgttgatctcatagctgccgtctgcgttgcgggccagcgccacggtgaggtcgtcggacgctctcaccgggatgctcagggccgggaagggtacggtatcgccaatgtcccacgggccgtagacatcgataaagtcttcgccgccggaccagggggcgccgctgagggacaggggcaggtcctgccagtagtccgccagatgcaccgtcacgtccaccgtctcctcgccggaggcacgggcctgccgcaggacctcccggcagatggggtcgctgtcgtcctcctgatctaccagcaggcactggatgttgtagccatagccgtcaaagatccactgcccgctccggtcgctgtacgccagccggaaggatgcgtcggtggtgtcggcggcggggtcgtagtccatgcgccattgcaggcggttttgctccatgccgatgcgggcggccatatgcaggccctctgcggcggcggggtcgccaatggtgcaggcgtccgtcatcgtcagcggcagggccttggagcccaaggccatagcggcagccgtcagggccacggcacacaccagcgtcagggccaaaatggctctccatgtgcgtttcatgtcacccctcctcgtccggcagctggctcagggccttgcggacccgatccgcctgatagtgataagtctgcttcacacgggtcaccagatcctcgtcctccatctcctgctgggagatgtctccgatgagccgcccctgccgcagcaggacggcacgggacaggaaagtcttgacctcctccagcagatgggtggagaggatcaccgtctcgtggtccgacagcaggcccagcatcacccggtagaagtcctcccggttgaagaggtcgctgccggagaagggctcgtccatgaggatgtagtccgccccctgtgacagggccagcgtcacctccagctggttcttcatgccggtggaaaaactccgcaggggcttgtgcagcggcagctgaaagaactccgtcagcaggcggaaccgccgatcgttgaaggcagggaaatgggcctgatagaagtcccgatgatccgccggggacagggccggaaagaaggagtgctcgcaggtggcaaaggacagcctgtggatattccccggcccgatggtctcgccgtccagcgtcacaacgccctcgtggcgcagatagcccaaaatacacttcatcatcgtggtctttccggcgccgttctcccccaacagccccacgatctgcccctgagggatggtcagcgacacatccgacagggcctccttgtcccgatatttctttgttacatgagaaatttccagcataacggttccctccttcagctccatattccgaataatccgtggcctagggtctgcgccggggtaatgagacgccaagccgcccaacacagcaccgacagcgccgccgcagccgctatacaggccaccatccaccgcagcggcaccgtccacacctgacggcgcagggtgcggccgccatccggcaggcgccgcatgagatagatgctgcgcccgccctgatagtaggaggcgtacagcaccgtggccgacagcagcgcccccaaggcgaacagggccatcagcaccagcgcaggctccatggtctgccagaagggcagcattcttgcccccgcccgcaccacggagcggtttcgcaccgggtcccactccatcaagctctgataggcgctgccatagcggcaggcaaaaaggatgccgcccccaaaaacggcccccagcagggtaccacggatgatgccggccatacgcccggcctccacgttggggggcagggccgccgtcaggccctcccgcgaaaaccaactacacttcacggcgctcacctcctgtcagaagcagggtcagcgtgcagccggccatggccagcgccgccagcaggcagatcatccacgtgccgtcgctgagccatatggtaaaggtatagagggtgacaatggtggtagctaccggccacaggttcagccgtccccgccgctggctccggatgaacagggccgccgccagtgcattggccatcagcagcgccgcatctgtcacccataccgccgcatctgccagcggcagcaggtggtgcaggaaggagtcgctgtacaccagcagcatcagggattgggggccgacaccccagttggactccagcccctgaagcttcagctgcatccccagcagcgctgccgtcgccaccagcgcccacagcaccagcagcatggcggcgtggtacgccgcccaccacagatccaccagctcctcccgcaggcgcaggcggcggaccgtgtaggccgtctggctgccgaagccgcagccccccaggcacagcatgaccatcaccatcagatagcccacggcggcagccagcggcgccgctcccacaccggcggcaccgcctgtgtgttcgggatttgccagatacgtcagcgcacccaccgccagtgccgtcagtccggcggcaatgagtaccgggaccatgctggcccgtgccgccagtcccatcaccgaaagctgcttgttcattccgtctcctcctctgcatacagtctctcaaacaggctccaggcactctgcctgtccagccccatgcgcttcatgctgcggaccatggcacgcagctccgtctcggtcagttcctgtcgcagcgccgccacccgtccggcgtcggcgtggacgcagctcttggctccggtatgggattccaccagtccctcctcctccatcatgcgataggccttctgtaccgtgttgggattcaccgccagcagcgccgacagcacccgccgggagggcagctcctccccgtcccggatggtcccggctgcgatcccctgcttgacatagcggatgatctgctggtagatgggtacgccctccgcctgcataaaggaatcaaactgtatcatggcatcgcctccttcaaccgtattactcatatagtacgctttctaaccgtattataagagtagtacggtttgctgtcaagccctccggtgaaattttttgccgctcttgcgctttgggggaatatccgatatactgggagaaacagggcgcagcccctgtccgtgaatcatactgagaggaccatcgtctatggaaacgtatctaatcccctgcctgctggggcttgaaaagctggtaagcgacgaagtgaaaagactgggcctgcaggaggtgcaggcggagaacggccgcatcctctgccggggaacgctggcggatgcggcacggctgaacctgaacctgcggtgcggcgcacgggtgctgctggtgctgggccgcttcccggcccgcagcttcgaggagctgtttcaggggacccgtgccattgcgtgggaggactatctgccggagaacgccgccttcccggtgaagggctactccatttcctcccagctgcactccgtgccggcctgccagtccatcatcaagaaggccatggtggagcgaatgaaggcccattatcaccgggagcagttcccggaggacggtgtgaagtatcaggtgcgcttctccctgttcaaggacgaggcggccctgtgtctggatacctccggtgaggggctttacaagcggggctaccgggccgtgggcgtggaggctcccctgcgggagacgctggcggcggccatggtactgctgtcccgctatcgggggaaggatcccctctgcgaccccttctgcggctccggcaccattcccatcgaggcggccctcattgccaaaaaccgtgcgccgggactggaccgcagcttcgacgcccagaggtgggcgttccttccggccaaggtgtggatggatgcggcggacgaggccatggacaaggaattccacggccactacgacatctggggcggcgacatcgacccccgtgccgtggccattgccaaggacaatgcccgcaaggcgggggtggaggatatgatccgcttcgaggtggcggacatgagagacttccgccgggacagcacctacggccagttggtgaccaatcccccctacggcgagcggctgatggagaagcgggaggccgaggacctgtaccgggagctgggacaggtttggtgccgactgccggagggctggcgaacgctggtgctcagcagccatacggagttcgagcggtcctttgggcggcccgccgtcaagaaacgcaagctctacaacggcatgatcaagtgcgacctgttcatgtacggcaatgtgtaagggcttcgtcaatatcccacggttttccccacaagttttcaatttgttcattcaattttctaccctgatgctacaatagcctttgtaactttttcttaaagacccgggaggcgtttgctatgaagcacgttttcatcatcaatcccacggcgggcaagtccgacagccgccaaaaaatctatgatatggcggagaagctgcggcaggagcacgggctggaggtgcagtgcctgctgaccaagaagcagggccacgccacggagatcgcccgccgcctgtgccagagcggtgaggaactgcgattctacgcctgcggcggcgacggcaccgtcaacgaggtggccaacggcatcatcggctacgacaatgccgccatgaccgtcatccccgtgggaaccggcaacgacttcctgaaaaactttggcccggaggatatggagaaattccgggatgccgaaaatctgtgggacgctccccaattccctatagacgccatcgacgtcaacggccgcatcgccttgaccatcgcctgctccggactggacgcacgggtggccaaggacgtacataacttcagcgagagtcccattctggacggcaagagcagctatatcgtgtccctgatggtgaatttcctcttcaagggcatcggctcccactggacggtggagctggacggcgaggccgtggaggatgactatgccttggtagcggtgtgcaacggccgctactacggcggcggcttcatgccggtggcggaggcccggatggatgacggcgttctgaacacgctggtggtgaagaaggtcagccgcctgacctttataaagttcgtcaatccctactccaaggggcaatactataagtttccccatctggcccgatgttccacccccaaggtcatccgcatccgctcggaaaaggcggatatcgtgacctgtctcgacggcgagtgcatcacctccgacgatgtgaccatccagctctccgacaagcggctgaacttcttcggccctaccggatgcagctgcaaccgaaccgctcggaagcccctaatttaatattttgtgaacttttcaaaattttccgttttcccccttgcaaaaccggaaaagtgtggtatgataatcagcgttagcactcctgaacaatgagtgctaacgctgatttcgtttttaataaaagatataaggaggaaccaaccatgaaactgacaccgcttgctgatcgtgtggtgctgaagatgacggaggcggaggagactaccaagggcggcatcatcctcaccggctccgctaaggagaagccctctgtggccgaggtcattgccgttggccctggcggcgtggtggacggcaagaccgtcaccatgagcgtcaagcccggtgacaaggtcatcaccgacaagtacgccggcaccaaggtcactctggaggatgtggagtatatcatcgtcaagcagggcgacattctggccatcgtcgagtaagacttctgcgctgtcattgtgagaccggtccgcaggctggtcgtggcaatccgttctccccggccttatagaaagggtattacggattcccacggtcgctttgctccctcggaatgacatttttgtaaaatcattatctgcaatataggaggcaatcattatgtccaagatcattaagcgtggcgacgaggcccgcaaggcgctggagtccggcgtcaatcagctggcggataccgtaaaggtcactctgggccccaagggccgcaatgtggtgctggataagaagttcggcactcccctgatcaccaacgacggcgtgtccatcgccaaggagatcgaactggacgatccgtttgagaacatgggcgctcagctggtgcgtgaggtgtccaccaagaccaacgatgtggccggcgacggtaccaccaccgccaccctgctggcacaggccatggttcgtgagggcctgaagaatctggccgccggcgccaaccccatcgtcatgaagaagggtatgtccaaggccgtggaggccgccgtaaccgccatccgtgcccagagccagaaggtcaacggcaccgatgacatcgcccgtgtgggtaccgtctcctccggcgacgccttcatcggcaagctcattgccgaggcaatggagaaggtctcctccgacggcgtgattaccatcgaggagtccaagaccgccgagacctactccgaggtggtggagggcatgatgttcgaccgtggctacatcaccccctacatggtcaccgataccgagaagatggaggccgtcatcgacgacgcctacatcctcatcaccgataagaagatctccgtcatctccgacatcctgcccctgctggagcagctggtgcaggccggcaagaagctgttcatcatcgctgaggatgtggagggcgaggccctgagcaccctgatcgtgaaccgtctgcgtggcaccctgaacgtggtgtgcgtcaaggcccccggcttcggtgaccgccgcaaggagatgctgcaggatatcgccgtcctcaccggcggtcaggtcatcagcgaggagctgggtctgaccctgaaggacgccaccgtggatatgctgggccgtgcccgtcaggtgaaggtcaccaaggagaacaccatcatcgtggacggcatgggcgacaagcaggctattgccgaccgtgtggctcagatccgcaaccagatcggcctgaccaccagcgagtacgataaggagaagctgcaggagcgtctggccaagatggccggcggcgtggctgtcatcaaggtgggcgctgctaccgagaccgagatgaaggagaagaagctccgcatcgaggacgctctgaacgccaccaaggccgctgtggaagagggcatcgtggctggcggcggcaccatctacgtcaacgtcatccccgctgtcaccgccctgctgaacgaggtggagggtgatgaaaagaccggcgtgcagatcgtggccaaggctctggaggagcccatccgccagatcgctgccaatgccggtctggacggctccgtcattctggagaaggtccgtacctccggcaagaacggctacggcttcgacgcctacaaggaggagtactgcgacatgatcgccagcggcatcgtggatcccgccaaggtgacccgctccgctctggagaatgccgccagcgtctccggcatggtgctgaccaccgagtctctggtggccgacaagccccagccccccgcacccgctgctcccgctcccgaaatgggcggcatgggcggcatgtattaagactcgccgcaaagccttgaaattgcttgattttttgagtgggcaaaagcggatttacgccaaacttacgccaaaaattcaagcgcatgatcgggtaacagaaatcggcacctgcctcaaaaagcaggtgccgattttttcttatttgcgtttctttttgccttttccgtgcggcatcatcgatggtcttgcctttctacgctggttgattggacttttcaggtacttggacagcttgagtatttcaatcagcgagacgaactgctctttggagagcttgtcataatcaatgccaaaatattataacggaacggagacaggcaaggcctgtctccgttcctttacaaacgatagcatcacaacagcggggccaccagcttcataaggctgccgcccagcttatagcccagcttctcatggcggatggtttccggcgtcacccggcggcactgctccagcgtccgctggaaatcccgctccacgtcgcccacggtagggccgccgtagagatacgccgcacactcgaagtgatggtacaggctccggtaatccagattgatggtaccaaccaccgccttcacgtcgtcactggcaaagatcttggcgtggacaaagcccggcgtatactcgtacagcttcacccccgctgccgtcaggtactgatagtgggatttcgccagggcataggcggcctttttatccgggatgcccggcaggatcagcttcacatccactccacgttgggcagcgaatttcagagccgtctccatctcattatccagaatgaggtagggcgtcatgatatgtacatagtctttggcccggttgagaatgtccatatagacgctctcccccaccttataatcgtccagtggacaatcgcagtagggcatcacatagccctccgcctccaccggcggcgagggcagcagcgcctcgtcccagcggggttccttctccgtcaggttccacatttgcaggaacatcagggtaaagctctgcaccgcctctccccgcaggaggatggcggtatccttccagtggccgaagcgctccttgcggttgatgtactcatccgccagatttacgccgccggtgaaggccaccttgccgtcgatgaccaggattttccggtgatcccggtagttatagtgggtggagaggaagggctggatgggggcaaaggccttgcagcggatgcccagcttctccagccgccggggatagtcccacggtagggtggatatctccagcatcccgtcgtacagcacccgcacgtccacgccctgcgccgccttgtccgccaaaattttcaggatgctgccccacatatacccctcatcgatgatgaagtactccagaaagatgaacttctccgccttttgcagctcctccagcagcgccgcaaacttgtcctctccctgtgggaagaacttcgtctccgtgttggcatacaggggaaaagagccgctgcggttgagatagcggcacagatcgtcggtgccggaggattcgatctccgggtcccgcagcacctccgggtcctgatgcagcagatcccggctctcgtcgatccgctgctgcaccatccgcttcagggtacgatggcccacgtccttctccgtgaaccagaggaaaatactggcgggaatggggatcaccgccagcaggaacatccacgtcagcttccccgtggcgtccatgtcgctgttaaagagatggaaaaacatcagcacggtgaacacgccctgcaccgccgcaaaccactcgaaatcgttgttgaaccagcgccacatcatccacagaagcaccagctccagaaccagcagcagcgccatgagaccgaaccggctgaataccacccgcaggatgcccttgcgactctttttcaccagccgcagcacattctcctgctcccgctttttctcgttcaaatgctccaccccttcgtcgttggaaaaacttacctattgcatatggtatcatctaccgtctcccctgtcaagaaaagggcagacagacaccccggaggctgggcctccggggtgcgcggttactcttcgttttttcctttttcttctgctgctcctccagccgccggcccaccttcttcatcagttccagacacagcatggagctgacgcccagcagagccaccgccagagcgatctgatgccgcatggtcccacctcctgtgttttatgaggtacttccattgtagcagataccgccgcttctgtcaaagcctcagccgatgtagccggcctcccgcagcagggtcttggcccgctcctcgttggcatcgctgaccagcaccagcgggccggtgcagcccatagcggactcggcatagatatccttggcccacagcacctgcacggcggcctcgatgtccatgacctcgatgccggggatacctgcggtgcagggctccttggcgggagccttcacctcggccttggctgccgccggagcggaagcctcccgcttctggcgcaggagttcctccagcccggccttgtcggccagcgcaaactccgccttggcaatcttctgtgcaccgccccgcaccagctcgtcagcaaaggacagggcgttggcgatgaggggggcgccggaagcacgggagatgatgagcaccagcttgtcatagtcccggccgatgccggggccatagccgtagccggtggactcgaagctgccgccggtggtgaaggagctgagcatcttgatgagcacgttgcccgtcagggagtcgcacaccatcacgtcgggggtcccctgaagcacatcgttgccccgcatcacggcgccgccgtcggcccggacggactcggcaaagcggatgggatagcccgcctgctgcagctggcgcagcgccgtctcgcaggcccgtgcgccgtccacattgaggatgcccacggtgggctcctgaatcccgcaggccttagcggtgatgatgccgtaaatggcattgaggatcatgccctccagacggttggcgctggaggtgccggtggtggtggccaggaacatggacttaccacgggcgggcgtcaccacccggcccacagtggacacgccgatggggaaagggaaatgcatggtgacggcagcgtccgccgcaccgctctccagcagctccaccatcttgcggtggcccgcctcctcgtccgccacggggacggtggtcacgccctccccctccagcgtgccgatgtaggacacgtccagccccacacgggcggccatcaccgccgcctgcatggagttctcctccccgtgctcgctgcccatgccggtcagcagcaggcggggacggcggccggagcggccggtctccagatactctgccacctcacggaaggtctccacgatggtctgatttacgttcttcatgcttactcccccatctgtgctgccagcgtctcggcaaagccacgcatggcgtctgcgatcatgtggcggatctgggtatcgtccacggcgggagcggcttcctccttgccggggttggcctcgatgacgaaggaaacgccgtcaaagaggttggtgaggcggcccaggaacagagaacccttaccaatgaccatgacacgcttgatatcgccggccagcaacgcctcccgtgcaaagcccacatagggaacgccggagggaatatggccctgagtgggggcaaagccggtgagaccgtgctccacggtgaagttggccagctcagcccgctgcagctcgccccgcttcacggccagagcaccgatcatcttgtagttggccagcggcacatcgccggcaccggcgggcttggtgatgtcggggttctgcatctccggggaatacttgtcgatatcggtgatcttcaggccgttgcgatccagcggatcggtgaccagagaggtgatgacggcctgcggggcagaaccggtgccaacgctgtggcggcccagcatattcaggttgataaaggggttcacgccgtcgtcctgcgtgatgaccacggcaaagccgccgatcatatcctccagagcgggcaggcccttcttcacatggtccttgccgttcatgcccagcttggcggtgcagccgccggcggtgaccaccacggtgtggtaagcgccgctggccaccagcgccgccgcctcgatcatggcgtgggcgggggcagcgcagaaggcacggcagtcggagccggaggcgttgttcagcccggcgatctccgcagcggacttggcgaagttgccgccgccacgctggttgatatcgccgcaggcctcctcggcacagtcgatgacgtactccacctgattgcgatcgatgccggtgacatggatcacgttcagcagggccagcacggaggatgccttggacaccagattctcgtgcatgacgtgggcggagaggttggcgtcaatatcgtgggcccgcttcacacagcccaccagctggcccagatgatacaggccctcagcgccctcttcctctaccagccgctggatctcctccagcgaattgccgtttttcaagcggtccagcacgctctgctccatgacggggttggcggccagcgcctcccggttggcagccacgaattcggcctccagttccaccagatcgaacacgtcgcaggcctgcatcagcagcaggaactcgttctggggcatcatctggccgaacttgccgtaccgctcgtggcagtcgcactccttgtcgcaccagggctgggccactgccgccagttcatccggggtcttgttgccaatgtagacctgattgggccaataggccaccgcctgctcgaaactgcggatgtggctgggcagctccttgagatactcgctgtcggggttgacgatacgctctgttgtctgggtagtgccgttgtgcagcaccatatcgggggtatgagccagaacatagccggctccacggatgacacttttcataggtcagatcacctttcgtatgtatgggcgtgtaaaatccctgagttgtatacaatttatatatagaatagagagggatggcggtgtgccatccctctctgggtgagaccattagtctttgaaggcacaatactgttcacggatactggtcatttcgctgacgatatcgtcaacgtccagcaccatctccatcataccgacctgctcatcatagacagcttcatcaaactctgccttgacttccggctcacatacatgataaaccctgagtcccaacgagactcctgccaaaggacctgcaaaagtggggtcaccgttcgtcacggtctcggctgccaaaccggcaccctcgccctcggcagcacccagcagaaccacaatgttttctgctccgtactgctccacgaactccttgactctcttctgattctccagatccatagcacctgcggccgttcagacgaagcactcggtagaggagaacacgacttcggcgccagcgctctcggcacaggccgcaatggccataccggggacaccgtcacggtcaccgatgacgatggcctttctgcccttgagaatactcatttctattttcctccttcctttcagatttttattccatgcccatggggcgggaaaacaaaggaatgagttttcagcaatgcttgaggatcattgcctcgatgctctcagcggtggcgtcatccttcaccacggagtcgatcatctggccgttctcatagatggccatgaccggcagacccagcaccttctggctgatggccagacggcgggccttggtggtgttcagggagcagaacttcatcttgtcaccgtacttctcggaatactcgtgtacatagggcatcagcgcagcgcagggcacgcagccgtcgccgtaaaagtccacgaaaaccttgccctctgccttgaggacttccgcctcgaaattttccttggtcagatccagcatagtaatgaactcctttcaaaaatcacttctgagcgctgatatacttgtagcactgcatggcggcaatggcgccgtcggcgcaggctgtcaccacctgacgcaggggggtcacccgcacgtcgccggcggcaaatacaccggggatgttggtgcgcatacactcgtcggtcttgatgtagccgccctccatgtccagaacgccgtcgaacatcccggtggtctttttgccggtgaagccgaacagcccgaagaagccgtcctcctcatcggcatggagcaccgtctcctcgccggtcttggtgttcttcaggacgatctcgctgagcagctcatcgccgcccacgtcctccacctcttcattgcacaggacgtggatcttaggctcggcgtccagacgctccttcagcatgggggacaccgtcagggccggacccttatggatcatagtgacctttctggcgtagcctgccagatacagggactcctcagcggcgatgccattgccgcccaccacgtagatctcgaagtcctcgaagaagttggcgtcgcacacggcgcagtagctgatgcccttgcccacatacttggcctcgttcttgcagccgatggagcgggtcatggcaccggtgcagacgataacggtcttgcccagatactcgcccttgctgcccacgaacttcttcacggggccgctgaagtcgcaggcggtgatggtgtcactgacacgctcgcagccgaacttcttgcactgctcggtcatgggagccaccagctcctgaccggtcatgccgtccaccttggactggccgggatagttttcgatgtcatgggtcacggcgatctggccgccgtcgatgcccttttccaggatcagcacactcaggcggctgcggcctgcgtacagaccggcagccagacccgcagggcctccacccaagatgactacatcataaattttattgtccataataatggctcctgtcaatcagtaaatacggcgttgctctcgccagacacggatccaccgccctcggtcagcaggttcagagcgcccatgacgatctcacgacggcggttcatctccttctcaggaggcaggttgggatcgccggtgggataggggatagcctgagcgccgaaaatacgggccgcaccgacggtcttggaaatgggggtaactgtgcagatatgagtggcggggataccagccttctccagctgcttcacgatcgttgcaccgcaacgtgtacaggtacctcaggtactggtcagaatgacgccattgaccccggcggacacaagccgctcagcgatctcctggcccattctggtggagtcagcaacggaggtggagttaccggtggtagagatcagcgccggatacacactgccgatgatgccttccttctccagcattttcagcatatcataaggggcgacccggttggggtcgttgttggcgtacacagggtcgaagccggcgtggacggactcccacttgccgctctccagcgtgtcgccctccacggggtactccttccagaacttggcggtagccgccaccatgtggtcggggttgcccatggggaccatgccgccggtggtgcagagggcgatcttggccttgctgaggtcggcaatgggggcagagggctccaccttctcataggtggagatctccagctcggtcttgtagggctcgcccttgaccttggccagcagcatatccacggcacgctcggcaccgttcttctcccggaagatgttcacacgcttgcccttggcatagtactgctcgtcctccggcgtgccgatgggctcacccgtcagcagctttctggcaaagccggccatcaggggtacggccttgcggataccggcggcggacttagccacccgcaggatgtacacgtccttcttgaacatatccacggcggggttttcctcgtacaggccggtgatggcctccacccccgcctgctccttggctgtcttgcacacgtcgccgcaggcgatgccgaagcggccggcgttaaaggcaggaccggcaatgatgaggtcgggctgatacttcttgatctgctccagcaggaaggcccggccggtctccatgttctcggcatagaagttatcgccgcagacgatcgtggccacgatctcggcaatatccttcagaggggcaccgaaggtattggcggaaccatgcatcccctcaaagacctgaggctctgcatacgccatatcctcgccgccgatctgaccgaagaactggttggtatagaacaaaattttcttcattctttccctctccttcgtcaaacagtggtggcggacaggtaggtgttaccctgcagattatgtccgcccatgataccgtggatctccagcagcagcgtgccgtcgggcttgatggaatccacattgccgccggtgacacgctccacctccttcagctcgcccagaacacggtccatcttgggcagcaggatggtggcattggagttgccggtggacacgatggcgttggcctcggtgaccacatccggcagagactcggacataccgtcggtaccggcgtcctcgttggtgatgataacggtcttgacgccccgcttctccagaccccggcaaacgtgcatcaggtcggtggtggggttgccgaagccctcctgagagatgatggcggcgtcggcgccgaactcctcggtggcgatgcggacgctcatcatgatgtcccgctgcttctccttcagggtgaccatcagggggttcagaatgatgcccacgaagttcagctccttgccgtgcttggcccacagggccttgatgacggcgttgttcaggtggtgataggtcgtggtcttggagccgggggacacgcagttgccgctgatgatcgcaccgtcaaagaactccgtgggagagacaacggtgggtaccagctgcttggtatcccggccgtagaagtaagtatcgtgcagcaggccctgtgccatgcagttgcacacatacaccaccttgggcaggtcaggatactggttggcacgctcggcggcggtgggccagtggtagaactcggaatcatagctctccgccttcacagccacctcacccagccagcgggccgccttcagcccggccatgcggacgacctcctcatgctcgtgctgatccacatcctcccgcttggtcaggtgcagcaccacgttgttcagcttggagaagagcgtgtactgggcggcggggccgctcatgtcgatgaggccctcctgaaagcccacgatggggcccgtggtcaccacggcgcagcccttgagtacataggtcacgccggagcctgcctccggcacgtcggagccgaacacaccggggaagatctctccctccggcttgtaacggggctccaccacatccttcaccggaaggatacggcaggattcgcccggcttggcaagatctaccttcacggccgtcacacgggggtcctccagaatgagcttcttcagcccttccacgtccaccgtcagcacgccgtccttcaggtcgttcttgtcacccaggacgacatcttttacttgaacatttctcagttccagatccatgatcgatgtgtcctcctatctatggtcgttgctttttcacaatcgcatctgcctataatataccccatcaaaaccaaaaaatcaatcatttttatcaaaattatgtaaaaatttttaaataaaattttgtatacaatttagcggcgaattttgtcctcttttcgttcaagaaatcgccctattcccactgtatcgtgtgtttttccacatggatccgcctgccacccccgccgggtcgccctgctcaccggccctcccttcgccgctgccgccgcacagggccaccttccttgtcccggtttctccgtttctttcattatcgtttttttagatattacctcttacggttccgacggcatatgccgggatgccatccacggcaaaaataaaccgccccggacacataggcgtccggggcggttctgcgtttttcatatgcctctctcagaaggcgaaggtattcctcaccagagagcagtcgatcatctgatagtcctccagaatacgccggggcatcttcgcccgatccggcggcgtgaaggtatcgatgcgggtgatggcctccgacatgatgaggcactcctcctcgtccggagtctggggccgatccgacagtaccaccgtgcgatagggcgtctcgtggggtcgcagactgccgtacagcgggtggttgcacagccggtggcctatatacaccaggtctctggcccgcaccagaatctcccgataggtatcctccgggtacaggcgaacctccccctgcccggcgaactccttcgccgccatggggttgttggtaacgatcagatacatggcgcacctcctgctccgtcataggccgtcctccgggcggtcgggtaaagggatgccccaacgctgtgcgttggggcgtttctggcggaagtatgtgggaatcgaacccaccagggcggctgttcaccacctacactggttttgaagaccagggggcacaccagaacccatctactcccatatcccggttgtatacaggagtttagcacaggtcacagggtaaaatcaagctttttcgataaattctctgcaaaattggaaaatccgattctcgtggccgaaatttatccgctttgtcgccgctcacagggagccgatgacctcccggtggtcgcccaccattttggtcaccttggtcttgtcgaaaaattccagaatggccagcgcatatttccgggaggttcccagcaggtcccggtactccgccagcgtaaagacggggtggccctcaaagaaatcacgggtcagggcgcagacctcctcatagacatccttgtggtaaaacagctggggtgtcagcatcaccagctcgccgcaggacaccagattctccagcacctttttgcagtcgtcccgctcgttggttgggaaggaggcgtagagatcgtccacaaagggtacctcccgaccggacttacggtagctgtccagcagcttttgccgcagggccgtctggcgcttggtgagcaccacccggaagtccggcagggcgcagcggtcggcaatggcagtgacggtgccgccccggagcatggcggtaaggatggcgtcggcctccttcagctctgctccccggagggccttctgccgcagggccgctaccttcatgcccgcatggagggggttggccttgtgatactccgccagcacctgctccaccgactggcaggccttccggtacaggggggccgccagatagcgtcggggcagaatctccagcagatcgccgctgttcaccagatcctccagcgcccgcaccatctcctcctccggcatactctggcgctgggccagggtctgggccgtgggcagggcgtagccatactcctccaccagctgctgcagctgggcgccggcggaaccgccctcccggatggtcaaggcgcggatcacctccggctgatgccgcttatgccggggcgggcagtcatccaggatgacgccgccgccgatggtctccatgggggagtagaaccggataacgaagcggtccccccgcttcaccgccaccggctccgtaaagcgcagttgggcaaagccggactggcccggctccagcgtatcctgctccagcagcaccaccttggcgatgtgggcggcagccccgtggtagaagtgtaccggggagccgttctcgatgatgcggtgggaatccttcagatcggtcaggcgcacgtccagcatccgggacaggcgcagggtatcaggcttgcatagggtatcgccacgggccacggcgtcccgccgcagacccgccagattcaccgccacccgctgcccggcgtaagcctgctccaccgagtggttgtggacctgcagggtgcggaccttggcccgctggccggagggcatcagctccaccgggtcgcctacggagaggttgccctcgatcatggtgccggtgaccacggtgccgaagccgtccttggagaacacccgatccaccggcaggcggaaggggatctgctcgttgcggacggccacccggctcacccgctgctgaagctcctttttcagttccgggatgccctgaccggtataagcggacaccggcaggacaggtttgccctctaaaaatgtccccttgacgtgggcggcgatgtcctcccggacaatttccacccactcctcgtccaccatatcgatcttggtgatgaccaccacaccgtcccggatgcccaacagggtcagaatatccagatgctccacggtctggggcatgaagccctcgtccgccgccaccaccagcatggcaagatcgatgccgccggcaccggccagcatattcttgatgaatttctcgtggcccggcacgtcgatgataccggcctgcgtatggtcgtcaaactcgatatgagcaaagcccagctcgatggtgatgccccgttttttctcctcaataaggcggtcagtgtcgataccggtcagggccttgatgagcatggtcttgccgtgatccacatgaccggcggtgccgatgatgacgtgcttcatgccagcacctccgctgccgtgtcagcgatatactccatgtcctccgggaagatggtccgcacgtccagcagcagccggccctcggtgatgcggccgatgacgggcttttcccggcagcgcagagcctgctccgcctgattgggggacagcttgtccgccggaagggccacagcaaaggtgggcagcagctgggtggggacggagccgccgcccaccggcccggactgggccactacctccgccgccacgccccgttccttcagcagagcgcacagctgggccgcagaggcccgcagatcctccccggagacggccagcatggccagcgtggggatctcctgctccgcccggtgcaggtcctgataggtggtgagggtggcccacagggcggcaatggtcattttatccacccggatggcacgggccagcgggtggcgcttcatccggtcgatgtacggcttctttcccaaaatgataccggcctgcggcccgcccagcagcttatcaccgctgaagctcaccacatccaccccggcccggatgctgttttgcaccgtgggctcgtcgtggatgccgtagtgctccagatccaccagtgagccgctgcccagatcctccaccaccggcagaccggtgcggcagcccagggccacgatgtcgctcagaggcagggactcggtaaagcccacgatgcggtagttgctggtatgcaccttcagcagcgcacgggtctgctccccgatggcccgctcatagtcggagaggtgcgtcttattggtggtgcctacctcccggagatggcagccgcacagctccatgatatccggcacccggaaggagccgccgatctccaccagttccccgcgggaggtgatgacctcgcccccctgagccagagtgctgaggatcagcatgacggcggcggcgttattgttgaccaccatggcactctcggcaccagtgagacggcacaacagcttttccacatggtcgtggcggcttccccgatggcccgcctccacgttatactccagcgtggaatagccccgtgcgatgtcgtatacggcgtccgccgcccggtcagacaggcagccacggcccagattggtatggagaatgacgccggtggcgttgatgaccggccgcagagacggcagggactcccgtgccgccacccggcagatccggtcgcccaactcctccagcgtggggagggtcgtcacctcaccgctgaggatggcggagcgcagctgctccagcacggtacggatccactccgtcacggaggaggaagcgtagtgctcccgcaggtcggacacctccggcagatcatatagctcggtcactttggggatggctcgcagcagctcattcatacggtttgctccttttgttcggcagccgcctgtcggcgggcggtgtagatggaatggaggatattgacgcagtagatgcccgccagcaccagcgccgtggccagcccctgcagcagggagaagggctcatggaggaacaccacgccgctgaccacagagatcacggtggtcaggccggagaaggcggaggtgcgggtggggccgatgatggtgacggagcggttggtcagcagaaaggccagcgtggtgcagccgatgcccagatacaggcaggaggtcagaaagctgccgctggtaaagggcagggtcagatactccgtcaccgttccgtggacgccgttatacaccaaggcgcagacggtgaagaacaccgcccccgtcaggcacatgaaataggtcttctccacgggggtataggccgtcagctggcggttgtggatgaaataaatgacgtcactgaacacggccccgaacagcagcacatagcccagagggttgaaagtagggctggtccccttcagcaaagtgatgatgacgatgcccgcagtggacagcaggacgccgcccacctgaaatttactgggcatctcgtggaggaacagcgccgaggccagcaccgtgaagatggggatgcaggcgatgatggtgccgctctcggaggcggaggtcaactcgatgccatacgtctcgaagatgaagtaggccgccggaaggtacagggtcatccgcagtagcggccacggcttcttggtcttatagtcgatatggatgacgcccagcagggcgcacagggacatggccgcagcgcccatgagaaagcgccagctcaaaagggaaaatgccggcaccgtacccacgatgcgcttggtgaacataaaactcaggccgaacagcatggagctgcagcaggagcccagcatggcgctgatctcacgccaactcattttacccacagggatcatcctcttccatatcgtttttttgcagagaagggcttctatctttggtatacacgattttaacatatctttttgataaaacaagcccctgcagaaaagaatctcgttgcataatggaaaaaagctgtgtataatacaggaaaataccgaaaatcaccacggggccgacccaaagtccggccaaagaaaggacgaaacgctatggatcccagaaaattgatggagcgtctgaagggcgctgcggctctgacggagcaggatgtgggggaattttcccattttaaggggaagatgatgaaaatcagtgtccacaactatgccgtggaggactggggcagcctgtccctgctggaatcccgtggcatggcggggctgatgcggcgggatatgctggtcatcaactcctgcgtgaaggatatcccggtgctggtgatccagtacatggggctgtttggccgccggatgctgcaggtccatgtgttggacgtgatgaaggacaagaccgccgccggacgctttgcgtccttgggaaggatggcggagcagtccggcaccgccgtgcaggaaacgccggtggagtggtatacccccatacagctgcccggcagcgtcaccgtcaccggcaagagcagtcagctggagcagttggccggggacgtggccgtcagctatcttgccgccgccgctcaggtgcgccagaccggcgccgtggagggccggtatctgcggctgcggaagctcatgagccagctgtttgaccacggcggcttcggctacgacgccatccgggtatgtctgcagcagcagaacaccgaggatctgtacagccgctggctgttcggtctgggggaggctcccgtgtccggcagcggcgaacagagcgatgccgccgcagcgcctgcacaaacctcggatgaagaaaaaaacacgcctcaggagccggagacgacctccgagggcagtgaggctccggaggagaacggctgagcccggcagcggcaaatcatggaaaaaagcagcggaacggcccgtcttttccgctgcttttcttgcgaaccgatcgctttcgcggatgtatacaggacgctatttgaaagatttataataatttttatatctaattttggattattcgcat

SEQ ID NO: 12377 - DNA, 2377 bp, Unknown
  gut microbiota DNA sequence
tcaaggaactggcgtggtttgagaaccccagagaaaagactctgaaaaatggtaaaccgcgtgcgcgccgggccaagtggctgccggaccgggaggtggatctggtctacctctattccgaccgctatcttgatgccagaaatccctctcccgccgaaaccgacttcttcaccgtcacaaggatggatgcctggggcatgagcacctggttcatgtgtaccccggaggccgccgggaagctgatcgccatggattacgataatctggccgtccaggaaaccaccattgtgggataggagaaaatgaatgataactttggaacaactaccccccaagggggtcaagcgagaacaggccattttggagctgggcaaggaggaagcaaacggcgaactgctgttccagcttgtgaatacagaaaagggcaagtgcaaaacggctgctcaaaaggctttggcgcagctggaatatgcccctgctgccccactgtgggccaagctggtcaagggcaaatggatgggcagccatatcatgtcggatacctgttccgactgtgtatcggagcagatcgccccggtcatcttaaagactctctctcagctgctggacgagggggacacaaagccactggaaatcgaacaactgaacttttgtttccatttgatgctggggaaagcctcgcccaaaatgctggaggtctaccgctttctggcggaaaacatccagcggatcgcccagctgaaacgcgcacctgcttattctcgtgatgattgtacctcctggtggatcacggacgggcttcgcatttgggatgccacacccaaggaaaaagagaaaattcccgctgtggtgctgaccgcctccttgatccgcaacccggatgagcggctgcaagcattggctgatgagctgaatgaacgctacggcggcagctggctgatgccggtctttatgaaggcgatcatcacccagcccaaggagcaggtgtacgagacctattcgccccttctgactacgccgcaaaaaggctatttgttccatgcgttgggaatgctccattaccgctgttatccggaaggctggatctatgaacgcctgggcccggatggaatgatcgctctgattttctggggggattatagctatgggacctatgacacaaggttcatgtttgaacggtatgtggagctggatgagcggtggctctttgatctggccaaggacccggagggccgcaagcctacggtgacatggcagacctacaaccggggcggtgtgctgtatggaagctacgacgaaatgttcatcagcctgctgccctgcaaggtggaaaacccggaactgaagcgcattctgcgggactacttccgtattcgcagtgaaaaagtgaaggtggaagaaagcattacagtttacaaagacgccactgagcggtttggggattaagcgagaatagagggactggccgaaggagtgatacagcatgattggaacagatgaaaaccgggcggtgctccatgtggaggtcatcttctggggcggcaagagaaagtctccccccagcttggtcagtggaaagtatagtccccattttgttgtcacaggaaccactgaatatctgggtgtgtgcttcctggatggaacggagcgttgtgcatttgatgaaacggctttggggaatgctcagcccctctatccagataccattgactacgccccgctggaaaacaatgcggaatttttgatctatgagggagcaaaagtcgttggcaaaggccgggtgctgggccggaccgttccctatcaagtgaaacaacaacgaaagtaggtgccttatgtaccaaattgcatatattggccgctgggagacaatcccggaaacggctgccgccatctgtgaccatgacactcccaagctggaggcgctgcttcaaggcggtctggatttagatgttcccatccagctcagcgaatacatcaagctgatgccattggagattgcggtttttcggaatgatgtgcccatgatccactttctgctggagcatggggcaaatcccgacctggcagaggaacagcccctgctgctcactgccgcccgctgctgcgggccggaggttgtctccctctttgctggacaggccgcaaaactcagcccgaagcagaaagagcgggccttccaggaagtgcgctgggggcagcgagcggagaatatcccggtgctggagcaagccgggatcacggtggccgagtttggcggcgaggcattccgggccgctgtgtccgagggcaataccaaacttgcccgactgcttctggaaaaaggggcagacatcaattaccacaagccggacatggtgtttccgaacgcctctac

SEQ ID NO: 12378 - DNA, 7191 bp, Unknown
  gut microbiota DNA sequence
cgccatggcggccagcagattctccatggcgcactgagccatggcgtcagtgacctgacggctctgctcgatggccagcgccgggtgctgcaggaagcgctcctccagacggtccatcttctggcgctcccggctgctctcggagtcgtccggcaccagcatacataccagcttctccagcaagccgatgaggggcatcagggccaccaccgtggccagacggaacagggtgttcgccagagcgatggacacggtggtcatggtggtatccatgaagtcaaaatgcaccacggcattgacggcataaaagatgcagccccagatcaccacgcccagcacgtcgatgagcagatagacgaaggccgtgcgcttgccgctgacgttggcgcccagcgccgacagcagcaccggcaccgcagcgccgatggcaatccccatgataataggaagggcaatttcaaaggtgacggctccggtggcggccagcgcctgcaggatacccacggcggcggaggcactctggatgacgctggtgaacacgatgcccaccagaattcccagcagggggttagcgaaggaggtcatggcgttgatgaacaccgcactctcccgcaggggctccacggcaccgctcatggcggtcatgccgtacatcagcacggcaaagcccagcaggatctcccccacatggcgggtggtctgcttcctgctgatcatccgcagcagggtgccgatggtggccatcagggccgtcagagtggaagtgctcagcagagccacccagccgccgccggagaggttgctgaggcacagcacccagccggtaacgctggtacccaagatggcgcccagcacgatgccgatggcctgattgaccttcatcatgccggagttgacgaagcccaccaccatcaccgaggtggcggaggaggactggatcaccgccgtgacgccggtccccagcaggacccccttgatgggcgtgctggtgaggttatatagcaccagctccagctgattgcctgccaccttcttcagtgcatcgcccataatggacataccgaacaggaacagggccacgccgcccagcagggaaataaaatcagaaacgctcaaaacgcattccctcccagtttatttgattcaacaggatatagtataacgtaaaaaactccggctgtcgacagaaactatggaataatttgtggaaaaaagcataaagatttgcagcggttctatacccctcccacagaagtttcccggcaaacggaatgcagccttgtcatacggggcagactatggtataatactctatcataaaattacgctgccggtctatgggtccggcaatcttgtgaggaagcatatgaaacacggactcatcgtttttctggtatccatggtccccctcatcgagctgcggggcgccatcccctacggcgtggcctacgggatgccgctatggctgacgtatctcatcgccatcgtggggaatatgctgccggtgccgtttatctatctcttcgcccggaagatccttctttggggcaaggataagcctgtcatcggaaggttcttcaccttctgtctggaaaagggtgagcggggcggccaaaagcttcaggcgaaggccggccggggcttgttctgggctcttttgctgttcgtggggatccccctgcccggcaccggtgcgtggacgggaactctggcggcctctctgctggatatgggctttaagaagagcgtgctggcctgcatgggcggtgtgctgctggccgggtgcatcatgggcatcctcagcgtgctgggcgtgtctgcctttggcgctgtggtacaatagttttttacaatgggactttttcttatcattcagaaaaagtcccatttttatacaaataaattattcttgtaaattaacagacaatgtgttgattttcacattaagatgtgctaagataacggacaatttcaagtcagcctctgccgaacgggccgctacaagggccggacggcatatgcttatagatccattcacaaggaaaggcggtgacgaccatgtatctggagctggtgaagcaggtatcgcaggtggagcaggagacggaagcctccgtccgtcaggcggcccagcaggctcagcagatgcaggaagaggcggaacgctccggacgtgcgctggtggaacagacacgccgggacttgcagcagctggagacccagcgccgccggcaggcggcgggggacgccgaagcagcccggcagcaggcgctgcgggaggttcaggcagactgtgacgccctgcggcagcgggccggggccaagatgcctcaggcggtagacaccattctgagaagggtggtgcaggagtagtggccattgtgaaaatgcagcggctgcacctgctggcgatggaggaggagcggcagtccctgatggatgcgctgctgcagttcggtcggctggagatccggcagacggaggatctggcggcggatccggactgggcggtgctgctgcatccggaaccggcggagctggttcgctggcgggaggcctcccgccagatggaggcggcgctgtcggcgctgggcagccggggtctgaaaaagaccggactgtttgccccccgcccccgcatcagccagaggcagtttctggatgaggcggcactgcggcagcagcaggcgctggcagcggagatcctgggccatacggcccgcaaggatcagctggcctcgcagcttcagcgcattcaggcccagcggctgtcgctggagccgtgggcggagctggacgtgccgctggagctgcaccgcagcggccagctgtcggtgatccccggcaccatgcccctgcggtcggacctccagcaggcaaaaaacgctctggaggaacagccggcggagctggtacaggtatccctgtcgccgcagcagcagtatcttctgctgctggtacatcaggcggcggagagcgcagtgctggaggtgctgcggcccttcggctttgcggcagcctccttcggtaccctcaccggtacggtgcaggagaacctgcagcggctggacgatgaggaggagcaaacccggcaggatcgccgggcggaggacgctgcgctggacgccctgggaggccgtcagccggagctgaagctgggtctggaccggctgaagctgcagatccagcgggaggataaccgccagcggctcctcaccgacggacatatcttctatttggagggctgggtgccggaggcagacaccgcccggctggagcagctgctggagggctactcctgtgcgtgggacctgcgggtccccaccgaggaggagtatccggaggtgccggtgacgctgaagagcaactggctcacccggtccatgacctgcatcacggagcagtactccatgcccgcctatgacggcgtggaccccaacccggtcatggccccgtttttcatcctgttcttcggcatgatgatggcggacatgggctacggccttctgatgatctttctgccgctgctgtacctgaaaaaggcacgaccgccggagagcaaacggggctttatcgaactgatcctgtggtgcggcatcgtgacctttattttcggcgctctcaccggcggctttttcggggacttcatcccccagctgtgcaaggtcattgacccggccagcacctttgagctgcccagcctcttctcgccgctgaacgacaccatggccatcatgatcggctccatggtgctgggcggcatccagatcctcaccggcatgaccatcagcgtggtgaagaaaaccaaggacggtcactttgccgacgctttgtgggacgagatcacatggtgggtcattctggccggcggggccatggcgctcctgaaggtgggcagcgtggccggtgtgccggtggtgctggtcatcggcgtgctgatgctggtatacggctccggccggggcaagaagggcttcggcaaggtcacaggactggtgagcgccgtatataacggcgtcacaggctttttcagcgatatcctctcctatgtgcgtctgatggcgctgatgctgtcgggcgccgtgctggcgcaggtgttcaatatgctgggtgccaccaccgggaacgtggtgggcttcgtggtcatcgccctcatcggcaacgccctgaatctggcgctgaacctgctgggctgctacgtccacgatatgcgtctgcagtttctggaatttttcggtcggttttacaaggagggcggcaagggctacaggccgctgtccgtagaaacacaatatgttgaagttatgaaggaggataattgatatgtatgattttctgaacgccatcggcggcatgggtttcgccattctgggtgcggcgctgacggtgggtctgtgctgcgtgggctccgccaagggcaccggtctcgtgggtgaggccgccgccggtctggtcagcgaggatcccgacaagagcaccaagtgcctgatcttgcaggtgctgcccggtacgcagggtctgtatggctttgtggccctgttcatcgtcctgctgcaggtaggtctcatgagcggcactcccgtagatctgacgctgacgcagggtatgtccttcttcgccgcctgcatccccaccgccatcggcggctggctctccgccaagttccagggccgtgtggccgccgcctccgtgggtatcgtggccaagcacccggaggccgccaccaagggcctgatcttctgcggtatcgtggagttctacgctattttgtccctggtggctaccatcatgctggctaccaacattctgtaaaacggagcaggccatgaagggactggaacggatcacccagcgcatccagacggatgcacaggggcagatagaagccctgacggcggcaggacgccgccaggcacaggagatcacggagaagtacgaggaccaggcccggcagctgcgccaggcggatcaggaaaaggccgcccgtgatgcccagcaggatcagcggagagcccagagcggcgccgaccgcacccgccgggagcagctcctcgcctgcaagcagcagctcattgacgataccttccgacagacccggcagcagctgacgcagctgccccgtgagaaatatgtgcatctgctggtgcagctggcggtgaaaaacggagccggcaccgaggagatcatcctctccccggaggacgcaccgctggggcagcaggtgctggagggtaccaacgctcagggacggcacttccgcctgtctgcggagcagcgtcccaccggcggagggctgatcctcaagcagggcagcgtggagtgcagctgcaccttcccggagatcctgcggcagctgcggcaggagatgtccggcgaggtcgccgccattctgtttgactgagagggggctgccctttgaccaagaagtatcatgatacggaatatctgtatctcagcgcctgtatccacagctgggagactcggctgctgaccccggagcgccgggagcagctgctgtcggctccgacggaccgggatgcggcccgtgtgctggaggagatgggctggcccgcctttgacccggagtcggaggcggcgctggatcaggccgttggccggcggcgggaggagctgttcgcccgtctgggcaaggatatgcccgatgcacggatcctggacgttttccggctgcccacggactatcacaatctgaaggtattggtaaagagccggggcgaggactgccgccgcctgctgatggcagggggccgatgggacccggagcagctgctgtcggactaccggcagcgggagctgcgggacttcctccctgtcgagacggcacaggccgtacagcaggcccgtcaggctctggcggagaccggcaacggtcaggagtgcgatcttgtgctggacggcacctgcttccgggaactgacccggctggcggatgcggtggactgccccgccctgacggactatctccgcacccgcatcgacggcgtgaacctgtgcagcgccgtgcgggcgcgccggctgagaaaagggccggactttctgcacagggtgctgctggagggcggcagcgttcctccggcagcgctggaggaggccgcccctgccgatctgcgggagctgtatgccgccacgccgctgcgggaagccgccggtctggcggagggcatctgcgccggaggcggcagcatgacggcgctggaaaagcagtgcgacaacgccgtgctgcgtctggcggccaaggcccgccgcacccccttcggcgtggagacggcactggggtatctcattgcggcggaagcggagctcatcgccgtccgcaccatcatgacgggacgccgggcgggactgtccgccgacgccatccgggaaaggctgcgtgatatttatggctaagatcgccgtcatcggtgaccgggacagcgtgctgggcttccgggctttgggactggaggtccacaccgtggaggacagcaccgaggcccgccatctgctccgtaaggctgcggaggagggctgtgcggcggtgttcctgacggaggcgctggcggctcccctgcaggaggagatcgaccgctataaggaggcgctgacccccgccatcgtattgatccccggcaagggtggttcccttgggctgggggagactgcgctgcacaacgccgtggagcgtgccgtgggcgcagacatcacttgaagggagcgtaactatgggcaaagtaatcaaagtctccgggccgctggtggtagccgacggcatggcggacgccaacatggcggacgtggtgcgtgtgggtcccaagcagctgatcggagagatactgaatatgaccggcgaccgggcgtccattcaggtctatgaggagacctccggtctggggccgggtgcggaggtggtcagcaccggcgctcccctgtccgtggagctggggccggggctgatcgagagcatttatgacggcatccagcgcccgctggaggagatccgcagcatggccggggcccacatcccccgtggtattcaggccccgccgctgccggaggataagaagtgggatttcaccccggtggccaagcccggcgacgccgtggtggccggagacgtgctgggtaccgtgccggagacggcctcggtgctccacaagatcatggtcccccaccgcatggacggcaccg

SEQ ID NO: 12379 - DNA, 6328 bp, Unknown
  gut microbiota DNA sequence
gctccctgaaagagctgaccatggtgcagaagtggcccgtccgtgtggggcggccctatcggcggaaattcccgccctctgcgccgcttcagaccggccagcgggtcatcgacaccatgttccccgtggccaagggcggcaccgccgccgtacccggtcccttcggctccgggaaaacggtggtgcagcatcagctggccaagtgggcggacgtggacatcgtggtctacatcggctgcggcgagcgtggcaacgagatgacggacgtgctgcgggagttcccggagctgacggatccccgcaccggcgagacgctgatgaagcggacggtgctgatcgccaacacctcggatatgcccgtggccgcccgtgaggcctccgtatacaccggcatcaccatcgctgaatatttccgggacatgggctacgccgtggccgttatcgcagattccacctcccgctgggccgaggccctgcgtgagatgtccggccgtctggaggagatgcccggtgaggagggctaccctgcctatctggtgagccgtctggcccagttctatgagcgggccggtgtggtgcagtgcctcggcagcgaggagcgtaccggcagcctgacggcggtgggcgccgtgtcgcctcccggcggcgacctcagtgaaccggtagctcagggtaccatgcgtattgtgaaggtgttctggtcgctggatgcgtcgctggcctaccggcggcacttcccggccatccactggctgaactcctactccctgtatctggactccctgcgcccgtggttcgatgagcatctgggacaggcgttcatgcagaaccgtgaccacgccatgcacctgttgcaggaggagaacgagctcaacgagatcgtccaactggtgggcaaggactccctgagccccaacgaccagctgacgctggagatcacccggatgctgcgggaggacttcttgcagcagaacgccttcatggacgtggactcctacaccggcttcgaccggcaggagcggctcatgtccctgattttaggctatgagacgctggggcgtcaggccctgacccgtggcgtcaccgtccgggatctggcccatctgccggcccgtgaggagatcggccgggccaagtacgaggaggagagcacttggcgctccgcctatgacaagatcgaagcggacctgcagagtcagatccgtgagctggagcgaaaggcgggtgaggagcaatgatgaaggaatatcgcaccatccgggaggtcaacgggcctttgatggtggtggagcaggtagagggcgtcacctatgacgagctggcggagatccagctgtccgacggcactctgcgccgatgcaaggtgctggaggtcaacggcgaccgggccgtggtgcagctgtttgaaaactccgccggcatcaacctgcgggactccaagatccgttttctggggcatcccttgcagctggcagtgtccgaggatatgctgggccgtgtctttgacggcatgggccagcccatcgacggtggccccgccctgctgccggagaagtatctggacatcaacggtctgcccatgaatcccgccgcccgtgactaccccaatgagttcatccagacgggcatctccgccatcgacggtctgaacacgctggtgcgcggtcagaagcttcccattttctccggctccggtctgccccacgcccgtctggcggcccagatcgcccggcaggccaaggtgctggatgactccactcccttcgccgtggtgttcgccgccatcggcatcacctttgaggagtcggagtacttcgtctccgagttccgccgcaccggcgccatcgaccggacggtgctgttcaccaatctggccgacgaccctgccgtggagcgtatcgccacaccccgtatggccctcaccgctgccgagtatctggcctttgaaaagggaatgcacgtgctggtgatcctgacggatatcaccaactacgccgaggcgctgcgggaggtatccgccgcccggaaggaggtccccggccgccgtggctaccccggctacctgtatacggaccttgccaccatgtatgagcgggcgggccgccagctgggctgccccggttccgtgaccatgatccccatcctgaccatgccggaggacgacaagacccaccccatccccgacctgacgggctatatcaccgagggacagatcatcctgtcccgtgacctgtaccgcaaaaacattcagccccccatcgacgtgctgcccagtctgtcccgcctgaaggacaagggcgtgggcgagggaaagacccgtgaggatcacgcccccaccatgaaccagctgttctccgcctacgcctccggcaaggaggcccgtgagctgatgaccattctgggcgagtccgccctgacggatacggatctgaagttcgccaagttcgctgacgaatttgaaaagcgctacgtctcgcagggcttcgacaccgaccgctccatcaccgagacgctggatctgggctgggagctgctgcgcctgctgccccgtgaggagcttaagcgcatcaagggcgacatggtggataagtatctgcccaaggaggactgatcgctatggcgggaaagaccatcaatcccacccgcatggagctgacccggctgaaggccaagcagaaaacggccctccggggccacaagctcctcaaggacaagcgggacggtctcatgaagcagttcatgcaggaggtgcgccgcacccgtcagctacgcaagcgggtggaggaggggctggcgcaggccaatgccgcctttaccgtagccagcgccgtcatgtccccggagatgctggagcaggcgctgatggccccccggctctccacagaggtgacggtggaccagcgcaacatcatgagcatcgccgttccggtgttccatcgggcggagcaggaggcccagccggatctggcctgctatggctttgcccagaccagcggcgagctggacgatgctctgcaggccctgaaccgggtgtacagcgatctgctggagctggcgcaggcggaaaagaccgttcagctgctggcgcaggacatcgagcgcacccgccgccgggtcaacgcactggagtatgtggtgatcccggaaaatcagcggaacatccgctacatcaccatgaagctggaggagaatgagcggggcaacaccacccggctcatgaaggtcaaggacatggtgctgcaggacgcccaccactacaagtcataacgaaagaagcggaaggctctcgccttccgcttctttgttgattcgctgccatcgatgggattgctggcagcatcattccccctcgtactcgctgaggcccagctgccaccggtcggcctcagccgggcgggcggtcagccccagataataggcatccagctccgtcagctggccggtgatgcgatccatatcgccgttgatggtgtacatgatgtcctgtgaccccgtctccttgcagtagtccacgtaagcctgtgggatcagccccccggtatagtacagatccgggaccccgaaggcgtggagcagctcatgtgcgtaggcagatggcggctcatccacagggcctgccgcccggagaaacagattgaccagctccgtgtcgcaggccggactgttcagccgtcccagcgaccagggactgggcgttccctcatagggcgtgttgaaaaagaaaaagtacaccacattgtctgcgtcatacgcacgcttcagctcctcggtggggatgttctcctgaatataaccggcctgcacatcgtacatggagccgtctgcacgcaccagcgtctcggtgaatttggcgctgtaccgcagatcggggttctccttccaatcgtagaaaaattcagccgtgacgccgtatggttttacggcatccgtcagccattccgtggcgatgcggaggtgctcctgcgtctggtctatatcggcagcgtccgttgtctcgtcccaatgggtagcggcatcgtcggcaaaaatggataccaccagcgtccggccatggatgtaagcggcagagccgtgggccgagactgcctgatccggctcctccggggcctgcgaaggctcggtctcctgcgttggttctggggtctccggctgggtctgcacctccgccgtcggcagctggggcgcttccctccgggcgcaggccgccatcgtcgtacacagcagcatacacagaagcagccataggatccgtctcttcatgtctactcttctccttcgttgatcccgtctattttcccacatcccgctctgcttgtcaaccgacggaggattcctcttattttcctttgtttctcaggcagcttcaattgtgtctattctgtaaatatacaggacactattggcccgtcagcttgattttcatcactatgtctgttaaaataacagtagtttgacacgccgcaggagggtggcgatcgcaagaaaggggcggatggagaaatgcacggtttctggcgctgtgcgctgtatctggcggtgttgggggtggcggcccatccgctggggcaggccctgccccgcaaatggttctgcgccgaaaaggccccatggcgttccgccccttgggaaaagggcgggcgcatctacctgaagttgggtatccggaagtggaaggatcatctgccggatatgagccgcctgatgccggacatggtccgaaaggatttgggcagcgacccggcggtactggtgcaggagacctgcgtggccgagtgtgtccactgggcgctgacgctgctgtcggctggaatttttttcctgtggcgcagcggctgggcggcgctgctgtggctggtgtataatgtgctggggaacgtgagcttcattgtcatccagcgctataaccggccgagactgcaaaagcttgcggagaaaacaaggaggagacctgtatgaaagtgcttctgttctcctgttccacggggggaggacacaactctgccgctgcggcgctggctcaggagctggaggcccgcaatgtggagaaccgcacctatgacgccctgcaattcctgcccaagtccacggccgacctcatcagccacggccacgactttgcctatcgctatgcccccaaaatttacggcgcaggctatcgccgggaggagaagcacccctccagcctgttctatgagcagagcatccggggcatcggccccctgtatgaggagctgatcgatcaggcaccggacgccgtgatctgcgtccacctgttccccgccatgatgatgacggagctgcgctgcagctatggcgtccgcatccccacctacttcgtggccacggacttcacctgctctcccggtgtgggggatctgcaggtggacggactgtgcatcccccaccgggacctgatcccggagttcgtgaccgccggactgccgcaggagcggctcttccccaccggcatccccgttgggcagcagttcctgcatccggagagccgggaggaggcccgccgtgcgctggatcttccggtggatggccgcatcctcacgctggcctgcggcagcatgggcgccggacccctgcgtaccaccgctcagaaggtagcggagctcatggggccggaggatctgctggtcaccatctgcggcagcaaccaccggatgtatcagcagatgcagagcgatttcttccgccccgtggatcgggtgcgggtattgggctatacccacgagatgttccggtatatgtacgcctcggacctgctgctgaccaaggccgggggcctcaccaccgccgaagccgtggccgccggaacgccgctgctgtacctcaacgccgtccccggctgcgagagccacaacatcgacttcatgacccgccacggctgtgcgctggcggtcagcagcgacgaggagctccagcccatgctgcagggcatcctctccggggccatcgacccccggagcatggtggcccgtcgggcggacttccctaccgcatccgctgccgccgtctgcgatctggccctgcgccacgcaggtgcgtaaaatcacaacagaacgaaaccccgcaggcactgcctgcggggtcctttttggtttcaggagcgaggggccgcatccgtggaaccggagaggtgtgtatttggcgtgttttttccgcataccggccagcatcagccccacgatttggtgatgacgcagggcagcatggcagccagctgcgggggcaagacggggcggcccgtgccaaggctctgggcggcgatgccgatgaagccacgaccggagatcatgtcccgtgtgaaggcgttcaggcg

SEQ ID NO: 12380 - DNA, 78487 bp, Unknown
  gut microbiota DNA sequence
tagacataaacaaatcctccgcatggtctaagccatacggaggattaactgttttacggacacccgtctatgtgcggagacttttttgtttcagtgattctactgattcttctgatagatggcccacaggccgttcatcagaagatatttgtcataatacaccttgttgcggcaataccgtacgatcaccggcgcattactgccggtggccacaatggtgggctgctcacccggcaacatctccctgatgcggtcgataatgccgtccagcattcccgccgtgccgtagacgatgccggagcgcatacagtcctctgtatttttcccgatcaactgtttaggatgctgcaaagagatatccggaagctgggccgtgtggtcggacagcgcatccagactcagccgcacgccgggaaacatcaggccgccctcatagctgcgcttggcggagatataggagatggtggtggccgtccccatgtcgatcataatgataggcggagcgtacttctccagcgccgccacggcgttggccaccagatcggctcccagctgattgtgaacctccatgcggatattcagtcctgtcttgacaccggggcccaccaccatgggcggctcgcccagcagccgggtcagggctttggtcatcataaagttgataggcggcaccacgctggaaaagatggcaccggtgacgtccttcagatcatagcggtacagtgcaaacagattcatcaggtcgatgctgatctgatccgccgttttgcggctgtcggtgtcgatggaggagagaaacaggagtttccccgctttgtcaaacagccccacagatatgttggaatttccgatgtcgatcgccagcagcatggcaagtttcctccctgttcatcatcgttttttctattgtaacacgcacgagccgacttggcaacggtcggcggcgattttacaaaactcgccagccggagccccacgacttgacgagacatagaaaaatgtgttatatttctataagtatcacgcagcaaggaggcagacatgagcgaattcagcttgaaacagatccaggtattcgtggccgtggcggaattggggagctttacacaggcagcgcaggccctgttcctcagccagtccaccgtcagcgcacatctggcggcactggagacggctctgtccacccgcctgctggaccgtgacgcacgccgccgggtgcggctgacaccggagggcgagcgggtctatccggcagccaaaaaaatcttggcggactgcgctgcattggaggaggtcctccagaatcaggatggcgcaggccttcccctgctgctgggagcctccacggtaccggcgcagtatctgctgccggagctgctggctcagtatatgaagcagattacgggcgttcgctaccatctgcgccggggcgactcggcccagatccacaagctgctccacagcggctccgtgcggttgggcttcgtgggagctatgctggagccggattccatgacctacttccccatgctggaggatcatctggtgatgtgtaccgccaacaatcctcactatcaggctttgaagaagcagaatgtctatggccgtgatttgctgcgggagccgacggtagcccgtgaagagggctccggcacggaccgcaccgtgcagtcctatatgcggaatatgggccttgccgatcaggacctgcacatcgtggccagagtggatgacccggaggccatcaagcgtatgaccgcccaaggcgtaggcgtctcggtgctatcagccctttctgtggcgtctgaggtagatgacggccgcctgctgacctttcccatggatccgcaggggctgcaccgcagtatctatctggtctaccccagagagacgatcctctcccagtcggagcaggcctttgtccgcttctgccgccagatggccattcgccggaatctctgatccattcaaaagtcgaaaaagagctgttatcgaatcattcgataacagctcttttctataggaaccatttgttggacaaaaattgtattttatcgtatgatatatgaacaaaatgttaaaagagagaggagttttgtaatgaaaaaagagaattggctggtcatcattgccggcgttctggtgggcgtggcggctctggtgctgaccaagctgggcaaccccgctaacatgggcttttgcatcgcctgcttcgagcgtgatatcgccggtgccgtggggatgcacagtgccgctaaggtgcagtacgtccgccctgagatcatcggcctggtgctgggtgccttcatcatggctctggccggtaaggagttccgtccgcaggccggttcctcccctgccacccggttcgtgctgggtgccttcgttatgattggcgcactggtgtttctcggctgccccctgcggatggttctgcgtatgggtggcggcgacctgaatgctctggttggtctggccggcttcgtcatcggcattgtcatcggtatcctgttcctcaagcgtggcttcagcctcaagcgctcctatcccgccaagctggtggagggtaccacccttcccgcggtgatgttcgtgctgctggtactggtgctggcggtccccgccatcttccgcgccagcgaggcaggccccggctctatgcacgcccctgccatcgtctccctgctcattgctctggtggtgggcgctctggcacagaagtcccgcctgtgcatggtgggcggcatccgtgattccattctggtgaaggacaatcacctgctgtatggcttcatcgccatcttcctcaccgttctcatcggcaatctggttcagggcagcttcaagctgggcttcgacctgcagcccatcgcccatagcagccacctgtggaacctgctgggcatggttctggtgggctggggcagcgtgctgctgggtggctgccccctgcgtcagctgattctggctggctccggcaacggcgacagcgccgtcaccgtgttcggtatgattgtgggcgcagcctttgcccataacttcgcactggccggcaatcccgacagcaccaatgatgccggtgagctggtggtaggcggcatcgccaacgccggcaaggtggccgtggccatcggctttgtggtgttgctggccatctccctgctgaattcccggaaggaggcgactaaggcatgattgacgcccgtggacagctctgccccatgccggtgattatggtccagaaggccgccaaggagaaccccgccgagatccaggtcctggtggacgatccctgcgccgtggacaacatcacccgcttcgccggaaacaacggctaccaaatcacctccgccccgcagggcgaggactatctgctgattctccgcaaataaggataccataacgaagagaggcaaggccatcggccttgcctctcttcgttatggatgcgtcccctcacagaatgatgcagatcagaccgccgcttccctcgttgaggatgcgttccagcgcctcccgcagctttttctgagaatcctccggcatccgctttagcttcgcctgcaaatcctcccccacgatctcgtggaagctgcggccaaagatgttggactcccacagcttccccggctccccctcgaactcctgtaggagatagtttaccatgtcctgcgactgcttctcgttccccacaatgggggacaccgtggtgctcacatccgcccgcagcatatggatagacggagcactggcccgcatccgcacgccgtaccgtcccccctgccgcacgatctccgggtcctccagctccaactcctccaccgacggcatcaccacgccatagccggtggatcgggcgctggtcaccgcctgcctcacccggtcatactcctttcgtaggctcgccaacgtcaccagttgctccatcagatcgccgtcgtcggtgatgctcagccccgtctgctggttcaccgtatcgtagaacaggcttcggggcagctgcacctccacctgccccacgccggtccccagatccatctgtcgcagtgttgcggatcggatctgctccgactgctccagcgccgccatgcagccctccagctgccggacgtgctccaatcgtttggcctcctgccccaccgcatgataaaggcccgctgggatgggatgctccggcggcagagcctccacccattccgggaaaaacagctgcaattcctgcaccgggaactcatacagtagactccgcaaaatctcctgcaggtccccttctcccagctccagacagttcaccgcaagacaccgcacaccgtatttctgctgcaattcctccgccagcggacgggcttcctccggatgcagggagttcaccagcaccacaaagggcttccccagctcctgcagttcccggatgacccgctcctccgcctccagatagtcgctgcggggaatgtccgtgacgctgccgtcggtggtgaccacgatgcccacggtggagtggtcgcagatgaccttccgggtccccagctccgccgcctccgtcatggggatctcatggtcataccacggggtcatgaccatccggggcgccagatcctcgaactgccccacggcaccgggaaccatgtaccccacgcagtcgatgagccgcacggagaaggaggtgccgtccggcagacgcacctctgcggcctcctccggtacgaactttggctcggcggtcataatggtgcggccggagccgctctggggcaactcgtctctggcccgctcccgtcggtagtcgttttcaatattgggcagcacctgcgtctccataaaccgtttgatgaaggtggattttcctgtgcggaccggccccaccacgccgatatagatgctgctgccggtacgggatgccatatcctgatacatggatgtggaacgattcatatgcttctcctccgaatcctatcagcttttgctcccagcatatgcggcgggacggcccattagaagggatatggtttaagaagatgtaaatttttctgtcttttatccaacaaaatgttgattattcagggacgaatatggtagaataaagttaatttattctacagcatacggaggtgttgactatgcatggcacgaccattgacagacgggtaaaaaagaccaagaagcagctgcggctggcgctgatgcatctgatgacccagaagagtgccaagagcatctcggtccgggagctggcggagcaggcggatatcaaccgcagcaccttctatatccactataaggacgtcaacgacctgctgctgcatctggaggatgagatggcggagcgtctgtcagagctctgtcggcggcacgatcccaaggactccatgaccggcggctaccccttcctgacggacctctacgccttcattcaggagaacgctgatctgtgcaaggtgctgctggggggctacggtgaccgggcctatacagagcgcatttgccgcatcctacgggatgacttcatcgaggcgtatctgtccctgctatgtcccggcgaccgggagaagatccactacttctgcgccttcatcgtgccgggaaatctgatgctggccctgcgctggcttcaggacggcaccagggaatccccggaggaaatagcccgcttcgccgggcagttcatcaacagcggtgtgcagtcctttgccggaagatgatcgaaatgaaacgggcatcccgtaataacaaaaaaatggctcctgacagcttgtcaggagccatttttatatgtctcttctttgccgctttaccgcaccaaccgctgccccagcagcaccaccgtcacgcccaacagcaggctcagcgccgtatacagcatcgcaaggccggtctttccgctttgcagcagacctgccgtctccacggaaaaggtagagaaggtggtgaagccgccgcacacccccacccgaaggaacagaagcatctgcgggttcagcttggcatacttccccgccagcgccccgattaggcccagcgcaaaggcacctgcgatattgatgcacagggtaatagccggaaagccgctgaccggtttcaggggcagcagccccagcagatagcggcagatggagccggctgcgccgcccaaaccaacgaatacgcagttcagcagcatagccttagcccttcaggctctcctccaccgccacggccacagccacggtagcaccgaccatggggttgttgcccatgcccaaaaagcccatcatttccacatgagcggggacggagctggaaccggcaaactgggcatcggagtgcatccggcccatggtatcggtcatgccgtagctggcgggaccggcgcccatgttgtccgggtgcagggtacggccggtgccgccgccggaggccacggagaagtacttcttcccctgctcgatgcactccttcttataggtaccggccacaggatgctggaaccgggtggggttggtggagttgccggtgatggacacatctacaccctcgtggtgcataatggccacgccctcccggacatcatcggcaccgtagcagcggacgtcagcccgctcaccctcggagtaacgaatctcccggacgatgctcagcttgccagtatagtagtcaaactgcgtctgaacataggtaaatccgttgatgcggctgatgatctgggcagcgtccttaccgagaccgttgaggatcacccgcaggggctccttacgggccttgttggcgttcttcacgataccgatagcgccctcggcagcagcgaaggactcgtggcccgccagaaaggcaaagcacttgctctcatcgctgaggagcatggcccccagattgccgtgacccagacccaccttccggtcctcggccacggagccgtcgatgcagaaggactgcaggcccacaccgatcatcttggcggcctcggcagcggtcttgacgccggacttcagggcgatagctgcgcccacggtatacgcccagcaggcgttttcaaagcagatgggctggatgcccttgacgatctcataggggtcgaagcccttggccttgcagatctcccggcactcctccacggagccaatgccatactgagcgaggacgccattgatcttgtcgattcttctttcgtagctttcaaacagtgccattttttgtcctcctcttattcctgccgggggtcaatgtacttggcggcgttctcgaactggccgtagtgacccttggccttctccagcgccgcagcggcgtcgtcgcccttcttgatgaagtccatcatcttacccagactgatgaactcatagcccacgatctcgtcgtccttgttcagcgccagccgggtgacatagccctcggccatctccagatagcggggtcccttgaccttagtagcgaacatggtacccacctgagagcgcagtcccttccccagatcctccagagaagcgcccacggataggccgccctcagagaaggcagactgagaccggccatatacgatctgctcgaacagctgacgcatggcggtgttgatggcgtcgcacaccagatctgtgttcagcgcctccagaatggtcttgccgatgaggatctcggaggccatagcggcagaatgggtcataccggagcagccgatggtctccaccagtgcctcctcgatgatgccgtttttgatgttcagggtcagcttgcaggcgccctgctgaggggcgcaccagccgacaccgtgggtaaagccggagatatcggagatttccttggcctgcacccacctcccctcctcagggatgggagccgggccgtggtaagcgcccttggccaccggacacatatgctgtacttccgcagtatagatcatggtaacgattcctttctgtgctgaattttttaccattgtggatgggtttatcctttggggctattatagcaaacgccgggagagatttcaagaagttctaagcaaatattccgaacattccgtgcatttttgcgccaacgcagggagtctatccctctcacagcttggtcagatgggtcccagcggccttgagcatcagttttttggtgccgatcttgtcaaaggccacttccaccagcgcatcgccgcccatgggccggacgctgagtaccataccgtctccgaaggcattgtggcgaacgctgtcgccggcccgcagctgcatcaggggcgcagagggtgctgcggagcgagcccgcaccgacggagcggacggagccgttgtagatcggaccggctcctcccgacgggtacgtacctgagacgcagcggcaggacgctgccactccccctcccagtgggacgccgcctgctggggttcgggcttccccagccactccatattctcctccgggatctccttgagaaagcgggagggcatagcggggctggtacggccgtacagggtgcgctgccgggtattggtgagggtcagcttctccttggcacgggtcatggccacgtagcacagtcgccgctcctcctccatctcctcctcatcccccatggcccggttgccggggaacaggccgtcctccatgcccaccacgaacacgcatggaaactccagccccttggcgctgtgcatggtcatgagggtgacgcagttgtcggagtccgcctgactgtccagatccgtatatagagccacctcgtccaaaaagcccgccagagtggggttctccggctcgttctccagaaagcccatgatgctggaggccaactcctgtacgttctccagccggccccggctctccatatcgtccttttcctgcagcatccgcacatagccggtgcggtcacacacatattcgtagaactccaccagccccagatcggccacatggcggcgcatttcctccatcatatctgtaaatgtaagaagctttacagcgcttgctttcagttctggatagtcggatgcgtggcagaggatctcatagaggggcctcccctcctccgtagcgatcacctgcgccttatccaccgtggcggtgccgatcttgcgggagggtacgttgatgatgcgccgcagccgcagatcatcggtggggttgttgatgacgcacagataggccagcatatccttgacctcggcccggtcgaagaacttcatgccgccgatgatcttatagggtacgccgttgcgcttaaaggcatactccatggcgttggactgggcgttggttcggtagagcacggcgtgttccttccagttgacgccccgacggtagttcatcataatctgccccactacatagttggcctcgtcggactcattgaagcaggtcttgacggtgatgatttccccttttccgttctccgtccacagagtcttgcccttgcggccggtgttgtggcggatgacggcgttggccccgtccagaatgttctgtgtagagcggtaattctgctccagacggatggtacgggcgccggtatactgcttttcaaaattcaggatgttctcgatgttggccccccggaagcggtagatgctctgatcgtcgtcgcctaccacgcagatgttgcggtgtccccctgccagcagactggccagcagatactgcaaatggttggtgtcctgatactcgtcgatgaggacgtagcggaacttgcgctggtagtaggccagcgtctccctgtccgtccgcagcagatccaccgtgtggaggatgatatcgtcgaagtccagcgcattggcgtcccgtagcttccgattgtaaagcgcatatactttaccgatgcgcttgcgccgccaatcctgagatttttctgcctgagcggcaaactcctccggcaggatcatatcatccttggagcgggagatgatggtctggatctcacggacgggaaaggtcttttcatccaactccaattccttgagaatgtccttcaggagccgtttggtgtcatcggtatcgtagatggtaaagctgcggtcaaagcccagcttgtcgatgtccctccgcagaatccgcacgcaggcggagtgaaaggtggcggcccacacatcacgggactcctcccccagcatccgctccagacgatccttcagctcattggcagccttgttggtgaaggtgatggccagtacctcccacgggcgggcgggctccacggcacacagataatccgccaagggcttctgctccgggtccgggtgccggacatactgctccagaaactccacctcatcgtcggagatgggcatggggatctcctccgtgtcgctgccccggccatagcgcagaaggttggccacccggttgataagcaccgtggtcttgccgctgccggctccggccagcagaagaagcggcccctccgtggagagcaccgcctcccgctgcttgtcgttgagatgctgatagttcagggcgatggcctgccgccttgcccgaataaaacgctgctgcaattcattcatgtacttttatcccctgcttgttgttttctcctattttaatacaaaatccggggccggtcaacctctctgcagaaatatagaaattttgttctatttcctattgacagaaacggatgttcgacttataatgcgtatagaacaaaagtttcacaggaggtatggactatgacgacctttggatttattatgatggtggtgggcgtggccttcttctccggcagcgccattcatgtcatcgaccggctggatcgcccccagcagcgccgccgcacggtgtaacggcatggagctgctggataagctggccatcctgacggacgccgccaaatacgatgcagcctgcacctccagcggcgtcaggcgcagcgcccggccggggatgatcggcaacaccacctcctctatcgccggctgctgccacagcttctccgccgacgggcgatgcatcaccctgctgaaggtgttgatgaccaacagctgcgtgttcgactgcaagtactgcgtcaaccggcgcagcaacgatacccgccgggcggccttcacaccacgggagctggcggagctgaccatcggcttttaccgccgcaactatatcgaggggctgttcctctcctccggcgtgctgcgaagcccggattacaccaccgaacggatgatcgagtgcctgcggatcctgcgagaggagtatcgcttcaacgggtatatccatgccaaagccatccccggcacatcgccggagctggtgcagcggctggggctgctggcagaccggctcagcgttaacatcgagctgccctctcagaagggcttgcaaacgctggctccggataaaagcaaacaggccattctgcggcccatggcacagattcgggaccgggccagagagagcaaggcagagctggtgaagtcccgccacgccccggtgtttgccccggccggacagagcacccaactcattgtgggcgccacggcggacaatgatcgccatatcctgcacctgacccagtctttgtacgagaagtaccgtctcaaacgagtgttctattccgcctatgtgccggtagtcgagaacagtctgctgccctccaaggatacgaagccccctctgctgcgggagcaccgcctgtatcaggcggactggctgctgcggttttacggcttccgggccgaggagctgttggacgagcagcacccggacttcaatccgctggtggaccccaagtgccactgggccatcggacatctggaacagtttccgctggagatcatgaacgccgaatacgagacgctgctacgggtgccgggcatcggtccgataagcgcacggcgtatcgtctcggcccgccgccatggtacgctgcggttcgaggacctgaaaaaactgggggtggtgctgaagagggcgcagttctttatcacctgcggcggccggatgcggcagggcctgcaatttaccgcccagacccttcagcggcaattagaggcgatggagcgagggcagctgccgccggaagagtgccggcagctgtcgctgtttgactcggcggggtgatacgatggcatggcaggatgtggtctttcaatacgacggcagcttcgacggattcctttgctgcgtgtttgaaagctatgtacacaaagaattccccatcgccttttacagcgatgaggagtgcttttccctgtattccgtccgcagcatcctgacggtgccggagcacgcccgacgggtgtaccggggcatcttcaaacgctccaagcgtgccgcagagctgctgcaccgtgcctttctcacctgcatggaggataaagagttgcacctttacacctttgtccgcaagctgatggacgaaggaccggatttcctgagaaaccagtcggatgcggcctactaccccgcggccaaggctctgcggcacatgagcggcgagttagagaagctgcgtggcttcatccgtttttccgagtacagtggcgtgctgggagcggaaatcgagccaaaaaatcgagtcctccccctgctgcgaaaccacttctgcgatcgctatgccaacgaatccttttttatctacgacagtacacacaaggacctactgctatacagcagcggccgatcccgaatgatgcgggtagacagcctgcagttggccctgcctggtgaggaggagctttgcttccgagccctatggaagcggttttatgagacggtggccatcagggaacgggagaatccccgctgccagaataccttcctgcccaagcgatatcgagggacgatgacggagtttcttccgctggactatgagaggcagcagcaaaatctcccctcctcccataatgtagcaaacggcgcaattatcagaatgattgattcaattgaattgccgcctaccaccagtttaccggaacactctatatagtttccgaacaggtcgtgaggaaggtaatctccttcaaatggataatttacaggatactcgctctcttttgacgtgggtacatattttgttgagattcgcccttacccttcgctgtcagcagacataacagaatatctggcaattcttagcgtgtcaaggatggtgcttatcccccgaaagcaggtcgccgaaaaccaggaatttctattagtcactgtaaagtattactatcttacatccgttacaaaaaaaggaagagggcatatgccctcttcctttttctcgcatcacttcatcagctttccctgtaccagcagctggagagcctgcgccacgttctgtaccggcagaagctccagatgcggcagttctttcatctctttgacccggtgctccgggacgatgcactgcgtgaaacccagccgctgcacctcagagagtcgctgctccatgtgattgatagaccgtatttccccggacagtcccacctctccgatggcggccatatggctggggacgggcttgtccagatagctggaggcgatggccaccacagcggctagatccgccgccggttcctccagcgtcaaaccaccgatgatattcaggtatgcatcacactgggagaccttcagattcccccgcttctccagcaccgccagcagcatcgcaaagcggttgtagtcaaagccgttgctcatgcgccggggattggcggcactggccggagcgatgagagcctgcacctccgccaaaaccgggcgggctccctccatagcgcaggtgacgcaggtccccggtgcatccttgggacgacccgacagcagcatttcggagggattctccacctccttcaggccccagtccatcatttcaaagacgccgatctcgttggtggcgccgaaacggttcttggctgcccgcaggatgcggtaggtcatgtgctgatcgccctcgaagtacagcacgcagtccaccatgtgctccaacaccttgggacctgcgatagagccctccttgttgacgtggccgatgacaaataccgtaatgccctgtccctttgccagttgcatcagggccatggtacagtccttcacctgccccacgccgccggcgggagaatccatctcttcattatacagtgtctggatggagtccacgatgagtacatccggtttttcctcccggacacattccgtgacattccctaaacacgtctccgacaaaacatacagattttcgctctccacccggagccgctgcgcccgcagcttcagctggtgggtggattcctcgccggaaacgtacagcaccttggagaactctcccaattttttacagatctggagcatcagtgtagatttgccaatacccggcgcaccgcccaccaagaccagtgatcccttgacggcgccgccccccaaaacccggtccagctcccccatacccgtcaggaagcggatctcgtcagaggtgcccagttctgtgatgcgttctgcctttacagttgtggaaaaaacagactttcttccgctttttaccggcttatccgtctgctccacaatggtattccatgcaccacaggcgggacagcgtcccgaccacttgggcgtctcattgccgcactccgtgcagaaaaaaacagtcttcgctttcatggatatccccttattctttgtcaatgattcccaaaattcaagtatccggccacaatggccgccaccagacgcttctgctgctccggctgtcggagcagctgcgcctcgtgggagttagacaggaagccgcactccaccagcacccccggacacgtgatgtgcttcatgaggtacaccgagttccctatggccttggcggtcttttcgtttccggtatttactgtcagattcagcgcctgctggatggattgcgccagcccggcggcaggctcctgtggattactgaagacctgcgccccgtggacggtggggtgctggggcatactgttctgatggatgctgagcagcaccgcatggggcagggcgttgatcagcgccacacggttcttcaggtccgacaccttcttctcccgcagggtctgggcctccggagaatagatggcctcctcccctgttcgggtcaatcggacactgcggcccagaaacaccaacagcccctccgcctttcggacgatctgcaggttgatgccgctctccggcacgccatccggggacacggcgccgccgtcctccccgccgtgtccggcatccagcacgatgaccgtccccggtgaggatatctctccgccgaccgcagtgggccgggtttgccgtccggtcagcagaagtgtcagcagcagggtcgccagcgctaccagaatgctccacaggagccgcctgtgccgcagccacagtaccatggccctcaccccctccggcacactctatgcgccgccggggtgctctatgctgggattataccatacccatgccgaggatgcaaaccccagcgccttgcaaaatccccgcagcatggtataatagctgcagagcggcggcgacgccgtgccattttgcgaggtgagaccatgcccatcgactaccggcaggaggccccccagctgctgctggactttctgtcctaccatgagaccattaaagcccactcccagcggactgtggacgagtattttctggatctgcggaattttttccgctacctgaagcagacccgtgacccggcactgcgagatgttcccatggaccaaatcagcatccgggatgtggatcgggacctcatcgcctcggtaacgctgacggatatctacggctatatgacctacctcagtcgggatcgggtgctgcaccagaatagccagcgctctgaaaagggactcaacgccgcctcccgtgccagaaagctggccaccattcgctccttttacggctatctctgcaacaaggtccatgtgctggaggagaatcccgtgaaggatatggactcgcccaagctgaaaaagaccctgccccgctatctgacactggaggagagcatggcccttttagacagcgtagacggccctaatcgggagcgggattactgtattttaacgctgtttctcaactgcggtctgcggatctccgagctgatcggcctgaaccgcagtgacattcaaggagaggccctccacgtgctgggcaagggcaacaaggtccgcatcgtctacctcaatgaggcgtgtcaggtggctctggagcagtatctggcggtgcggcgacccatcaccggcagggacgaggacgccctgtttctctcccagcagaaccgacgcatcagccgctccatggtccatgcgctggtgaagcggcatctgctggaggcggggctggacagcacccactactcctcccacaagctgcgccacacggcagcgaccctgatgctgcaaaacggcgtggatgtcaaggccgtgcaggaggtgctgggccatgagcacctgaacaccaccgaaatctacacccacatcgacaacgaggccctacgggtggcggcccgtgccaatcccctgtcacgggtaaagcccaagggcaagatagacgagtgatccgccggatttttcccgcagattcattgactttaccgtccaaatgctatatgctaaaagaaatatgatgagatggaggttacccatgaatacggcagaactttcctgcatttgcaaacaggtgcgccgggacatcatcaacatgacggccaacgccggcagcggccaccccggcggctccctgtccgccacagagctgatgaccaccctgttcttccgacagatgcgtatcgaccccaaaaatcccaaggaccccaaccgtgatcgcttcgttctcagcaagggccattccgccccctgctattatgcggtgctggcggagcgtggcttcatcagccgggacgagttcaccaacttccgccagctccacagtatcctgcaggggcatcccgattgtaaaaaggttccgggcgtggacgcctccaccggctctctgggacagggctgctccatcgctgttggtatggcactgggtgccaagcatcagggacaggacgtgaaggtctacacgctgctgggcgacggcgagtgtcaggagggacagatctgggaggcattcatgtccgctgcccactataagctggacaacctgacggtcattatcgacaacaacgggctgcagatcgacgggcgcaacgacgaggtcatgtctctgggcgatctgcccgccaagctgcgggccttcggcttcgatctccacgagatcgatggtcacgatctggatgccattgccgcagcgctggacgctcccacggcctccggcaagcccaagtgcatcctggcccacaccgtgaaaggtaagggcgtttcctttatggaggatcaggtgggctggcacggcaaggctcccaacgaggagcagcgccagcaggctttgaaggaattggaggactgagagcatgagtgaaaaaatcgccacccgtgaagcctacggcaaggcgctggtagagttgggcgcttccaacgataagatcgtggtgctggatgccgatttggccggggctaccatgaccaaatttttcaaggcggcctatcccgatcgcttctttgactgcggcattgccgagtgcaacatgatggatgtggcggcaggcctgtccaccatggggctcattcccttctgctccacctttgctatgttcggtgcaggccgggcctatgagcagatccgcaactccatcgcctacccccgtttcaatgtgaagatctgctgctcccacgccggcgtgtccgtgggcgaggacggcggcagccaccagtccatcgaggatatcggccttatgcggatgatccccggcatgactgtcatcgtccctgccgacggcaacgaggcccgaaaggccaccttcgctctggctcaaatggagggtcccgcctatctgcggaccgcccggctggcctcccctgttttcgagcaggactatcccttcgagatcggcaaggccaacgtcctccgggagggtaaggatgctgcggtgttcgcctgtggcctgatggtcagtgagacgctggaggcggcgaagctgctggccgcagagggcattcatatctctgtcatcaacgttcacaccatcaaacccatcgacgccgcctgcgtcacgaagtacgcacagaagtgcggcaacgtggtgacggtggaggagcacagcgtcatcggcggtctgggcgatgccgtggcggacgtcctcatgggcaaggtgaactgtaaattccgcaagatcggcatcaacgactgcttcggccagtccggcaaggccaaggatgtgctgcgggagtacggcctcaccgccgaccagatcgcagccaagatcaaggagactctgtaaagcacatccggatatacgaaggcatcccccggtaaacgccgggggatgccttttagcgtaaaacaggtgcatcaaagcaggacagcatgaagctccctgctctttatcaccgttttactacttcaggtcatacttccacgcactgccttcctgatagtagaagaactcgctcaaagcttcttctgtgaaaacccgaagcatatcacgcatatccaaagacagcttaagcttgggcagatcggcaatatcctccaaccagaccctgccttcggggctggagcgcagttcgccatcaaaacaagttgccttataaagcagcacaacaaacctgcactgattctcacaccagtccttgatgccgcagagctgaggagaacggatagtcagtccggtttcctcctgcacctcccgaatcacagcatccgtaaaggattctcccgctctacatgacctccagggaaggtgacgcccggccagtcccgcttttcccgctccatcacgacgacccggctgccatcacagatcatgcacatattggtaaattcaaccgtttcgattctctccattatgttccttttctgttcgtgtgtatacgcagtgtagcatagcaatcatttagctttcaataggcgtgacggaagttatctccccaaatgtaacctttctgcgaatacaaatggatctcagccttttccggtgtggaacacacaaaatgtgaaatgcacaaaagcaggcggcaccaaactgaagttgagcgccgcctgctttttcatgtaagggccgttttcttgcaggactctttcttagtcctgctgccagttgtgccacacgttctgcacgtcctcgttgtcctccagcatatcgatgagcttgttcatgttcttcacgtcatcctcgccggtcatggtcacataggtctgcggcaccatctccagctcagcgctgacgaaggtgtagcccttggcctccagcgccttcaccacatcgttgaagctgtcggggtcggtggtaatctcgaacacggggccgtcgggagagaagtcctcggcgccggcatccagcgcatccatcatgacggcatcctcatccagctcgccatcctcattgtcgatgacaatgacacccttgcggtcgaaggaccaggatacgcagccctgagcgcccatgcccttgccgaacttatcgaagtaatggcggatctccggggcggtgcgctgacgattatcggtcagggcctccacgatcacggccacaccgcaggggccgtagccctcataggtgacggactcgtagttatcggtgtttccggcgcccagtgccttgtcgatggtacgtttgatgttgtcgttgggcatattggcggccttggccttggccaccaccgtagccagacgggagttgttggcgggatcgccgctgccgccctgcttgacggccacgatgatctccttggcgatcttggtgaaggtggcggagcgcttggcgtcagccgcacccttggtcttttggatattgtgccacttggaatgtccggacatagtatcgttctctccttatctcatgtaaaatttaactgcgtcgccatgtacggcggactttgtgacctccagctccgggaacgtctcccgcagccggcggacgatctcctgacacaccacatcctccgtggggaagtgtcctgcatcgatgagattcagcccctgcgtatccagaaagtcattgtaccgcaggtcggatgtcacaaaggtgtcgcagccctgagcgatggcctgagggatgtattccccacacgctccgccgcccacggccaccctgtgaacgggccggccgccgtctctgtatcgcagtccattgcaacttaataattttaccacatctgataggaactgttcaaggggtttttcacaagaaagtgtgccgatccgcccgattttttcctcattcagcggttttgtatcctgcagacccagcgtgcaggccagacagtcgttgacaccgccctccgccgcatccagattggtgtgcatacacacggcggagatatcccgcttcaccaactccgtcagcagcccgcccagccgggtatcctcccggagcgtctgcatctgctgggcgtgccagcggatgttcatcaccgggtggtgggacacgatcaggtcggcccctgtctctgctgcctctgccgctacgtccggagacacatccagcgccaccagcacccggcggacctcccggtcgccccggcccaccagcagacccacgttgtcccactccatggccagctccggaggagcccaccggaacatcatctgtgttacatcattgaccgttaccacgctgccacgcctccttcttttcttccagaatatccgccagagccgccagcggctccgcctcgctctcgtccccgccccggtgcaggccgtccatccgcagataaagccgccgcagctgctgctccagatacaggccatacagagggtcatgctccagacagaagccgccgtaccgctccgcatccgaggcctcaccggaggaaccaccggtgacggacaggatcacatacagttttcccttgtcctgcaccagacgctcctcggtgcagctgtatccgttttcccgcagccagccccgcagcagctccaccttggtcatgggctgtagcagcagggtgtggtggccgtccgccgcccatggagcggcacggaggatatcccggatggtctcgccgcccataccggcaatgaccacggtgtctgtctcctccggctcgatgccggacaggccgtcacagagccggaagtccagcccctgtgtctcgtattcctccgccgtgcggcgggcgtgttccagcggctctgctcccacatcggcggcgatggcggaggggatacgcccttcctgcagcagccagactggcaaatagccgtggtcggtgccgatatccgccagacggccgccgggcggcgtcatctccgccagcaggcgcaatctgtgctgcaatgcgattcgtttcatgatgcctccctccagacagaaaggaacgcatacggcaccatgaccgtatgcgttcgctgcgttttactcagcggccttgttggcctcctgattcaccagctccagcagcttgtccacgtccacaccgtgaacggcgcaggcctcctccacagtctcgccacgggaagaggggcaacccaggcagtgcataccgatggagaagaagatgggagcggtctgaggggcaacatccagaatatcaccgatgatggtgtcctttttgatttcgatcatgtgtcaaaacctccgtttgatatttacatcgttagtatatcccatgtttccgtctttttcaacaggaaaatcatgaacagcctgtgaaaatcacagaaaatgcagagtccgtatcgggctgggcatataaaatgcgggagccgccgcataggcaactcccgcatcatatgtcagtctggctgatcagccgttctcacgcatcttagcgaagcaatcgctgcaatacacgggacggtcggtcttgggttcgaagggaaccttcgcctcgccgccgcaggctgcgcaggtagcggtgaagtactcacgggggccacgggcggcgttcttgcgagcgtcacggcaggccttgcagcgctgaggctcgttctggaaaccacgctcagcgtagaactcctgctcaccggcggtgaaaacgaactccttaccgcactccttgcaaaccaaagtcttgtcttcgtacatgatgttaccctctctttgagaaaaatatattgcgttcagcgcttgctgatatcgcctgatgaaagttgccgagccaccttgcgccggatgcgctgcacggcgttgtccaccgacttgggggaccggccgacggccgcagcgatctcacggcaggtaagaccgtccagataaaaccctaaaatcatgacctcgaattcggacagctgcttgcggacattctccagcaggctgacagccttctccctgtcgatcagcagatcctcgggaccgggctgtgcaaaggaaacgtttgcttcaaagagtgagggattcaagggaaccgattgattcaatggggcgtgcttccccgccgccgcagccttcacaacggaatagagccggtggcggatacacgtttcggcaaaggttcggaaggaggcatcccggtccgggtcatactcccgcatggccttgatgagaccgaacatcccctcctgcatcaggtcctcgctgtctccgcccgccagaaaatagggccgggcgcaggaacgaaccacccgatggtaacgggcggccagaacctcctccgccggacggtcctgctccctgataaggcggcacaacgcctcgtccggcagctgttccagaggggcgccgccggattcctgatcctttgtcatagtctattataccttttcactaaagaatttgtcaagtcatccacgtcgatttgtcaaaactgtattttttcagacagaatttttatgagatcagctaaatctttcgccacttttcgggcaacttcggtggttttcgcctccaccatgacccgaatcagggcctccgtaccggagggacggatcagaacacgtccctttccggccaactcctgctccatctgagcgatagcgtgccggagggcgggatcctgcatgatcgcatccttgacgccgggaacgtgggatacggccacattgataagctcctgtggatactgggggcagcaggatgccagttcggaggcctgctttccggagcgccgcagggcctgcaggaattgcagggccgtcagttcaccgtcgccggtggtggcgtattcccggaagatcgtgtggcccgactgctcaccgccgatggcgtagccgcactccagcatcttctccagcacatggcggtcgcctacggcggtgcataccagctcgataccctccttgcggcagtactcgtgcaggccgagattggacatcaccgtggccacgatggcgttgccggatagctttccatgacgccgcagatcggcaccgcagacggccatcaccttgtcgccgtcaatggtatggcccgtttcgtccaccagtaggcagcggtcggcgtcgccgtcgaaggcgatgcccaagtcgtagccgccggccaccacgccctcggacagggatttcaggtgggtggagccgcagccgtcgttgatgttcacgccgtccggctctcggtggatgaaatctgcgtgcaggggcaggccgtcaaacagatccggcgctgtggcagaggccgcgccgttggcgcagtccaccagcacccgcaggccagacaggtcgcagtcgatgctggaaatcagatggtcgatgtaatcccgcttcatctgccgcatcccgtgaaggcgcttgccgatctcgccgtgggtcttgatgtccatgggagcgccgctgaggatcagctcctccacacgggcctcactctcgtcggaaagcttatagccccgagcgttgaacaccttgatgccgttgtgctcataggggttgtgggatgccgagatgacgatgcccgcatccgcctgctccagtaccgtcagatacgccactgccggggttgggatggtaccgagtggcatcacgtcaccgcccacagagcagatgcccgccatcagcgccgcctccagcatatccgaggagatacgggtgtccttgccgatggtaatggtgggcttacttcccttctcctccgtcaggacggcagccactgcctgccccacatgaaaagccagttctacggtgagattttcaccaacgataccacggatgccgtccgtgccaaacagtttacccataagaggttcctcctactccttatatctccagctgttcctgtcctaaaaacgctatgtgcaggtgctcatatgccttccgggtgacgcagcggccacggggtgtccgggtcaggaagcccaactgcatgaggtacggctcatacacatcctccagcgtcacggactcctcgccgatggtagcggccagcgtttccagccccaccgggccgccgccgtagttttcgatgatggcccgcagcatccgccggtccactggatccagccccagatagtcgatctccagcgcctgcagggcgtgatccgctacggccttggtaataacaccgtccgcccgcacctgagcaaagtcccgcacccgccgcagcatccggttggcgatacggggcgttccacgggagcgccgtgcgatctccatggcgccctccggttgaatggggacattcagtattccggcgctgcgggtgacgatcagggccagctcttccggggtatagagctccagccgcagcgtcacgccgaaccgatcccgcagcggagcggacagctgtccggcccgtgtggtggcgccgatgagggtgaacttgggcagatccagccgaatggagttggcggaagggcccttgccgatgatgatgtcgatggcatagtcctccatggcggggtacaaaatctcctccacggagcggttcagccggtggatctcgtccacaaagagaatgtcgttttcgctgagattcgtcagcagggccgccagatcaccgggcttttcaatggccgggccggaggtgatgcggatgttgacccccatctcggcggcgatgatgcccgccagcgtggtcttgccaagacccggagggccgtggagcagcacatgatccagcggctccgtccgccgccgggccgcctcgataaagacggagagattctccttggccttggtctggccgatgtactccgccagtgtatgggggcgcaggctcacctccgcattgtcctccggcagcagcgtcttggctaccagcggctcctcgtagatatcggtgccgaaatcaatgctcatacgtctccccccttctcctgcttttcatgtcactttaccattttcttcagtgcctgccggatgatctcctccagcggcagagcgtccatatcgatgcccttcagggccgtactgatctcctgagagccgtagcccagcactgccagcgccgccgccgcctcaccggacttgctgccgcccaagggcatgggggcgctgccgccgccgctcggtaccgtgaagctgctctgttccttggccagcttatccttcagctccagaatgatgcgctgagcaatcttcttgccgataccctgagccgccgtcagcgccttctcgtcctccgtcacgatggacagggccagattctggggtgtggtggccgacagaatggccagcgccgccttagggccaacaccggacacgccgatgagcatcttgaagctgttgagctcctgctgactggcaaagccatacagctcgaagatatcctcccgcacatggaggtaggtgtagagcctggccctctccccctttttcagctgagacagggtatagtttgtggtggcgcaggcatagcccacgccgccgcagtcgatgacggccagaccggcagcgatctccgccacggtgccgttgagatagtaaaacatattcagaccgtctcctttacatcggggtcctttcgccgcagcagggacgtggcgctgcgggcgtggcagatggcgatggccagcgcatcggcggcgtcatcgggccgagggacagccttcagcttcagcagccgccgggtcatatccatgacctgccgcttctccgccaggccgtagcctaccaccgcctgcttgatctgcatgggggtatattcgtataccggcaagtgcattttctccgccgtgtacagcaataccccccgcccgtgggccacggcaataccggtggtgatgttcttgctgaaaaacagctcctcgatggacatctcatctggctggaattgccggatcagctgctccagatcgcctccgatttgcaccagccgggctgccagcggcatacccgccggggtggtaatggctccgtaccggaccatccgctgccgcccgccctcggaatcgatgacgccgaagcccacggtggccactcccggatcaatgcccaaaatacgcatagccgctccttcccgttcacccgcagaggatataaaatcagtttattatagcaaattcccagcgaaaaggcaacagggaaaaacatttctcccgcaggcgggcgctgcctgagtgcagaggaagccgccccggagggcggcttcctctgtgaaataataatactttacagttatttgttcacagcgctcacagagcacgcaagtactccggtcgcaggccgtagccctccaggcccttccgcactcgctccagcatggcgtcccggtcctgattcagcgtccccttcagcgtcaggtagttggaggcgtggttcatccggaaaacgctgccctcgctgtcgatgtgctggagcagcagctccgtctcccgcaggatatcctccgggcccagaacggtaaagctgccctcacgcacccatttctccagcggcgtacccggctccaccatcaacgtcagcagaccgatgtactccggcttcatggcgctgaatgcctccgccgtaccgatggcgtgttcccgcatcagctcccggctcccaagtcctgagatggccgttaccgacagggccagtccgcagcgccgggccttctgccccgccgccacgatggctgccgccgtgtggcccttgttcatccggcgcagcacctcatcacagccggactccagccccatatacaccatggtcaggccctgagaccgcagcaggcgcaagtcctcctcgcttttgatctggagactggtgggcgaggcgtagcacgtcacccgctggcactccgggaacagaccgtagatcaggcccaggatctggctcagttcctccgttttccgcatcagggcgtcgccgtccgccagaaagacccgctctacctttttataggcccggcgggccatctcgaagtcctcccggacctcctccatgggtcggatggcgaagtgcttgtcgtcgtacatatcgcaaaaggcgcagccgttgtggctgcatccgtaggtcacctgcacgatgaggctgtaagcctcactgggcggacggtatacctttcccttataacgcatggtctcacgctcctttggtcgtttgctccattgtagcagatttctttccgtttgaaaagcacatattctccgtaggcggtacatatagtgtgctgacttcaaccaacgaggtgaccgaatatggaacagaacttcaaccacgttcttctgtgcggacaggttctcacccagccgcagccgtcccacgtcaaccacggccagagcttctcccggttcctgctgtccgtcccccggctctccgggcaggaggactgtctgccggtgatcgtcccccagccgctgctggagctgtgtcccctgtcccccggcgcagccgtcaccgtcaccggccagcttcgctccttcaacaaccgcagcggacaggggccacggctggtggtgtcggtctttgcccagaccctccagcccggtggagaggggccggtgaatcgcattcggctgtccggcgtgctctgtaagccccctaccctgcgctgcacgcccttgggacgggagatctgcgatatcattctggcggtgaaccggcgctacggccgagcggactacctcccccttatcgcatggggtaccgttgcccgtcagacgtccattctggcggtgggcgcccgtctgacggtggagggccgcatccagagccgcacctacaccaagaatctggagaccgggccgcaggagcgagtggcctatgaggtgtccgtcatgcgtccggcagagctgtcggaatttgtagagtaggcacaggattttgcggtacgcctattgaaccgccatccaaaccgtggtatgcttatacctatacgaaaatcatgtaaaggaacgcaagactatgcaccatatccagcaccctcatccgacccactccggcgtggatatgaccgaaggcaatatcaccggccatctgattcgctttgcgctgccgctgctggcgggcaacatcttccagcagctgtacaacatggtggatacatgggtggtgggcaatttcgtctccaacgaggccttctccgccgtaggcacagtgggccccatcgtcaatatgctcatcggctgctttcttggcttttccagcggcgccggcgtggtcatcagccagtactacggcgcacgacgcacggagagggtccacgacgccgtccacacggcgctggtgctgacggtgatcctgtgtgcagtattcacggcgctgggcatcggctttacgcccctgatgctgcgtttgatgaacacccctgccgaggtgtttccggagtcctccgcctatctgaccatctatttcggcggcatcagcggcctactgatctataacatgggctccggcatcctccgggccgtgggggattcccgccgccccttctattttctggtggtctccgccgtgctgaatacggcactggacctgctgttcgtgctgcggttcggcatgggcgtggagggcgtggcctgggctacagtcattgcacaggccgtctcggcgcttctggtgatcgttgttctgctgcggacacagcaggcggtgcggctgatcccccgtgaccttcgcatccatcttcctgtgctgcggcagatcatccgggtgggcgtcccctccgctctgcaaatggccatcaccgccttctccaatgtctttgtccagtcctacatcaactccttcggcgccgactgcatgggcggctggacggcctataccaagatcgaccagctgatgctgctgccgatgcagtccctggccctgtccgccactacctttgtggggcagaatctgggccgcggcaacgagccccgtgctcggcagggcgtgcgccgtgcgctggccattgccatggccgccacggtgctggtgatgattccggtgctggtctttgccccgcagatgacggcctttttcaaccggaagccggaggtggtggcctacggcgctctgctgctgcggtgtatctcccccttctatgtgctgtgctgctttaatcaggtctacgcagctgccctgcggggcgccggaaacagtaaggccaccatgatcatcatgctgtgctcctttgtgctgttccgacaggtctacctgttcattatgtcccactacatctcccatgagctgatcccgctggtcatgggctatcccgccggatggctggtgtgcagcgccgccacgctgatctactatcgccgtacctccttcctgtccacccggctggtggcggaggacggcagcaaggaggacatccaatgaccaagtgtgagagctgtgtgttctatcagtacgatgagaactacgacgattatgtctgcgacatggacttggacgaggacgagatggtgcgcttcctcacctcccagacagacagctgtccctactggcggcccggcgatgactatctcaccgcccgcaggcagtagatgaagtacggaaggaatttattatgaacatccgagaagccacaaaaaatgactgtgtgcatatggatgcactcctgacgaagctgatccgttatgaggcccgatttgatcctaatttgagtccagaggtcgtcatagaggacaattacgccgggcaaatagccgcagaaggctgtaaggcttatgtcgcagaggaccatgggatcatcgttggatatctctatggatttacataccggatcccgcaggtgctcttgcagcccatcgccatcgtcgatgccctgtatgtcgaagagggctaccgtgggaagggaatcgccaaagatctattccgtaagtttcaggagtttgcgtcgggctgcggcgctgccagcattgagttgaaggtgatgtcccgtaacagagatgcgctgcgcctgtatgcgtcgctggggttttgcgagacaaaaaagtatatggcgctgccgctgtcgcagaatggaagcaaatgacatttttctttaataataacgaaacaggaaccggcttgacccgtaaaggtcacgccggttcctgtttcgtgtatttatttgcacttttatgccagatagacggccttgcagcccagatagttcatgtagcaatccagcttgcccaccgtctcgaagggagcgtgcatactcagcaccggcacaccggcatcaatggtggtgatgttgcggttggccatgtactgggccaccgtaccgccgccgccggcgtcgatcttgcccatctcaccgatctgccacaccacgccggcctcgtccatcacccggcggacataagccaccgtctcggcgtcggcatcggaggagccgcccttgccacgggcgcccgtgtacttgcacagccccagaccgtggttcacctgagcgtcgttgcgcttctcatacacctcagcgaaattggggtcataggccgccgtcacgtcggaggacaggcagaaggcgctctcatagcacacccgcagggcaacgccctgactctcgcacagatcctccataaaggtatcgaagaaggcggactgcataccggtgacgcccatagagccgatctcctccttgtccgccagcatacaaacggcggtcttggtgggggtctccagctccagcagagccttcagggccgcatagctgcacacccggtcatcgtggccgtaggcgccgatgaggctgccgtccagaccgatatccgtggcattaaaggccgggaccacctccagctcggcggatgtcaggtcatcctcgcagatgccgtacttctcgtggagcagatccagcacccgcagcttcacacggtcgctgtcctcgctgtcgcccagaggacggctgcccataagaatattcagcgtctcaccggcaatggcctcgttgaggggcttcttcccctgttcaccgcccagatgaggcagcagatcattgatgacgaacttgggctcgtcgccctcgcccagcaccacggacaccgccgtgccgtccttcagggctaccacaccccgcagctgcagggggatcgccacccactggtacttgcggatgccgccgtagtaatgggtcttgccgtaggccagctcgctgtcctcataaatgggatgaggcttcagatccagacggggagagtcgatgtggcaggccacgatctgtgcgccctcggacaggctctcccggccgatcacggccagcatcacgctcttcttccggttcacccggtacacccggtcgccgggctgcagggccatgccccgctcataggggataaagcccgccgcctccgccagcgccacggtgtgggccgtgcactcccgctcggtcttgctgtggtccaaaaagctcttgtagtcccggcaataggcctccatggcatccagcgtctgctggtccacccggtcatagccgttcttgctgccggaaaacagcagctctcttttggccttcatttcatcggtcattgttcatgtcctccttcggtgatatggtggagctgccgcagcagatcccggaaaaaaatctccgccttctcccggaacgcctccggcgtctcctcctgattttccagcacatctgtgcagtgctcacgataatagctgtccggcttctgggcctgaatacgcagccgtgcgtactcctccgggatatggtcccgctgcatgatccgctgcactcgctgctcgccgggggccagcaccgccaccgtccggcagcacaactcccccaggccgctctctatgaggttgatggcatccagccccaccagcacccttccctccatcctccgccgcagcacgccggggagatagtcgaaaatgatgccgttgagccgctccagcgcctgcggatcggaaaagacgagactccccagcttctgccggtccagttccgtcccccgaaatacctcgccaaaggcgtcccggatgcggcggcgcagggtctcgtcctcccgcagggcctgatgatacacggcgtcgcagtctaagaccgtgccgcccagcgcctccagcgcctgcagggcgctggtctttccggacccggtgccgccggtgatgccgatgaccactggggcatctccgtcaatgaggtggaagcccgccgcctttttcagccgattccctaccgccagacccagccccgcatcatcgggacactgggcgaaaatctccgtcacgtccgttccgtcgaaggtgcgcagagcgtcgaacacccgctgggcctgcgccagcttgtccgtgaacggccccagccgatgaacgatatgaccttcaaaatacccggcgaactcgtcaaagcagatgacccccgccttttcccgcagcaagccccggatcaccagagcactgtgggccgggtcaccggtcactgccgtcaccggcgccttgggagcgtagtgacggtacttcatccccggcgcacggggcttttccccgtccttcagaagcccggtgacggccttatctaccgccaccgtacccagcacctcctccagcgcctccaacggcagtccgccggggcgcagcagccggggcggcgtcaccgtcaggtcgatgatggtggactccacccccaccgcacacggcccgccgtccacgataccgtcgatcttgccgtccatgtcctccgccatgtggcctgccgtggtggggctgggccgcccggaggtattaccgctgggggccgccaccggcacaccggcagcctcgatgatggcccgtgtcaccggatggtccgggcagcgcacgcccaccgtctccagcccgccggtggtttgcaggggtacgttctcccgccggggcaggatcatggtcagcggccccggccagaaccgctccgccagacggtaggccgtctccggtacctcccggcagtaccgctccagccacgaggcatccggcacatggatgatgaggggattatcctgcggacggcccttggcctcgaaaatatggcgcaccgccgtctcgttgagggcgtccgcccccagaccgtataccgtctccgtggggatgcccagcagcccgccccgccgcagaatagcggcggcctgcgggatggcatctgcatccctctccggatggaatagaatggttttcactgcgatccttcccttttgcggcgtatttctcagaagcccagctcctcgcccaccagcaccaccttgatgcggcctgccgggcgacagatgcgggtggtgacgatctggcagcagatgctgtcaggccccgtacagtcggcgcacaggccggtgacggaacatggagtcttgagcccggcaaaccgctgggcgttgacgggagcggcgacctctctggcccggcgcatggctccctccagatctccggccaccttgttcatgcccgccaccacaatgacctgctccggtccgaagcacagagctgccacacggttaccggtgccgtcaatgttcaccaactgaccgtcggcggagatggcgttgctgctcatcaggaaggtgccgcaggtcagcgccttcttcagcatctcctgccgctcctgcggcgtctgggccgtatcccggtcaatgagggcgatgccctcttgcgccagccgctgcttgatccccagtgcgtccaccgtggcggtgccgccccaggacaccgtgtgctccttggggaccagctccaccactttctccacagcctctgccgccgtggagacgtagtaggcctcgaagtggcgcttttccagtgccttcaccacctgcggaccagccttgtcgtaccgtttcttcgtgtttgcatccatggctcattctcctttctcataaccctcctgcagccgccgggtctgatcggccagcgtcagcgcatcgatgagggcatccaagtcgccgttgatgacggcggcgaggttgaaatttttattgtcccccgtgaggcggtggtccgtcacacggttctggggaaaattataggtacgtatcttgccgctgcggtcaccggtccccacctgactgcgccgggtggcggcgatctcggcgttctgccgagcctgctccgcctcgtagagcttgcttcgcaggatcttcatggcccgatccttgttcttatactggctccgctcatcctgacactccaccaccgtaccggtgggcaggtgcgtaatgcggatggcggattccgtcttgttgacgtgttgtcctcctgcgccgctggagcggaaggtgtcgatctgcagatccttggggtcgatggagagctccgtctcctccgcctccggcatcaccgccaccgtggcggcggaggtctggatgcgtccgccggattccgtctccggcacccgctgcacccggtgggtaccggcctcgaatttcagccgggaccacgctccgtcgccctccaccgtggcacagacctccttcacgccgcccagctccgtgacgttctgactgacgatctccagctgccagccccggcgctcggcgtacatggtgtacatccgcagcaggtccgccgcaaacagagcgccctcctcgccgccgacaccgccccgaatctccagaaccacacttttttcatcgttggggtctctgggcagcagcaggcgcttcagctcctcggccagccgctcccgctgctccttggtccgtgtcagctcctcttgggccagctccctcagctccgggtccgacagcatctcccgtgcctctgcgatagcttgctccgtctgctgtaaagcagtaaaggtttccaccacaggcgtcagctccttctgctccctgctcaggttcttcagccgctgctggtcgctgtacaccgccggatcggccagctcacgctccacctgccgcagccgccctgcaatttgattcagccgatcttccatggggcctccttacgtctgctccgccagatagcgctgcacgtcctgaatgaatttatcccgccagaacacatagcccacggagccaggccgcagggatgcctccagcagatggggctgggcggtgtagctgtccatctgccgatagacctcctcataccgcttatcgctgcctctggtcagcacataggccacccgactcagctcctgcccccggcgcttcagcagcccacgcacggggctggcacaccgtccggcccacacggggctgcccaaaattaccagtcggtattcctccaagggcttagccgtctcgaatttctccagcggatgggtggagcgccgcatggcatccagcccggagcggaaatatcccttccgcccctgccggtccacgccgtcggtgaactccaccagctcggcttccagcgcctcggcgatctccgccatagtctgacgggtattgccgctgcgggaatagtataaacacaaaatgtcgctcatctatggtgcctcctgatggcctgccggagcaggccagagtagaatttccttgctattaaaatatctgtaaagtgataatacttctcagctttttcaaggcgtgttactcctcaatctgcagagaaagctcctcccagcgggccatttcctgctccagccgggcctctacctcctgcttctcctgatagagccggttcagttccccggcatcgcaggcgtgggccgccatctcctcgtccagccggcggcactccgcctccagcttgctgatccctgtttcgcagatggtcagctgccgccgggcggcctgctggctgcggttgccgcggggcggtcgggtgtccccctttttctccggcgccttcaccggctggggagccttctcctgcgccttcaccgcccggtactgggcaaagcccatggggtagtcggtgatggtgccgtccgccagctcccagatacgggtggcaaaccgctggatgaagtagcgatcgtgggagacgaacagcagcgtgccgtcaaaggcctccaccgcctcctcgatccactcccgtgcggcaatgtccaaatggttggtcggctcgtccaaaatgaggaggttgatctcctcgtccatcagcatacacagccgcaggcggctcagctcgccgccggacagcaccgacaccggcttgaacacatcctccccctgaaactggtaggcggccagccggttccgggcgctctgggccgtcataccctttttctcgtacagcatagtatccagaatgctgcgctccgggtggtcaaagtgaatgatttgtggcaagtatgctgcctttacagacggccccagcttaaagatgccgctgtccgtaggttccaagcccagcagcatattcagcagcgtcgtctttccggtaccgttttcgccgatcagggcgatgcgctcaccgccctccacccgcaaatagatgtcggagagcagtgtccgtccgtcgaaggccttggaaacccccttcacctgcaacacctcgtcgcccttgaactggcggctggcaaagcgggcatccatttttttggccttggtgggcttctccgtagtgcgcatccgctggatgcgcttttccatggagaaggcccgcttatggagggcgtcattgcccatgaaggcccacaggtgcatctgctcggcagccttttccagctgctggatcttggcctgctccttgagatactgcttcaggcgctcctggtagcggcgctccttctccacggcgtagaagctgtaattcccactgtaaaactccgcctttccgtccagcacctcgatgatgcgggtaacggtgcggtccagaaaataccggtcgtgggagatggtcaccaccgtgccacggaaggtgcggatgtattcctccagccactccgtggcctgaaggtccagatggttggtgggctcgtccagcagcaggatatccgtgtcctctaagatcagacggcccaaattcacccgtgtcttttccccgccggagagctggtcaaagagccgctggcgcatctcggtatcgatggagaggccgttggccaccttgttgacggcggtatccgtatcgtagccgcccagcccctcgaatctggccgtcagctcaccgtaccgcttcagggtctgggaagagctgtctcccgccgccatctgctcggtaaggcggtccatctcctccttcatccggaacatccgttcaaaggcagagcgcagcacatcctccacggtgtatccgtcgggatacaccgggatctgggagatcaggcccacccggcggccgggggccaccattacctgtccctcatcgtagtccagttctccggtgaggatacgaaataaggtggtcttaccggcgccgtttttccccagcaggcccacccgctccccggtgtcgatctggaaggtgatgccatccaatattttcttttccaggtcaaaggacttgaccagccggttcacgctgatatcgatcatggatatttcgtccgtttcgttattttcagatgtatactatgcttcgtgagtaagggcctccacgatgcggtggaactccatggcgtgagatgccttcaccagcatggccgtaccgggggtcagcgcctcccggacggcgggcagcgcctgctccaccgtgtcaaagtgcagggcgatattccccgctccctgcgccataagccgggccttttcaccgatggcgatgacctgatccagccccagccgggccgccagcgcaccggcctctcggtgggcgtcgctgctgagtcggcccagctcgcccatgtctcccatcaccgccacccggcgacggcagtcggtgtccgccagaatggtcagcgccgccgccatggcctgaggattggcgttatagcagtcgtcgatgatgagccgctcctccggcagacggatgcgccgcatccgggagcccgtggagacataattcgccacgccctcctgaatctgctgtgctgtcagacccagccgctcgccaatggccaccgccatggacgccggatagatcatgtagtcccccggcgagggaatgtgcagcggataaacgccgcagggcgtggtcacggtgcaggagaggccctccacgccgtgggtgacgatgtccgtgacccgaacggcacagttctctccccggccacagaggatggtctcgaagggcagctccagtcctgccagcagagcatcgtcgccgttgagtactgccagcccgccgggctgcagatgctcgaagatctcgctcttggcccgcagggtaccctgacgggtgttgccgagattttcaatgtgggcatccccgatgttggtgatgaccgccaccgtgggacgcaccatctcccccagatagcggatctggccgaagtgatccatgcccgtctcgatgaccgccgcctgatgctccggcatcaggcgcagcagggtctgtggcgtaccgatctcgttgttgtagttggcctcggtcttgagggtaaggaaatgccggctcagcaccgaggcgatcatctccttggtggtggtctttccggcggagccggtgatctgcaccacggggatggggaatttctcccgataccaccccgccagctgtcccagcgcccggagggtatcctccacctgcacatagaacttccccggcaccagcgcctccggcaggcggctgcacaggcagcccgcagcgccgctctccagcgcctgcgtcagataggtgtggccgtcaaagcgctcacccaccagtgggatgaacaggcagccctgctcgaccctgcggctgtcggtgctgacgcaggaaaagccctcgccgtcctgcaccagcgtgccgccggtggccgcacacagctcctttgccgtacaggtcatcatgtccgctgcactcctctcgccttcagagactcctccacgatcctctcacagaggtcggcatagctcaaacccacctgcgccgcctcctgcggaaccagactggtgggggtcatgcccggcagtgtgttgatctccaggcaccacgcctttccctcctcatccagcaggaagtcagagcgggaatacaccgacaggcccagcccccggtggagcttcagcgccatctcaccgatctgatgccactcctcctccgtgatgggggcggggcagatctcctgagcaccgcccttctgatatttggaaacgtagtcgaaatattcgccacgggggatgatctccaccgcaggcagataggtgtcccccagcacggcaatctggatctcacggcccttgatcttcttctccaccaccacgtggtcgccataggtcagcagcttggtcagggcctcccgcagctgctccttggtatccggcagctccacaccgatggaactgccgccgttgacgatcttcacggcgcaggggacctccaactcctccaccagacgggggatatcggaggccgtgtaatggacgtcacgccacggcgccgtgcgaataccctcagactccagaaaccgcttggtaacggatttgtccatggccatgccgctgcccagatagccagagccggtgtagggtactcccagcagatccagcgtggcctgaatacgaccgtcctcgccgcaggagccgtggagcgccagaaacacgatatccgccatggcgcacaccgccagcacgtccttgcccagcagggacggcccctgatccttccgactgcggcgcacggcctccagatccggagcctcctccgtgacccggttgtcgccgcacaggccgtccggggcatcgaagatatcctccagccggccctcatagctctccagccccaggaacatatccaccagaatagcctgatgtccccgctcccgcagcgcccggcacacaccggtgccggaggtcagagccacctgacgctccgtgctgagtccaccggccaacacaacgatcttcataagctttgcctcgctttcgcttgaatcacagggcggcccgccgacagcaagccacctattatatcagtatgtcagtatagcatatccctccggcgattacaaccgggcagggaaattttcaacgacaaaagaaccgccccatggggcggttcttggaaaagctctatgcagctaacgcagccagtccggcagggagcgcttctggatgccggagaccatgcccatggcgatgaacagcgtcaccaccgacgagccgccatagctgatgaagggcagcgtcaggcccaccaccggcagcacaaacaggcacatccccacgttggagacgatctggaacaccagcatccccgctacgcccacgcagatgtatgcgtccagctggctcttggcgttgcgggccactacgatacagcggataacgatggccgccagcagcgccagcgtcagcacacagcccagcatccccaactcctccccaatgacggcgaagatgaagtccgtgtgccggaagggcaggttcacggaggaggtactctgggtctgagccccgtggagcagcccttgtcccgtcaggcgaccgccgccgatggccatcaggctccgggtctgctgccatccggcccccagcggatagagactgtgatccaccagtacctgaaagcgctccttcatatagggtgggatcttgtccagctcccacagtaggtaaaagccagccccggcgccaaagatgcccagagcgaaccaccggagggctaccccggcggcaaaggccatgcaggcgaagatacacacatacaccagtgcgctgcccatgtcggaggagatcacgtagtaaaggccgatggtcaccagcagattccccgccaacaaacccacagcggggatggacttcatgtcgccccggcccttcatccacaccagctggcgggccagcagcaggataaaggtcagcttcaccacctccgccggctgcacctgaatggggatgccccggacgcccagccacgccagattgccattggccgacacacccagcggagttttcagcagcaggaagaagccaaggttaaaggccagcagccactgccactttttgctgatctccgtcaggtccaccatggacaccacgaaatacagcacaatgcccagcgccaagccgcacagctggatgatgacgcacttgagtcccccctgataccgggtggcgctgtagatcatcaccacgccgaagagggacgtcacggtacacagggccagcagtagaagatctgcttgacggataatatctaatatggtatttttcacacttttcagcatggatgtttcctcgaatgatctatatagagcttatatcaatttagtgtaccacgttttcctgccggtgtaaaccgaagtttttgtgaacgtgggattgacaggcgtctctgtcggtggtatattgtaccaaaagtaagaaaagttatacttttcatattaggagggattgcagtgggaaagaaggacgaccggtactatatgtcctcggtaaagctcggccccaagggccagatcgtcatccccaaggaggcacgggccatgttcggtctggagccgggggacacgctggtgctgctggcagacaccaaaaaggccatcgccctacagacggcggataagctgaatcccctgctgcggcgggtgtttcagcagctgccgggagatgaggaggcagaggaatgaacgcactggcggtcaaggggctgtgcaagcgctatccggccttttcgctggagaacgtgagcttttccgtgccggagggtgccgtcatgggcttcatcggacgcaacggagcgggcaaatccaccacactgaagtctattctggggctggtacacccggacgccggggaggtaacggtgctgggcaagtccttccgggaggaggaacaatatattaaagagcgcatcggcgtggtgctgggcggcatcgacttctatcccaggaagaaggtacggctcctcagcgacgtgacccgccggttctacggcaactggcaggaggagaagtaccgtcactacctgaatctgttcggcattgaccaggaaaagcgggtggatcagctgtctaccggcatgagggtaaagtacatgatcgctctggccctgagccacgatgcccggctgctgatcctggatgagcccaccagcgggctagacccggtatcccgtgacgagctgacggagctgctgcggcgcatcgccgccgatggacatcgcagcgtgctgttctccacccacatcacctcggatctggagaaatgcgccagccacatcaccttcatcaagggcggcaccatccagcacaccggcacgctggcggacttccggcatcactacgactacctccgccagccgggacaggagctgacgctggaggacatcatcgtttccgtggagaggaggcccttggatgaaaacgctattgtataagcagctgcggctggtgtgccagcctatgacgctggtgttctgcctgttcggagtcatgctgctgatcccggcctacccctataccgtcatgtggttctatgtgatgctggggctgttcttctccttcctcaacgggcgggagcagaaggacgtgtactactccgccctgctgcccatccggaagcgggataccgtcaaggccaactgcctgttcgtggggctcatcgagctgctggcgctggtcatcgccgtccccttcgccctgctgcgggcgaagctgggtatcggggacaatcccgtgggtctcaatgccaatgtgacgctgttcgcctgcggactgatgctgttcgccgtgttcaacgccgtgttcctgctgtccttctaccggacggcctacaaggtgggcgtatccttcgtgaaggcgtgtatcgtcatggcggtggcggcgatcatcatggaggccgccgtccacttcccggcactgagccgcttcaacggctatgacctggcctgtcagctgccgctgctggcggcgggactggtgatctggtgcggcagctggcccctgatcttccggggtgccgccgcccgatacgagaaggttgacctgtaagcgagtgaccctcagcatcatctgcggacggcaaggacaccctctgaacaaaagaggacagggctgcgccctgtcctcttttgctctctcagtccgccagacctttcccggcggaaaactgatcgtatttcgcctgaagccactgcttcagctcctccacaccggcctcgtcccatgggaaatctctctcctgcctgtcctgcgctgcctcgtagcagtacacggaataaaccgccgtgtgcagtatgcccttttccttccccatgtcaaagcggtagcggaagtctccgatgctgccggtatagacaaaggcccgcttgaaccaacggggcgtcagctctgcaaattgtggatgcatcctgtcccctccccttttgttttttatcagtataccacagcctgccgaaaaaggacagtcaaaaatagacacccggcggcaaaatcaggaaaaagcgcttgaaaatctcctccgaccgtggtatcatgtatgtaacgtttggaacatttaagcttcggctgagaaaaggggtatccgaatatggaaagtgcagtgaaacgcatcggcgtgctgaccagcggcggcgacgcccccggcatgaacgccgccatccgtgcggtggtgcggacggcaatgaagaacagcatcgagtgcgtgggcatccgccggggctgggcgggccttatcgccggggatatctgtcccatgaattccggcagcgtcagccgcatcatcaaccggggcggcaccgttctctacaccgcccgcagcgacgagttccgcacgccggagggacagaagaaggccgccaacacctgcaagctgctggggctggacggcatcgtggccatcggcggcgacggcaccttccggggggcgcaggatctgtccagattcggcgtgtccgtggtgggcgtgccgggtaccatcgacaacgacatcgtctgcaccgactataccatcggcttcgataccgccgccaataccgccgtggagtgcattgaccgtctgcgggacaccatgcagtcccacgaacgctgctccgtggtggaggtcatgggccgtcacgccgggtatctggctctgtatgtgggcgtagccgtgggggccaccgctgtgctggtaccggagcatcagtatgactttgaaaagcacgtggccgagaagatccgcgcagcccggttggggggcaaaaccaacttcatgatcgtggtggccgagggtgccgccagcgccatggatgtgggcaaggagatcaaagagcatctggggcttgacccccgtgtcaccattctgggccacatccagcggggcggcagtcccaccgccaaggatcgtgtgctggccacccgcatgggctacgaggcggtgcgggtgctggccgagggcatgaccaaccgggtcatatgcgtccgggatgaccagatcgtcaacgtggatatcgacgagggactggccatgaaaaagaccctcaacgccgaggaattcgaggtcatgaccgttatgaccggtgtgtgagccatatacgaaatagaataagagtatcccatggaggagaagcacagcttcttctccatggtctttttgtgcaaaaagcgttgacgggcatcgaatcttatggttcgtaataggaaacttttcttatgttccctctgcgtcacggagcgctgtttgttgtgttctgcgccgaacctgcctggtttgtcaaaaatgttcatctgttattgtgcatttttgccgccgcgcccctcacggggtgcatggattgaaatcatagttgataattcaagatatacatggtatacttagccgcaccccctcacggggcgcatggattgaaattcattgttctgacgcaggtacagtcaggcagagtcgccgcctcccaacacggcatagagaaaaaatgttccaaaggagtgctgtccgaatgaatcctgctgatatcatcaaagatgctgttgcacttatcaaagaatatgcacaggaactcagtcaaaaagagcacagagatgatgttgaatccggggaattgatcggctatactgaggctcttagtgtacttcaggatgcgtgttcgccggatatgcgccgtgaaatcggtcttgatttcgatatcgacgcagcatacctgaatagtacgaaaaaaggagaggcttgctgttatgacctcgatggaaaagaaattgactgaaaaccgattaaccgaaccacggaggaaaaaggcaagcccttgatgttgacattctgcccagcataggttatactgccaatataaccattccgcagaagctgccgggacgctattgtaagcccggaagagcgaagaagcgggatggttcttttttatgtccagcatggactcggagtttttcgccatttgggcggcgatccgcagcacgtcccggtcagaaatcgtcgagctgcgaatttgtgcttgactttccgtctggttctgtgctacaatatccccagtggtggatgtgtccgacttgacggactgccccacagaggtggtggatgtgtccgacttgacggactgccccaccttttttattgggttaatatcatacagatacttcacaccgtttgcggattccgtcacgttcagcgtggcctcccagacggtgttatttttatcctgaatgtacgtcgtccaatactgccagtcgttcttgccgttgtgcattgatgcgggccagctcctgtacgccgacctcggacaccagctgctggagcgccccgttgccgaacttgctgaactccttcggctggcgcaccggcttcagcgctccacgcagattggccgctgtcatattgtgcagtgccagaagatcacgggtttcctccaccggctcccgcagggagaactgatcctttactccccgctgattctccgagcttcgttcagcagttcttctcccgttgcttcccgatggtccgccatgtaatgcagcatttcgacctgctgttgttcttcctcccctacggttagaaagattgctgcgcccattcccctcgaaatgcccatagcctttaagcaatgagtcaagcgcttttcggtctccgtcatagttttgctcctccctgatataatccatcagcatctttgcttttgcgctggcagtcttcccgcccaccgcatacagcggcgtggcatctgttccgtctcctatgccatataaagcgaacacctgtacgcctttttcatcagcatacacccacttggttgcctcgtcaagaaaattttccccgcttttgatctcggcgttcatccgccgttccagcagctcccactccgctcgtttcagctgcggccgccaatacttgccccctgccatgtactggttttcgccgccctcgctccgggtctccgctccctgatagttctccaccgccgccgtggccgccttgtcataggcatccacaatgcactccagatagtgcagtccgccgtcccgcatctccttcaagagagccgcctccgccttggtgttggtggtcagcccatcgaagtacgccttcaccttggcgatgaagtccttcagcttaccgatgagcttttccgtcccccacactccccgtcggcagcgagacacaaaaaattcccggagagccttcgttctccgggaattttttatgagtcaatagacgctatcaagccttgccggcgcagcccagcacgtccaccagcttgtggcgcaccagctcctttatgttggcacgggcgggcttcagatactcacgggggtcgaacttgtcgggatgctcctccatgaactgacggatggtgccggtcatagccagccgcagatcagagtcgatattgatcttgcacacggacagcttggccgcctcacgcagctgctcctccggcacaccgatggcattgggcatccggccgccgtggtcgttgatcatcttcacgtactcctgcggcacggaggaagagccgtgcagcacgatggggaagccgggcagacggcgggagacctccttcagcacgtcgaaccgcaggggaggcggcaccagaatgccctgctcgttgcgggtacactgctcaggcttgaacttataggcgccgtggctggtaccgatggcgatggccagagagtcgcagccggtcttggacacgaactcctccacctcctccggacgggtataggatgcctcatgagcggccaccttcacctcatcctcaatgccggccagcgtaccaagctcggcctccaccaccacgccgtggtcgtgggcatactccaccacacgcttggtgatctcgatgttctcggcaaagggcttggaggatgcgtcgatcatcacagaggtaaagccgccgtcgatgcagctcttgcaggtctcgaagtcgggaccgtggtccagatgcagcacgatggggatatcggggcagcactccacagcggcctccaccagcttcaccagataagtgtggttggcataggcacgggcgcccttgctgacctgaaggatcacgggggcgtgctcctcctggcaggcctcggtgatgccctgtacgatctccatgttgttgacgttgaaagcgccgatggcgtagccgccgttataggccttttcaaacatttccttggaagtgaccagtggcataaaaatcgctcctttagcaaaatagttcttgacttgtacggaatgattggaataatatatccatggcttattgtatcacactttttcttttttgcaacccccagtcatttactttatggcatttccgtgctaaactgatagagcttgattaaaaattcttctgtggaggtatagatcatgaaagaattaaagggtgcctgcatcatcggacagtccggcgggcctacatcggtcatcaacgccagtgcctacggtgtcatcgacacggcgctgaagtccccctgcatcacgcaggtgctgggcgccgagcacggcatcaagggcgtgctgaatgaccgtctgttcgacatggggctggaggacccggaggagctgcggctgctgaaatacactccctcctctgctctgggctcttgccgctataagatcgcagacccggaaaaggacgataccgactatcgccggatcctggaggtgttcaagaagcataacgtccgctacttcttctataacggcggcaacgactccatggatacctgcaacaaaatcaacacctatatgcaatccgtgggctacgagtgccgggtcatgggcgtacccaagaccatcgataacgacctcttcggtaccgaccactgccccggctacgcctcggcggccaagtacatcgccacgtccatgatggaggtctatcacgacgcccatgtctatgacaccggcatgatcgtggtcatggagatcatgggccgccacgccggctggctggccgcctctgcggcgctggcgtcggagtacggcgcaggtcccgacctcatttatctgccggaaacggatttcagtatgcccaagttcatcgaggacgtgaagcgggtctatgctgaaaagggcagctgcatcatcgccgtctccgagggcatccactatgaggacggcggcttcgtctccgaggccaaggtagccgccaatgacggcttcggccatgctcagctgggcggtctggccgccattctggcgcaggtgctgaaggaggagaccggcgccaaggtccgtggcatcgagctgaatctgctgcagcgctgcggcgcacatctggcctccgagacggatatcgaggagtcctttatggcgggcaaggccgccgtggaaaacgccgtcaacggcatcaacggccgcatgatcggttttgagcgcggcgtccgggacggccgctatgcctgcaaaaccaagctgatccctctgatggaggtggccaatgtggagaagaaaatcccccgtgagtggatcaatgccgagggcaacggcgtaaaccaccagttcatcgagtacgccctgcctctgattcagggtgagccggatctgcccaaggtggactctctcccccgcttcgccaagctgaagaaaattctggcaaaataattgcagccataaaaaatgtccggccatagggccggacattttttgcagttctcctactgatcgaaggaggggttgacgaagtagagattcttctgatccatcttctcctttgccagccgcagcccctcgccgaagcgctggaaatggacgatctcacgggcccgcaggaacttgatgacatcgttgacgtcggggtcatccgacaaccgcaggatgttgtcataggtcacacgggccttctgctctgctgcaaggtcctctgtcagatctgcaatcaggtcccccttcaccgccatggaggcggcgttccacgggaagccggaggcggcagtgggatagaccccggcggtgtgatccacgaagtacgcttcatagccggcgtcctttacctcctgctccgtcatgttcctggtcagctggtgaacgatggttcccaccatctccagatgccccagctcctccacaccaatatccgtcagcagcgccttcagctccgggtatggcatggtgtagcgctggctgagataccgcagggaggctcccagctctccgtccggcccgccgtactgactgatgatgaaggccgccagtttgggattggggttggcgatgcgtaccgggtattgcagcttcttctcatagacaaacatcagtccgaacctccttcatcccagggccacgggtccttgagccaccggtagccgccctcggtaacggtggtctgggtcaaggggccgtactgcgcctcatagcgggctctcccctcctgcgctaaccggatatactcccagtagagggccagcacctcctgatcctcggcatgggtcaccagatacagccccagctcgtcgatggcgaaatccagtgccatcagctctgacagcgccgtgttggccgccgggaaccggcttttcagctccttatgaaacggcaggtccagtccggggaacagcgtcccctgctgcaaggcctcccgctgatcgtagcgcttggggtcctgcccctgcatggccacaaagggaaacgccatagcggcgcaccgtcccggcagctgccccttcccctccgggcactcattctccgccgcagcgttggtgatttctgtgtacaagagtccttcctcctcacaggtcatgtgtgagccaagcggctcatcccattctatgccaccgccgtgaaactggggacttcccttttcggaaacttatggtataatgtctctaacgtatctttatcataggaggaatcagatatggcaaaccagaccatcccccagcgcagtgaggttccggaggaatacacatggaacctgaaggacctgtatgaaagcgatcaggcgtggaatgaggaatataaggccctgaagaccctcccggagcagatcgccgccttccgtggcacgctgggccgcagtgccgaggacctgctggcatggttccggctccaggatcaggtggaggagcggctgagccgcctgtatggctacgccagctgcaagggcgacgaggacaccggcaacagcttctatcaggatatgcgcggcaaagccatgagcacgctggtgaccatctccagcgccgccgccttcgccaccccggagatcatggagatcccggaggataccctgaatctgttctacaccgcccagccggagctggagacctaccgccgcagcctgtatcagatccgccgccgcaaggcccatatcctctcccctgccgaggagaagctgctggcctccgccggcgagatggccaacgcctctgagaacgtagccagcgtgttccgcaacgccgatatggtctatcccgacgtggtggacgaggccggcaatgcccatcagttgacggacgccaccttcgtccccatgctgatgagccccgaccgggagctgcgccgccgtgccttcgagacctactataaggcgctgggccagtataagaacaccgtggccgccacgctggacggccagttcaagcagctgtgcttcttcgccaacgcccgccactacgacagcacccttcaggcatctctggacgccactgaggtgccggtgccggtgtatctaaacctcattgaggcagtccacggcaatctggataagatgtaccgctatgtggctctgcgaaaaaaggtcatgggcgtggacgagctgcatatgtacgacgtctatacccccattgtggcggacgccgacaaggagatcacctatgagcaggccaaggagaccgtgctggaggccctccatgtgctgggcgatgactatgtggctctgctgaaggagggcttcaacaaccgctggatcgacgtctacgagaacgtgggcaagcgaggcggcgcctattcctccggcatcagccgtccccacccctatgtgctgctgaaccacaagaataatctggactgccagttcacgctggcccacgaaatgggccacgccctgcacagctaccacagctgcaagtatcagcccatcagcaccagcgactatgtcatcttcgtagccgaggtggcctccacctgcaacgaggtactgctgatgcgccacctgctgagcaagaccaccgacaagaagcagcgtgcctatctcatcaaccacttcctggatcagttcaagggtaccgtgtaccgccagaccatgttcgctgagttcgaactggccatgggcaagatggccgaaaacggcgaggccctgacggcggacgccctgtgcaggaagtatcatgaactcaataagctctacttcggcccggatatgatttccgacgaccagatcgctctggagtgggccaggatcccccacttcttctataactactatgtgttccagtacgccaccggcttctccgccgccgttgccatcgccaaccgcatcctcaaggaaggtgctcccgccgtggcggactataagaagttcctctccggcggctgcagcaccgaccccatcagcctgctgaagatcgccggcgtggatatgagctctccggagcccgtcaacagcgctctggccctgttcggtgagctggtagacgagctggcagagcttctgtaaaccagttttcctgcacagctatcccgacctatgaccatcccccattccgccgccctggcagaatgggggatgcctttcggaatgatctcatccaaacctcatactgaaactccccctgcgccatatggcgcagggggagttttcacacgatttgacgggatgtgccttccctttagtctacaatatccaccgaagccttcacgccggtgcgctgtgcgtaggagcggatcagggtacggatctccttggcgatgcggccctgacggccgatgacccggcccatatcctccggggccacacgcagctccagcgtcagctcatcgccggtttctacctccgtcacagtgacctgatcgggatgctgaacaaggcttctggcgatgtagagcagcagctccttcatgcctctgcctccgctttactgaacgtcgaccttcttcagcagagcacgaacggtctcagtgggctgagcaccggtcttgatccactcacgggcccggtcagcgtcgatcttgatctcagcgggagacacgcaggggttgtaggtgccgatctcctcgatgaaacggccgtcacggggatagcgggaatccgccactaccacacgatagtaaggagccttcttagcgcccattcttctcagtctgatcttaaccatgatgtttttcctccaataatgtaaaatagaattgtatttgataaatgctcctgcacttatttacggtttttgcgccggtcacttcagccgcttcttacgcccgaagcccttcatttttccacggccacccataccgggcatcccgcccatgccggggatcccccggaagcgtcccttgctcatggacttggtgagctgctggagcatctcaaaggacttcagcagccggttcacatccaccacctgcaagccgcagcctgcggcgatgcgccgtttgcggctggcgttgaggatctgtggattctcccgctccagcggcgtcatggagaggatgatggccttggtgtgagccatctgcttttcatcgatctgactggcatccagctgcttgcccagattccccggcagcatcccggcgatctggctcagatcgcccatgttctgcagctgctccatctgatccagatagtccgtcagcgtcaagcggttcttgcggagcttctcctccagcttcttggcctgcttctcgtcatactgctgctccgccttctcgatgaaggtcagcatatcgcccatgcccaggatccgggaggccatgcgctccggatggaacagctcgatcatgtccagcttctcgccggtacccacgaacttgatgggcttgccggtggccgcccggatggagagagctgcaccgccacgggcgtcgccgtccagcttggtgagcagcacaccgtcgatgcccagcgcttcgtcaaaggcggaggcggcattcaccgcatcctgaccggtcatggcatccaccaccagcaggatctctgtgggcttcaccgccgccttgatggccttcagctcgtccatcagggcctcgtcgatatgcagccgtcctgcggtatccagaaagaccatatcgttgccgtggtccttggcgtacttgacggcctcctcggcaatgtgtaccgggtccgcctgacccatttcaaacaccgggatatccaactgtttgcccactacctgcagctggttgatggcggccggacggtacacgtcgcaggccaccagcaacggccgcttgccgaactggcggcgcatcaggcccgccagcttggcgccgttggtggtcttaccggcgccctgcagacccaccatcatcacaatggtggggcccttggaggcaaaggtcagccgagcgttggagccacccatcagggccgtcagctcctcattgacgatcttgacgatctgctgaccgggggtcaggctgtccagcacatctgcaccgacacagcgctctgtgacctgcgccacaaaatccttgaccaccttatagctgacgtccgcctccagcagcgccagccgcacctcacgcatcccctcccggacatccgcctcggtgaggcggcccttgccacggagctttttgaatgcggcgttgagtttttcggaaagtccttcaaatgccatagcttactccctcagagcggcggcatattcgcagatctgcgccgtcagccgttccagctccggattctcatactgccggtagttgatggttctgatctccttggcggcgtcctcaatgccctgcaccttcttctgcatctgcatgaagcgccggatgaggcccgtcttatcctccagctccgtcatggcggcctccgcccggacaatgacgtcccggacgccctgccgggagatgccgtagttctcagcgatctccgccagtgacagatcctcattgtagtaaagatcaaagaactccttctgccggtccgtgaggatctccccataaaaatcgaacagcatcgtcatgcgataggtctggtttttcacgaagatccctcctatgtaaagtcgatttgctttacaagcatgactatcataccctattcttccccgcttgtcaaggtgaattttgcggcaaacgaaagtttttcctctactgctgctggtatttttcatggaataattctgcattttgcttgcacaattccgttggtttggctataatagactggatgctaatgtgaaatatgaaggaatgaacccatgagtactgttatcacctctgtggatcaccgcagcccggcccagcgggcggggatccggcccggcgagaagctgctgaccatcaacggccacgagatcgtggacgtgctggactaccgcttctacggctatgatgccaagtgccggctggagctgctggagcccaacggttccgtgcggaatgtacagatcaaaaaggaagagggcctggatcttgggctgaatttcgacacctatctgatggacgaaatgcgctgctgcgccaaccactgtgtgttctgctttgtggaccagatgccccccggaatgcgccagaccctctattttaaggacgacgacgcccggctgagttttctgcagggcaactatatcaccctcaccaatctgacggagcgggaggctcagcgcatcattgatctgcgcatcagccccatcaacgtctccgtccacaccacggacccccagctccactgcaccatgctgggcaacaagaacgccgtgcgctctctggaatatatgcgccggttctgtgaggccggcatcgtcatgaacggacagatcgtcatctgccccggctggaacgacggcgaccagctgcgccgcaccctgcgggatctgacggagatggagttctccagctgctcactggtgccggtgggcatcaccaagtaccgcaagggccttgccaagctgcgccccgtggacgccgccaccgccgccgagatcatcgacatcgcagacgaattcggccgggagaatctggagcgcttcggcacccggcgctttttctgcgccgacgagctgttcctgcgggcgggccgccccctgccggaggaggactactacgagggctaccgccagctggaaaacggcgtggggatgcttcgctctctgggagacgattttctggcagcgctggatacggtggatgtaccggaggaattttcctccttcaccatcgccacaggcacagcggcggcccccttcctgacgggactggtgcagcaggcacaggcccgtttccccggcctccggggcgaggtggtggccatcgacaacgacttcttcggccacaccatcgacgtggcgggcctgctgacgggacaggacatctccgcccagctgcaaaagcggccgctgggagaccgggtgctgatcccgctgcatatgctgcggcacggtgaaacggtatttctggatgattatacagtagagcgtctgtctcaggagctgggccgccccgtacaggtggtgggtctggacggcttcgatctggccgacgcactctttgccccggcggaaagccggcaggacaacggaaggagctgatacccatgtccaaacccttgatcgccatcgtcggacggcccaacgtgggcaagtccatgctgttcaacaagatcatcggccggcgcctctccatcgtggaggatactcccggtgtcacccgtgaccgcatttacggggagtccgattggaacggccgcaagttccgcctggtggataccggcggtatcgaacccaataccgacaaccagatccttgccttcatgcgggagcaggctcagatcgccatcgacaacgccaacgtcatcatcttcgtcaccgatatcaagaccggcatgaccgccgccgaccaggaggtggccgggatgctccagcgctctaagaagcccattgtgctggcggtgaacaagatggactccaccggcgccgtggacccggacttctatgagttctacaatctgggtctgggcgaccccatcgccgtgtccgccgtccacggccacggcaccggcgacctgctggatgcctgcctgcaatacttccccccggaggacgaggaggaagaggacagcgacgtcattcaggtggccatcatcggcaagcccaatgtgggcaagtcctccctcaccaaccgcattctgggccagcagcgggtcatcgtcagcaacgtggccggcaccacacgggacgccatcgacagctactttgaaaacgagaccggcaagtataacttcattgacaccgccggtatgcggaaaaagtccaaggtggacgacaacatcgaaaaatacagtgtcctgcgggccaccatggccatcgagcgcagcgatgtgtgcctcatcatgatcgacgcacaggatggtgtcacggagcaggataccaaggtggcgggtctggcccacgaggccggcaaggcctgtatcatcgtggtgaacaagtgggatctggtggaaaaggacgacaagaccatggaccggatgcgggaggatatccgccgggacctgagctatatgacctacgcccccatcgtgttcatctccgccctgaccggccagcgtgtcacccgtctcttcgagctcatcaactatgtccgggagcagtcctccatgcggatcaccaccgggatgctcaactccgttctggcggatgcacagacccgtgtccagccccccacggataagggccgccgcctgaagatctattatatgacgcaggtgggcatccgcccgccccactttgtggtgttctgcaacgataaaaagctcttccacttctcctatcgccggtatctggaaaatcagatccgcagcgtgttcgggctggagggtacacccatcatcatgagcatccgtcagaagggagaagaagatgcataacgtgactgtagccttcgccgtactgctggtgatgctgctgtcctacttcttcggctgcttcaacggctctttcatggtatcccacttcatcatccgggacgacgtccgcaagcacggcagcggcaacgccggtctcaccaatttctatcgcacctacggcgccaaatacgccctgctggtcatcgcctgcgacatgggcaagaccgtggcggcgtgcctgctgggcagcttcttcttccgctgtctgggttgggacggcaccttgggtacgcttctggcgggcctcggctgtgaactgggccacatcttcccggtgttctacggtctccgaggcggcaagggcatcctctccggcggcacgctggtgctgctgctgaactggcgggtggccgccgtggcatgggcgctgttcctgctgctgtggctcaccacccgatacgtctcgctggcctccatcaccgccacctgcagcgcccccattaccgtgtacttcgtctatggccacaactggctctacaccggtctatgtctggcggtggcggctctggtggtctggtgtcatcgggaaaatatccagcgccttctccacggaacggagaaaaaattcaagtggcacgtcaaccccacggagggcaaggatccgcctaaataagagagagaaaataaacagaaaggaaccaagcacatgcaacacaaccaaatgcgtcaggtggtattccccattctggcggcctttatctggggtacttccttcgtgtcgcaggatatctgcgccgactccatgggggccttcaccttcaacggcacccgttacttcatcgccgtactgtctctgctggtggtgatcgccgtcatgaacaccactcggaaggaccggccccagcccacggcggaggaaaagaaggcctcccgcaagcagctgtggctgggcggcctctgctgcggcaccgctctggccgtcgcctccaacttccagcaggcgggtctggtggccggcaccgacgccggcaaggcgggcttcatcacggcgctgtatgtggtgctggttcccctgtttggcctgttcttccgccggaaggtcagcggcccggtgtggatcgccgtggtgctgagcgtggtatccctgtacctgctgtgcatcaagggcagcttctctctggcccccggcgacctgctggtgctggtgtgcgctgtgtgctttgccgtacacattcttctcattgaccacttcaccgcccgctgcgacggcgtgaagctctcctgcctgcagttcctgttcgccgctatctggtccaccattctggccctgatcttcgacaccattgacttccacgtcctttgggagtgcatcctgcccctgctgtacgtgggcgtgttctcctgcggcgtgggctacaccctgcaaattctggcccagaaggattccaaccccacggtggtcaccatcctgctgagtctggagagcgtgttcgccgtcatcgccggtgccatcatcctgcaccagcagatgtccctgcgggagtatatcggctgtgctctgatgttcattgccgtggtgctggcgcaggtccagttccccgccaaaaaggccaagcagctccagtaagccctttacaaatcgacaaaagacgccctccggcatggccggagggcgtttctctattcacttcttccctttcagggcttcatgcggcgcagcagctccaccagcatcttccagacccgctgcacggaggagatggacattttctcccggaaggtgtggatctccttcagatccggtccgaaggacacgcaatccagccccggcagcttggcggagaacagcccacactccagaccggcatggatggcctccaccttgggttcatagccgtactgatcggtgaacacctccaccatcagatcccgcagcggagaatccggcagataggcccagccggggtactccccacgggtggaggtctccccgcccagctccgccgtcaggcaggcgatgcgctggagcagcatctgcttctggctctccacgctgctgcgaacgctgctggacagatgcaccgccgtctcgccggtggtgaggatgcccatgttcagggaggtctgcaccagaccggggatgtcggcgctcatgacctgtacgccgttggggtggcacaccagcaggcacaccgcccggcgggtggacactgcgtccataggcagcatggccgtctcggcaggctccaccgttacctctacgtcgggatccgtcacccggtactcctcccgcagggactgcgtcatgcggcggcagacctcggcggtgacctcggcgttggcggaaatcagcgcctgtgcgccggtgggaatggcgttgtccttcagaccgccgcagacctccaccagtcgcagctccgtctcctccgccacagaggccagcacacggcccatcagctgaacgccgttgccccggcccttgtcgatctccgtaccggagtggccgcctaccagcccctgaacggtaatgcgctgcacaggagccgcaaagacctcccgccgcaccggcagcacgcagtccatccgagcgcctccggcgcagctgacggtgaacacgccctcgtcctcagagtcaatgttcagcatccggcgtcccttcaggccggacacgtcaatgcccatggccccgtccatgcccgtctcctcgtccacggtgatgaccgcctcaatggggggatggggcaggctctcgtcgtccagcaccgccagcgccatggccacggcgatgccgtcgtcaccgcccagcgtagtccccttggcatagacaaaatccccgtcgatggccagatccagcccctcacgggtcatgtccttgccacagtccggcgctttctcgcacaccatgtccatgtgaccctgcaaaatcaccggctccgccccctcgtacccggcggaggcgtccttaaagatgatgatgttgttcagcgcatcctgctgataccgcaggcccctctccctggcaaactccgccagccagtcgctgacggccttggtgttgcccgaaccacggggaatagcgctcatctgctcaaaaaagtgaaatacccgtcccggctccagatgctccagaactgccatatacatcgctccttttctctgtatgggatatcgcctttagtataccccctgccgccggatttgacaagagaaaaactgccgggactctcctcccggcagctttcacgctgaagcatccattttttttgctgcgggactcccgcaggcggcacgtctctgcgccgcttggtcggagattgcccctcgccgcctcttattcgtcggcgttgatgtggtacagccccgccacatcctccagcgccaccgagaaggtcacggcctgcgcctcggtatgcgcccccgcttgggccatgatggcctgcatcacggtgttcttgtcgccggtaggcaccaccatgaggatgatctcccgctcctcggcaatggacattccaaagaacttcccggcatcctcggcgccggtgctcttggcgtgcagaatggtgccgccgtgggctcctgcgctgcgggcggcccccatcaccgtgtcggtgtagccctgattggcaatggccacgatcagctgatacgctgcatccttcatgctctcatcctccttcacttccacatccggctccgcctccgggttgccggtaatcaaatagttcatggccgtccgcccgccgatgctgctcaaaggcaggcacatggcaatgccggtgccggggttggtcaggtgcatggtgctgaccaattccttcatcagcacctccttgcacgccggcgtcaccaccgacagcatcacggacttctccgtggcctccagacccagatagctcagcacctcatcgctggcagtcccacggcccagcgccgtaaacaccaccggtgcgccgaaggcccggtaaaaatccacaaatcgcttggagcccatcacccggttggtaatggtgatcatcaaatacagtcgcttcatatgccctcctatgccagctcgatgatctcctccacctgcccaacggccggtacaggagtgcgcttgctgagcttacgctgataactgacgcccagcagctggatggtcaccagcggcgtcatagccaccatggccactacgccgaaggcatccgtcaccacattgccccccagcgcatcgcaggcccccatggcaaagggcagcaggaacgtggccgtcatcggaccggaggccacgccgccggagtcgaaagcgatggaggtaaagatcttcggcaccacaaaggacagcgccagactcagcacatagccggggatcaaaaaccacatgatggagatacccgtcagcacccggatcatggccagcgccagcgacaccgacacgccgatggagagtgccgcattcatggcgctggcgggaatggctccggcggtgatctcctccacctgccggttcagcacatggaccgccggttccgccgacacgatgaagtatccgatgagcatggcaatggggatcagcagccagctgtagctctcatgggcggcgatgctctcccccaggaagctgcccacgggcatgaagcccacgttgacaccggtaaggaacagcaccagcccgatataggtgtacagcaggccaaagagcatactcatgacctcccgccggtgcatccgccgggtgaccagctggaacaggacgaaaaacgccagaatgggcgccagagaaaggaagatctccttgaaatactccggcagcgcatgggtatacgaccggaacatctccgccgtgtccttggcatctggcacgctcaccggggtataggagctgccgtctggctgatacagcaggcccagcagcagcaccgtgatgatggggccgatggaacacagggccaccagaccgaagctgtcgcccccggcgtccttatcgttacgcacagcactgacgcccacgcccagcgccatgataaagggtaccgtcatggggccggtagtgacgccgccggagtcgaaggcgacggcccagaagtccggggacacgaagcccgccagcacgaacacgatggcataaaacccgatcagcagatacgacagctggatggcaaacaggatacgcagcagggcgatcaccagaaaaacccccacacccagcgccacagaccagatgatgacccgatccgggatagacggcacctgccctgccagcacctgcagatccggctccgccacggtgatgatgacgccgatcaaaaagctgatggccacaatgacccacacctttttggacttggtgatctccttacctaccgcctcacccagcgggatcatggacatctctgagcccaaggtgaacaaccccatgcccacgatcagcagcagactccccagcaaaaacgccatcatggcgttgttggagataggggtgatggtaaagcacagcaccagcacaatggcggtgatgggcagcaccgaggtcagcgattccttcaggggcttgcggaaaatggtcagcacctctccggcctcccgccgcttgcgccgcaggcgatcctgctgcgcctgtacgctcaatggcttacgagacaaatatcttcctccttttccaattttctcctgacaaaacgagagcgcacctgtccgtacattgggcagatgcgcctcgcatctctacttacattatcattttatcatgaaaagccccctcagggcaaggggttttccgtaaagaatccgtgaacaaatggcaaggcttactccttgtcagtgtccgccgcatcctgcttcttggctttctcctcccgctccttgcggatatgatccaccagcagcatcacgcccatcagcaggcaggcgatgcccagcaccagatagatggcgccgccccgctccaggatccccaccagcgcaaacagcacgccgaggataaagacgatgaccgtgatctgctgccgcttgcgccggtcccgctggcgcttgatctcctggatctgttcgtcggtgtattccgtgtacttcattccttcttctccttttccgttataactcctcccgtgggccgggccggtagctctcctccatcagcgccaaggtcagccctccggcggacagctccgtcagccgcccctgcagggtctcccgcctctccgacggcagagataccgtcagcgtcacatcagcgccgtagtccatatcgtccagaataccgctcgctgcggcgatctccagcttcacccgctcaaacagcggataggggcagctgagccgcacacgggcccacagtcccatggtggccacgcccgccgccgccaaggcgtcccgtgcgcccttggagtaggcacgggtcagccctccggcccccagcaggataccgccgaaataccgggtcaccacgcacaccgctccggtgacgttctcccgctggaatacgttcagcatgggctgtcccgccgttccctgaggctctccgtcgtcggagtagcgcaccagattcgcccccagcagatagcaccagcagttgtgccgtgcgtcataatacttcttcttcgtctcctggatccgggcctgggcctcctcctccgtctccacccgccacacgtggctgatgaaccgggagcgcttctccacaaactcgctctccgcctcctgaaaggggatacgaaagccgtcagccatggcgcacctcccactcctgcctcgtaatggcctgacacacgccgggatgctccgttccgtcgggccacggcgacggcggcgtgtcgcagacgtgtcggaagccgcacttctcctgcacccgccgggatcgttcattccccggaaaatgggcgcaccacacacgctccgcccccatctcctgaaactgccggcgcagcatcgcctccacagcctccgggatcagtccctgcccccagtaggggcgggcgatccagtagccgatctccggctcacccctcccctccggtatctccgtggggaatacgccgatggcgccgatggggtcgccgttcccgtcctttggcaccacggcaaaggtcccctcctcggacagcaccgtccggatgatgtcccggctgttttccacggaggtgtggggcggccatccggcggcggggcctacctccgggtcgctggcccagcggtacagcgcctcggcatcgctctcctgccacggccgcagcagcagccgttccgtctccatcattcccagtcctccttcggctccgtccagccctcgatatagtccttcagctggcccagcaccttggggggacacaccgccgtcacatcaatgctctcctgataggccacatcctccaccttggcctcccgatagaggctgtccagcatccccgccttgtcatagggcagatggatcaccacccggcgggtacccttgtccagcctccggtcgatggccttcatcagcgccgggatgccctccccggtcttggcggagatggacacggcgtcctcctcatggccccgctccccggagaaggccacgtcgcacttgttgtatacccggatgcaggggatctgatccgccttcagctcgtggatcaggtcctccacaatggcggcctgctgctgccactggggattggacacgtcgatgacgtgcagcagcagatcggcgtactccaactcctccagcgtggccttgaaggcctccaccagctggtggggcagcttgcggataaagcccacggtgtcggagatcaccacatccagcgtatcgctgacggtgagcagccgtgtggtggtgtccagcgtatcaaacagccggttgttagcggggatacccgccccggtgatggcgttgagcagggtggattttccggcattggtgtagcccacaatggccaccaccgggatctcgtttttctgccgccgctggcgctgggtgctgcggacccgccgcacctcctccagctccgccttcagcttgtcgatcttccggtggatgtggcggcggtccgtctccagctgcgtctcgccggggcccttggagccgatggggcccttgccgctggttccggcctgtcgctccagatgagtccacatacccaccagtctcggcagcagatactggtactgggccagctccacctgcaagcacccctccttggtcttggcccgctgggcaaagatgtccaggatcaggccgctgcgatccagcacctgtaccccggtcatctccgtcagcacccggatctgggagggcgagaggtcgttgtcgaagatgaccatggtggcctcttcctcctgcaccatgcgccgtacctcctccaccttgccctctccgatgaagctgtggggatccggcttctccctgctctgcaaaatggtgccgacggcttgccctccggcggtctctaccagagccgccagctccgccagactctcctcgtctgcgttatcctcccgcagcaccggggagcgcagccccaccagcaccgcatagtccctcttgttttccctgttttcttccaaagttctgcgttccatgtacatcctcgcttccggttttcacctaataatatagtatacccggcggcaaaagtaaagaacccgcagccaaaaagctgcgggtcctgtaaaaagtgtctttacttgtccagaccgaagcgcttgttgaacttcgccacacgtccgccggtatccaccagcttctgcttgccggtgaagaaggggtgacacttagagcagacttctacgcgaatatccttcttcgtagaacctgtctcaattacattaccgcaggcgcatttgatagtagtctgctgataattgggatggattccttccttcattgctctggttcacctctttctggtacaatagtcctctttcacaaaggcaactgtgatgataccacatctcatggcaaaatgcaagcactttttgcaaatttacaaatttattgtggcgcccgtggagaaaaagtacaataccttgcggcagaccttctcctccatcacctgctccagcgcctgagcataggcctccagctggggccggtactcctccgcccgctgcggctcctcgccgggagccaaacggtcggtcttgaagtccaccaccacaagcccctcctccgtgcggaaggcgcagtccaccacgccctgaagcatcagctcctctccctccgccgccgggtcgtacagcgccgccggcatcagcagggcaaagcgatactcccgccagacctgccgggcctgccggatctcctgcgccagcggcgtcgccagaaacgcccggatgcgctccatgtccaccgcctccgcctgctggggtgtcagaagccgccgctccgtgagctgccgcacctgctcctccgggtccgggccgcccagctccagatactgcatcaccagatgcatggccgtcccccgctccgcagcagtgagcctgcgctcctgctgcaaaaagaggggtcgctgaaagtccagccgccgtggccgggcggatgccgccccctctgcgatctcctcatccagcaccctgcccttcagctgggtagccgtcaccttggtggggatggtgcaggccgccgtgtggccatagcgcagctccatggcagagagatcataccgccgctcctgtaccgcagcctcctccggggccgcagccgcagacccacattcaaacaccgggttctcccacagccgcacctgccagccgccatcggagagggccggctgctccggctccatgtccgcccactgccgcagcaccgccgcctccggcgtacacagcagcggcagcaggatccagtcccccggcgccttggcgctccccacggcctccggcgccgcaggacagcccgccacactgagcaggccccggacccgattgcgtgcaaagcgcatacagtccacgcagatcagcttctccttggcacgggtcatggccacgtacaggatccgcatctcctccgccagactctcccgtgacagggccagctgaatggcctgcttggagacggtatcgtaccggatacgcctcctccgatccacccgctccgtccccagtcccagccggggatgcaccagcacaggccgctggaaatcgtcccggttgaagcccttctgcagatccgccaggatcaccaccgggaactccaatcccttggacttgtggatggtcatcagctgcacaccgccgctctcctgccttgcgctgatatccggcaggtcgccgctctccatcaagtcatgcagatagctaacaaaatcgaacaggttcccccgtcccgcagccgccagctgcccggcataggcgtacagcgccagcagattgctgcgccgctgcgcaccaccctccatggccccgaacaccgccagcgcctgccagtccgtatacagcttccacagcagccggtccgccgtcagctctccggccactgcccgcagctgcgccagccgctccagaaaggcacggctatcctcaccattgtcggcacacagagcgccgtagtagtctccccccggatgcccgccccggatctgggccagccgatccggtgtaaagcccagtagcggcgaccgcagcaccgccagcagcggcacatcctgccgtggattgtccacgatctgcaaaaacgacaccatcacggcgatctccatggtctcgaagaaggactgctcctcccccccggcgcaggggatatcctcccgctgcagggccgccgtgaaggccttccgccttgccgctggagagcgcatcaggatcacgatatcctccggctgaacaggtcgctgctgcccgtcctccccctgcacggggaagccctcgtccagcagctgccggatgcaatgggccacgaaccgggcctccacctccgtccggtcgaagcgttcctcctcagtatccgccacactgatcagatggaactccgtatccgtgtcgctgcgctccggatagcctgtggccccgtagttcagtcgttcctccggcccgtagtccatctctcccatctgccgggacatgatgctgccaaacacaaagttggcagccgaaagcacctgccgccgggagcggaagttctggctcagcagcacctttcgtggctgcccctcctccgcctcctctgccggtcggtaggccagatatttctccagaaaaatggtggggtccgccagccggaaccgatagatgctctgcttcacatcccccacggtgaacaggttctgtccgtcccgtgaaatagcccggaagatgcagttctgcacctcgttggtgtcctgatactcgtccaccatgatctcccggtatcgcccggacagttgccgccccagcggcgtcggcgcaccgtcgtcaccctgcaaaagccggatggcatagtgctcctgatcgctgaaatccatgcagttgcgccgcaccttctccgcctgataggcggcggtgaaatcctccgtcagccgcaccagcgccagcatggccggggccatggcctccagatcctccagctgctcgctctcgctgaccgccagcagcgcaccgatctcatccagctcgtccttgcaccgcttgcgtaccgcctgcgcctgctccttggccccgtcgcagcccttgacgacgcccatccgccggaaggcgggcttcagccgggccatggcgtcccagccctcctgcgccgccgtctcgtagccctgcagctgctccgccatctccagaaaccggtcgccatagccccggtacagatccggatactgctccatccacgctgccgtctccgtcagcttcctcgcccagaaccgggtccgccgcaggatgctgtccgtcaacacctcccggtaaggccccacggactccggcacctgctgccactgcccccgcagccgctccagccaccgcatggggtaggcgtggctctggatcttcccgtggatgtccagcaccagccgctccagcgcccggtcgtcccgcccggcgcccagcgtctccgccagctgctgggcctgagtatccccccggccgatgcgctggtaaaactcctccaatacctgctccagcacctgcatccgcagcagctccgcctcctgctgatccagcacccggaaatccggggtcaggctcctctgcccctccggcggcagcaggtggatattctcccgcagcaggctcccgcaaaaggcatccaccgttttgatgtccgcctgatacacccgcatcatctggcggcgcaggtgcatattctccggctgccgggccactctctggctcagctctgcggcgatccggccccgcagctccgccgccgccgctttggtgaaggtgatgatgaggaaatcgtcgatgcggcagcgctcccgttccatatagccgaacagccgctccaccagcaccttggtcttgccggagccggcggcggcggacaccagcaggctgccgccccggtcctccatggcccgccgctgctgcggcgtgggctcaaagctccccatgacgtccctcctctcccgtctcatgcgctacaaattcccagaactcgtcgggcttcacccgtttcagcggccgcagccggtcgtcggcctgcccgtcctggaagtgacaggccgatgcaaaatcgcagtaggtgcaggcactctcctgcggcccccgccagcaggggtctgcatcgatgttcccctgccgcagctcacgggtgatctggtgcagcagcttctccacatactgccccagccgccccagctgcgccgccgtagccacgccgccgctgatgccgccgtccttgctcacctgaatgggcaggaagcacggcgcctccagcgcactgtgctccatggcccgcagcacctccggatcccccagcaccatgccgtcccgccgcagctcccgatccatggccctgcggagggcctccggtgaaatgtcccggtcggccttcaggatcagatcccgtgccgggtggtacagcacccccgccggaacgatggggtatccgaagcaggactgtccctccttctccagcgtgaacagatacagcagcatctggatccccagcccgtaccgcacatccgacaggtcaaaggacttgcgccccgtcttatagtccaccacccgcaaatacagtttcccgtcgtggagccagccgtccacccggtccacttttccgctgacggagagggtggcgtccccctcctgaatggtgatggccggcagtgtgccgtcccgtccgccgaagcccagctcaaaggccacgggcttgaaatccgattccgccagctcctccgccatgcggtccacgatgtcctccgccgtggtgcgcagccgcccgaacagatagcggaaccgggcgctcttttcctcgtaacccggtatctcgtcccggatgtaaaggtcaatgtatttacggaccatagcgtgcagctgcggcgttttcaccgccgcccagccgccgctgcctgccacctcacgggcggtgttctccagcagatagtgcagaaacgtcccgatctccggggcctcgaagcccgccgggcgccgctccttggcccgcaggccgtactgcataaagtagccgaagtggcactgccgcacccggtccatccgggatgcggacatccccatccgggtgccgtacagggactgcaccgccgccggggacagccgtccccggcgcagctgtctggcccgctccatggccgccagcgtcccggcgtactcctctctcccggcaaagtaccgccacagagggccgcccatctcctgaccggcctcctccagcgccaccgccggggtcagcagacgcaccgtctcccgttccggcgtcaggcccggaaacagccgttccagccgccgcaccacaaaggagggccgcagctgtccgccgctgtgatccgtcaccggatagctcaccgtcagatgctccgacggctgggccagacaggcatagatgttctgcaattcgttgtccagcgggtcaaaggccgcatccgacagcagaatgtcccgctgctgcaaaacctcccgctcctccggctccagcaggccgtggcccgacggcggctggggcagcacatggtcgttggcccccagcagaaacagccgcttcaccgagtgccggtcgttgcgggtcagctcgctgaccttcacctgatccagcgttgccggaatggtccccacgctgtattgggtcagcaccagccgcagaagccgggcaaattcctcgccggagagctccatctcccccaggatctccgccatctgatccagtacgccgcacaggatcctccacagctggctgtattcctccgccagctgggcctgtccctgccgcagcagttcctctgccgtctccttcaggcgctgcggcacgccggactcctcggcaaatatgtaaagcatctccgctttatccctggccttcggcctatccttcaggccatcgctcaggggcagcagcgtggagcgtaccttctgccttatgcggttgatctccaccagccgctgctgccgctccggggtcatttcctgcccgtagccgtcggggttggccgtccactccgtgtcccgcagccacatattcccccggatgctccacaggatcacatagttctccagcaggtcgcattcctccgccgtgatgcccgccatccccgtcttgagatagcggaacatatcctcccgccggaagccgccggtaacggcatccaccgcccccagcagcatggtcaggggcggctttgccagaatatcgctgcggcggctgatgtacgccgggatgccatcccgctgaaaaacgctctcgatgaccgggccgtatacctccatgctccgggcggtaacggcaatgtcccgccagcggcagaccccggaggccaccagcttccggatctgcgccgccgtccgttccacctcgccgtataccgtgccgcactcccacagcgccacctgctgccggcagtcgtccccctcatagggcatatcctcccccagcaggtgcttctccagatgggccagcggccccttcccggagccggtgagccacacgatctcgcactccgtccccagctgccgggccatccgctccagccgctgccgctgccgcagggcattctgaaacagcgtcccctccgcccggtcgcccagcagcgtcaccgtcacgctctccgcctgacgcatcacctgctccagcacgctctcctccagcttgttcaggtaggagaacccgtccagatacacgtccttgccccggagatagtcgctctccgccagccggtcccgcagcttctggagccgggaccgggcgtccacgccctcggcatggagcttcccgtcataggcggcatacagcagcgccagatcccggagcttgtcgcccatggcgccctccatatcctccacctgctgccacagagcctgcggcgtgatctcataggcgtagaactcctccgtcagatccgtcagctgccgcagaaacgccgcccgctgggagggccgtccgaacaccttcagccggctgtgcagctcctgcagcgccagccgcatggtcagcagctttccgccgccgtccagcgtaaactccgccagaccgccggtccgggccagcacccggctgccgaggctctggaagctcagcacctccgcatcacgggaggccgtaggccccagcgcccggcacagatccacctctgcctcatgggagatatgctccggcaccagcagcacctgcggcctctggctgcgctgccgggccatggtctccagcacccggcgggactttccggcccccgcccgtccgatccatatggaaagcatggcttccctcctttatcttactccgtcacgccggggatatcccccacgccgtccagcaccagccggggccggtacgggaacttcttgatgtccgaccggctggtgatgcccgacagcaccagcaccgtgtcaaggcctgactcgatgcccgccaccatatccgtatccatccggtcaccgatcatggccgcctcctcggagtgtactcccaggatccgcaggcccgtccgcatcatcaggggattaggcttgcccacaaagtacgcattctgtccggtggccatctcgatgggtgcgatcatggcccggcaggcggggatgatgccgtcctccgccggccccgtcagatcgctgttggtgccgatgagcttggcccccttcagcaccagccgaaccgccttgaggatgttctcatagttatacgtattgccctcgccgatgatgacgtagtccgggtccacatcgttcatggtgatgccctcgtcgtgaagggccataatgagccccgccccgccgatgacataggcgctgcaccccggcgcctgactgctgatgaaccgggccgtggccagtgcgctggtataaaagtggctctcgtccacatccagccccatgcggtgcagcttctgctgcagctccttaggggaccgctcggaggagttggtgaggaacaggaaatttttctgctcccgatacagccactccacaaactcctttacccccggcagcagacggttcccgtgatagatcacaccgtccatgtcgcagataaagcccttcttctttctcagttcctccatgattatgctcctttctgaattggcctttttcaacacttatattataccttgccgtgggacataatccaagcacgcttttgtaaaatcctctgttttcccaaattttttcagcatttttttgcagaagtacactttttgcttgcttttccctgaaaatcgggtacaatatgagggcgtctgctctccggcagacaaaaaatcgacttttggaggaacctatgaaaaaaatcgtatctctggcgctggccatgctgctggtgctctctctggccgcctgcggcggcaagaacagcggcaccggcgatgtgtccgatgccctgaccctgctgaacaccgtctgggccacctacagcgaggaggaaaagttccccgtcaccggcggcgactatgaccaccccgtggacgacgctcccggtgccttcgacatctccaacgccgacaacatggactatatgctgggcttccccggcccctccgtggccaatctggtggacgcagcgtccctgatgcacatgatgaacgccaacaccttcacctgcggcgcctaccacctcagcgatgacgtcagcgccgccgacgtggcctcctccctgcgggataatatcatgaaccgccagtggatgtgcggcttccccgacaagctggtggtcctcaccatgggccagttcgtagtctccgtctacggtgccgaggatctggtggataccttccgggataagctccagaactgcttctcctccgccgttgtagtctacgacgagtccatcgcctgatgctcttttccagtattccctttctcttttacttcctgccgccggtgctgctgctctacttcctgacgccggaccgctggaagaatctgactctgctgctgagcagcctcgtgttctacggctggggcgagccacgcttcctgctgttcatgctggccgccattgcacagggctacgcctttgggcggctcatggagcggtatccccgtcataagcggctctttctcattctctcggcagtgctgagtctggggcttctgggctattgcaaatacgccggcttcttcctccgcaccttgggtgcgctgacgggcctttccctgccggctctgcagatcgccctgcccatcggcatcagcttctatacctttcaggtgctcagctacgtcatcgatgtctaccgtggcacggtgccgccccagcggaacctgctgcagctggccacctatgtggccatgttcccccagctcatcgccgggcccatcgtccgctatgcagacattgccccggagctgacccgccgccgccacacgctggcggacgctgccgccggagcacggcgcttcgtggtggggcttgggaaaaaggtcctgatcgccaacgtgctgtatgagttgatgtccgcctttttgcagtccacccagccctcggtgctgtttacatggctctacgctgtggcctgcgccctgcaaatttacttcgacttctccggctacagcgatatggccgtgggcctcggccagatctttggctttcatttcccggaaaacttccgctaccccttcctctccggcagcgtcacggagttctggcggcgctggcatatcagtttgggcagctggttccgggactacgtctatatcccgctggggggcagccgctgctcccgcagccggtggctgctgaacgtgttccttgtttggggcctgacgggcctgtggcacggggcggcgtggaatttcgtgctgtggggcctgtttttcgccgtcctgctggcggcggaaaagctgtggtacggccacgggctggaaaagacccggctcttaaagcacctgtatatgctccccctgctggcggtgagtttcgtgctcttcaatgccgccgacctccccgccgccggtcagcagatcgccgccctctttggcttcggcggcctgcccgccgccggagtggagagcctttactacctccgcagctacgccgtagtattggtcatcgccttgctgggggccacccccctgcccgccaaggcggtgcagcgccttcgggacacctctgccggcagcgccgtgctgtccgttgcggagcctgtggcgctggtactgctgctggcgctctgtacggcgtatctggtggacggctccttcaatcccttcctgtattttcggttttaaggagggctgaccatgaacgaaaaacgcactgccttgctgacggtatgcctgctgggggcctttctgctgaccttctccctctgggcgtacctgaagcccgacgacgccttttcccagagtgagcgccgcaagctgacccagaagccaagctgtacagtaaaaagcatttacagcgggcgctatatgtcggatttcgagacatacgccccggatcaattccccttgcgggagcagttccggaccctgaaatccctgaccagtctctatctactgcgccagcgggacaccaacggcgtatatctggcggagggctatgtctcccgtctggagtaccccatgcaggaggactccatcgcccacgccgcccggcgctttgactacctgtacgacacctatctctccggcacgaactgccggctgtatctgtcggtgatcccggacaagaatgcctttctggcctcctcccacggttatccggcgctggactacggggccttcacccaaagcctgcgggaaaaggccccctacctcacctatctgccgataggcgatctgctgtcgctggaggactactaccgcaccgacctccactggcggcaggagcagctgacggacgtggctgcccgcctgctggaggggatgggggccgaagcccccggcaccttccgggaggagactctgcccaccccctactacggcgtgtactatggctacgccgccctgcccatggagccggacaccatccgctatctcaccaacgacaccttggagagctgcaccgtctaccactacgagaccggccagaccaccggcatctacgatggggagaagggcgccgggcgggacccctacgagtggttcctctccggctccgagtccctgctgacagtggaaaatccccacgctgccacggaacgggagcttgtgatcttccgggactccttcgccagcagtctggccccccttctgatggagcagtatgccaagatcacgctggtggacatccgatacctttccagcacaacgcttggaaagtatcttacctttacagatcaggatgtgctgtttctgtacagcgtccccgtcctgaaccacagcgacaccctgaaatgaccccgtcatccctgacgtggccgcagcatagccctgtctggcagcggtactcttgaccccttgctaaccccgacgcatccacagtatggccctggctggcagcggtatacctgaccgccttcatccctgcaaacatcacgcatccgcagtatggccctccccggcaaacgccggggagggccatgtcagcgtgtcgaaaaagtcttttcgacacgctgaggcatttttcagaccttcaaaaagctctgaaaaatgcggatcatcatcgtgcaggacacccttcccgggtttcccgcacacacccttccgccccgttgacgaaaggtttccgctcttttgacaggctcacatgaccctccccggtgtttaccggagagggtcatgtatcgtatatctcagagctgtacagattcaacattccatatggaatcttctcaccaacccctccgaccggccgccctctccgctcagtgctttcccagccactggcgcaggccctcccaaagctccaccgcccggaaccgcaggacatagccgccgtcctcctcggtgatgagggacagatcctcctcccccaagccacctgagacggccgtctcctgaaagtcgcaggcggcagtggtacacaggggtgggaacaccacgcaccaccagtttttcccggctccctccccgatgaccacccgcagagccagatactccccggagggtaatgcaaagccgtcatactcccgtgtaggaaactccgtctcctccaacctggcgctgacggtgtatcggctgccctgagcggcgatctcctccgccgccgtctgctgcagccggggcagcgcctcggcgagacgctgccgggcctcctccatgtctcccgactggcgcaggatgtcctccgccagcaccagcacccgatcccgcacccgcagcttcagggcctgatccgcttcgctgtcggaattggcgatgacgtggagtcggatgaccttctggtccagcgcatcctgcc

SEQ ID NO: 12381 - DNA, 1991 bp, Unknown
  gut microbiota DNA sequence
ctttgtagagttcgaatgaggaaaaagtgaacatgaggggctgtaaagccttgaaaatgctcactttttgaaaatctcattcctcatttgatagcaaaatgatagcagataccaaagccattttgtttgttcttattttggcgagcgaatggtttgcaggtttgctatcgcatccaatcctatattgagagcgaaaaaggctctgctgactttctgtaaaagaaggtcggcagagccttttgttattcttcgctatgttctttgaggtcggcaaggagcatatcactaagctcctgcgacggcgtgatcttgtgccactgaccggaggtgtcaagctcagggtagcggtagcgccagcggtcgtattcttctttggtgatctcgcccgctttcagcttggcggcagccgcaccccatgcggcaagcatcctgtgaagctccgctgcgtcgcgtcctttatggatatgaacgcgcagatgcacctcatcctcacactcgcagacctcaagaccgtagcggtcttccagcgtgaacagcgtgtgcatcagccccacataggagtcaatgtccggtacatccagcgccttgggcgaaacgtcaagcgcctgtgccagcgcagcggtcacgtccgctttgggcgttctggaaccattctcgtactgcgcaaggcggacatctgcggatttctccgggaaacccagcgccatgccaaggtatttctgcgtcataccccgcatcgtgcggaaaaagtggatgcgttcaccaatcgccataatagccatctcctgtgtcggttgtctttgataacgagtatagcagatatgtttaatttcgtcaagaaaaatctaagcagatttatttaatattttcctgcaaaccgacttgacttaaacttatatgtatagtacaatagttgtaatctaagcatattagcttaattcatagaaattttacaatttaggataccaacaaatgcagaaaaaatgtccgttgtaaggtgagaggggggaattcaaaagccgcaaaactgaatgaccgtccaagggatacttcctccggggaagcacgcgatgagacgagcgtgccaaggagaaaagaaaacggcacagcgccgaaaagggttgcctgtcagagtcctgcggatagaacggcagaagaaatcaaccacaaatcaggaaaggaaggtattttgcctatggcaggagaaatttttatgagagtaaatgaagttgcggaagagcttggcgtatcggttccgtatgcgtataagctcatccgtgagctgaacgaagagctgcgaaagactggctgcatcaccattgcaggcaggatcgaccgcaagttcttccatgagaagttctacggaacgagagaaccgaaggaaagaagggaatcgaatggcagcgtttaaggacaagaagaacggctcatggtatgtgcagtttcgctatactgactggcgcggtgagcgccagcagaaattgaagcgcggttttgcgaccaagaaagaggcgcaggcatgggaacgcgagttcctgatgcagaagcaggctgacatcaatatgagcttcgaaaactttgtagcgctctacgaaaaggacgtcaaacccaagctgaagctcaacacatggctcagcaaggagcatatcatccgcacaaagattctgccgtatttcaaaaagcgcaagctctcggaaatcaccgcccgtgatgtgatcgactggcagaacgagatacggcagcgcaccaagtcaagcggcgaaagctattccccggactatctcaagaacgttcatacccaactgagctgtattttcaaccacgccatcaagtattacggcttgcagatcaatcccgctgcaaaggccggaaatatgggcagcgagcagacgaaggaaatgctgttttggacgaaggaagaatacctcaaattcatcgacgccatgatggacaaacccatgctgtactacgcctttgaaatcctgtactgg

SEQ ID NO: 12382 - DNA, 725 bp, Unknown
  gut microbiota DNA sequence
gtacatttgatacaccagctttgggaaatgcccaacccctatatccagataccattgactatgccccgctggaaaacaatgcggaatttttgatctatgagggagccaatgccgttggcaagggccgggtgctgggccgaaccgttccctataaagtgaaacaacaacgaaagtaggtgccttatgtaccaaattgcatatattggccgctgggagaccctcccggaaacggctaccgccatctgtgaccatgatactcccaagctggaagcaatgctccaaggcggtctggatttagatgttcccatccagctcagcgaatatatcaagctgatgccgctggagatcgcggtttttcggaatgatgtgcccatgatccacttcctgctggagcatggagctgatcccggtctggcagaggaacagcccctgctgctcactgccgcccgctgttgtgggccggaggtggtggcgctctttgctggacaggccgcaaaactcagcccgaagcagaaagagcgggccttccaggaagtgcgctggggcaatcgtccggagaatatcccggtgctggagcaagccgggatcacagtgaacaagtttggcggcgaggcattccgggccgctgtgtctgagggcaataccaaacttgcccagctgcttctggaaaaaggggcagacatcaattaccacaagccggacatggtgtttccgaacgcctctac

SEQ ID NO: 12383 - DNA, 1152 bp, Unknown
  gut microbiota DNA sequence
ttctttatcgcacatcagtaaagaccgccgggatgtcttacggagacatcccggcggtctttttgtatgtccgtctattccgccactaccggcgcatccagccagtagatgacgtagcactcctgcatttcccccatgaagaagaaaatgttctcccccatctggatatgctccccgaaggccagatccggcacgaacagacgaccgctggtgcggccatgccccttgatggtgaagccctccggtgtgggatgcttccgcagctcgttggcggcctcctccagccccggaaagtgcagcgtccgctccaactccgccagctgcgtggccccattgatgtacaccagattgttttcatccttgaaccagttgatacgcatacggacctcctaagatgtagtagttccagtataccacagctttttccgcttgtcagcaaaaattcccgtcatgggccgtgggcttctgttcccctgcgttctgccatgggaaaaattcacaaaaaatggtaaaaagccattgaaatttttatcgttcgattatataatcaaagagaaatcaggcagagatgctccgcaaagacgaaaggaagcgtatgaaaaatgctgacggacaaggagctggccgctgtgccggaggagctcctggaggatctgctgcgctactcggaatacggctggcgggagagacgcattgccacgctgctggcccgccgctatccggtggcgctgacggaggcggacgtgcggaagctgcgccgtctggggcagaagaagctgcgccaagcctgaatcggcagagggaggccccgcagggcctccttctgctgcggatgtatagctgctgaacaggccccccggagggggcggctgggccgcctcctccggggggtttgcgtatggcctgcgttacaggttcttctcgtaggactcgatcatcttcttgaccatctggccgcccacggaaccggcctcacgggaggtcaggtggccgttgtagccctccttcaggttcacgcccacctcttgcggtgtgtattcacctcaaagaatcggcttttttcactacttaaaaatgcaaagtgcaaaaaagaggcgaaatacgagataaaacggatatttggtcggaatcactcatttacattggtcagat

SEQ ID NO: 12384 - DNA, 1112 bp, Unknown
  gut microbiota DNA sequence
agaagtataggcaacatctgtatcctgcgccagataggtttccatctcctgctggtactgttcctctacatcaaataaaaaaccgtacaaggtaggagtttcataaatctccttgaatttgttttcagccataaaaattcttggaccttctattatttgtgcgatatttgaaccgccgccagtcacagtcacatctccatcagtagctgcggcttttgcaataatggtaaactccttggttggagttccattttcataaaattgaatggtatctccaactgataatccaaaataaaaagcggactctgccccagcaaagttaccatgatcgtcatattcgcccattaaaattacattgttgccattccaaagtttgttttttaagacagataaatcagtttcaccttcgataatgtccagccgatcaaagaagttttccgaaaagccaaatacatttccgagggggtggttatccgcagtcaacccaacagtatgcccaccattttctgatcggtaaacacctaaattgaggtgttccggcagcattcgctgctccttatttgtgttatcaaccacatagggagttccccagtcacaagagatatggtcatcttcaaaagtgttccggtacagataggcttcgtttgtgactccgggctgttccttgatttcctccactgccttctctggaacagcactgtcatgcccaaagttatctccccatgcagcttgaatgactggactatatactctaaaatcacttcgggtctggttttcgatatagacatcttcgtcaaagctgctgctgaagataaacaccgagttcaagaagacaatgctcaaagtcagggaaatcacaataaagactgtccggcgcttattgcgctgaagatttgccttcgccaggcggggaataactgacccggaagctgtcttttttcgctttatggaaaccgtatcctgttctacatagcggatagcctcgataggtgacacacgggaagctttcttcacagactttctggtactgatataaaccgtaagcccggagaacagaatcgcacctacgataatacccaaatatggaagtgtgctgacctcaatgtttttac

SEQ ID NO: 12385 - DNA, 306 bp, Unknown
  gut microbiota DNA sequence
gaaataggaggagaaagactatgatgactgagaaatatcccacctggctcatcggccatgtgaaagaatgggcggagaagcgtttgcccaccgtgatactttgttccaccaccggcaatgaactgctggaggtttggtattacggagatctgctcacggtgaaaggagaaccccaatcctatatcatagatagcgacgaggcccccggactggtgacagcccgtgacccggagagcggcgaggagttcgtcatctttgacggtggacggcatggctacgacaatatgttctgcgatgaacatgatc

SEQ ID NO: 12386 - DNA, 327 bp, Unknown
  gut microbiota DNA sequence
gagttcgtcatctttgacggtggacggcatggctacgacaatatgttctgcgatgaacatgatccatccgagctggagcaccgccccctcaagcggtatgagatccccgcctccaagttggtgctggagctggggtacagcgtggactatgaggacgaaaaagagaactttgaaccggatgaggcggataccgtggaactgatcaacggtgaacggatgccgtgggagcaggccaagcgagacggcatcgactatatcgccctttactatgtgaacgagaaaggaaaaccagtccagatcctggacgcagagctggcctgagtatac

SEQ ID NO: 12387 - DNA, 28990 bp, Unknown
  gut microbiota DNA sequence
gcttgcttccttaccgtacatgagcatttcttcacagcttctcctgtggcagctccagcagcacggaggcgcagaacattccgtctctcggctccagtcggcacacgccgtggtacttctcagcgatgctgcggacggaggccgtccccagccccagtccggcgtgcttggtggagaggaatccaccggtggtgcggcgcactgcgccggtgaaagtgttgtccacggcggcgcagagggtgtgggcatcggcggtaatgcggaccacaatgcggggcgatgcctcctgcatacaggcggtgagggcgttttcaagcagattgccgaacagcaccgccagatccgggtcagcgacgccggtatactccggcagctgggccttcacggagaactccacctgctgggccgccgcctgctgggcaaagtaggacagtacggcattgacggcggcattgccgcagaattgcagctgccgggcgtcgggcagcgtctcctgataccgatccagatacgcctgcatggcgtcgtagtccttccgccggaggcaatcctgcagcagcgcgatgtggtggcgcacatcgtgcttggcctgccgggcctcggcaatacgttcctgcaggttctcgtattgcaggctctgcatggccagcgcatagttcttctgctgcagggcaaccagcttctcctgctccagcaccagtcgggccaccacatagtacaccagcgctgccccggtgttgatgaaaagcagcacgatggtgctgctgggccgcagggcgatctccagccccgtcaggttggtgttgccgtaaatgacgtagtaccagataagatagaaggtggcggggatgagccacagatagcgccatgccagccccgatgtctcctgctccacggcgggagtatagaccttccggacatacagcagcagcggcaggaacagcaccgcctccaccgccagcatcatcagggcgaaggaccagcggtaggactgcaccgccagcgccgggaacagctgtccctccaggcacttggcggcaatcaccaccagattggccagattagagatcatcagcagggtaaacagcgtcttgccgggataggcccgcaccgccagaaagtagaacacggcgtacagccccgtgctgacgacgctgagaaggctggcccgccccggcgtgaagaaggcagcgcacaggcccagtcccatttgcagcagcgtcagcactgccaccagcgccgccgccaccgccggagaaaaccgcagtctccgccggaagggatagagggccatggccagaaagggcaggaagttcgtcagcgaataaacgcagacctccagcatccgatacagcggcggcatcagtcgacaccgtcctttcgcagccggtcaaagcggaaggcggagtatgcctcctgcacctcccgtaacctccggcggctgatgggcagacgggtgccgtccttcagcaggaacacgtcctcctgccggccagccacctcgtggaagtttaccaccacgccccggcagatgccgcagaagcacggataggcacacagcagcggctccacagcagcaaaggaggtccgcagggtacggtccccatccttgcagtgcagcgtcacccggtggccgtcggaggcggcgtagcggatgctccgcagcaccacctgactgccgtccggcagccgcagccggcgggagcgctccagcgcctccagatccagccgctccagcatggcccggactccctccggccggaagggctttcgcagatagtagcaggcccccacctcatagctctcgctggcgaagtcgttgctggaggtggcgaaggccagccgcacctgtccgtcatcggcccgcagccgccgggccacctccatgcctgtggcgccgcccatgtagatatccagcaccaccagctcaaaggcgccgggccgccagtccgccagcagcgcttccccactgccgtagtgggagatctccgtctcccggcccagctgctcggtgagatactgctccagctgcgccagagccctgggatcatcatccaccagtgcgatcttcataggcagtgctcctctctgcatgatactgtctccatcatactccgtaccgagcgaaaaaacaagaaaaatgatataccctgcccaaagctgaaaatttttctgaaaccctctcgctttttgcattgggatgtggtatgataccgaacgtatggtacatatcacaacaggaggccatgttacatggacattttcgatattttaggcccggtgatggtgggtccctccagctcccacaccgccggagcggcccgcatcggcaagatggcccgtacactgctgggcggtgagccgatggaggccagaattcacctccacggctcctttgccgagaccggctccggccacggcaccgatcgggcgctggtggcgggtctgctgggcatgaaccccgacgatatgcggatccccttcgcctttcaggaggcggagaaggcgggtctgcacttcaccgtggataagatcgacctgcgggacgcccaccccaacacggcggtcatcgaggtccgggacgcccacggcaagcagctggagctgcaggccgcctccatcggcggcggccgcatcgtggtgaataagctggacggcattgacgtcagcttcaccggagactacaacacgctggtggtccgcaaccacgatgaaaacggtgctctggccgccgtcaccaccatcctcagccagctgcggatcaacgtggccaatatgagcctgtgccgccacaagcggggcggtgacgccctgatggtcatcgagacggatcagcacatcaagccccatcaggtgagctttctggcggagctgccgggcatcctgtcggtgacctactatgataaggaggatgaggaccatgtctcttgattcgatggcggatatcctgcactgcatggagcaggagggcaaggagttctgggaggtggtgctggcagcggacatggaggagcggcaggtgagccgggagtcctctctggccaagatgctcaccacatggcaggccatggtagacgcctccgacagctataccggcgaccgccgcagcgtcagcgggctggtggggggcgacggtctgaaaatgcggcagtacgccatccggggcaaggccatgtccggcggctacgtcagtgaggtcatcgcagaggccctcagcatggcggagtccaacgcctgtatgcgccgcatcgtggcggcccccacggcaggagcctgcggcgtgctgccggccgtgctgctgcccctgtgcaagtatgaggagctgaaccagcgccagatcttagaggcactgtatgtagccagcggtatcggcgccgtcatcgcctatcgggcctgcatcgccggtgctgccggcggctgtcaggcggagatcggcaccgccagtgccatggcggcgggggctttggtggccctccggggcggcagcggccagcagatctgccacgctgtggccatggccctgaagaatctgctgggcctgatctgcgacccggtggcaggtctggtggaggtcccctgcgtcaagcgcaatgtcgtcggcgccgtcaacgccgtcagtgcggcggatatggcgctggcgggcatcgagagccgcatccccgtggacgaggtcatcgacaccatgggcgaggtgggccgccgcatccccgtggagttccgggagacggcgctgggcggtctggcggacacccccaccggcaaggccatcgaggcaaaaatgcggggctgatgtctcgacatgatgaaaaagacgaccgtggtacgatgtaccacggtcgtctttttcatactttatgcaatttttcaccttttcagccgcttatcgctgcggcgggccagccacgtacccagactctggaacaactgcaccagcaggatcaggatcaccaccgccaccagcatcaccagatacttgtagcgatagtagccgtagtcgatggcgatcttacccagaccgccgccgccgatgataccgctcatggcggagtaacccagaatggtagtcagggcaatggtgacgttctggatcagggacggcacgctctccgggatcatcaccttgcagatgatctgcaggggtgtagcacccatgctctgggccgcctcgatgatgttggggtccacctcacggagactgctctccaccagacgggccacaaaggggaaggccgccaccaccagcggaacgatggtggctgtggtacctaccgccgtgccgatgatgagccgggacagggggaacaccatgatcatcagaatcaggaaaggaaccgagcgcaggaggttgatgatgacattgagtacctgcagcaaccagcggggcagcggcagcacgccgttcttctcccccgccaccagcagaacgcccagcggcagccccagcaccagcgacaacagggtgctgagcaccgtcacatagaatgtctcccaaatggcgtagggcaggctgggcagcaccgccatcagatcctgcacggagcttgccgaaaacagatcactgtacatggccgtctacctcctctacccgaatgttgctcatggtaccgatataatccatggcccgctggaactggccgctggggatgcccagcagcatactgccgtagacctcctccgacagcttctgggtggaggcggagatcaccgtgcagaggatgccctcctcggaggccagtctcgccaccagcggcgtgccggtggtgacgctgtcccggaaggtcagccgcacccggcgcaccgcctgcgggtcggacaccagcgcatcggcgccgccggggaacaccagccgccgtcctgcggcggacttgggagcggcgaacacctcggacacaagtcccttctccgccacctcgccgccgtccagaatggccacatggttgcagatggtcttgaccacgctcatctgatgggtaatgaccaccacggtgatgcccagcttctgattgatatcccggatcagctccaaaatctgatgggtggtgttggggtccagagcgctggtggcctcgtcgcacagcagcaccttgggctgggtagccagcgcacgggcaatggcgatgcgctgctgctggccaccggacagctgcgccgggtaggcctgtgccttatccggcaggcccaccagctccagcagctccttggcccggcgaacggcatccgccttcttcaccccggacagctccatggggaagcatacattttgcaggcaggtgcgctgcatcagcagattaaaccgctggaagatcatggtgatctcccgacgggccgcccgcagctgagccggagtcatggtgtccagccgctggccgttcaccaccacctcgcccgccgtgggtctttccagcagattgatacaccgcaccagcgtgctcttaccggcaccgctcatgccgatgatgccgtagatgtccccgtcctcaatggtcagggagacgtccttcaacgcatctacccctccagaatcggagtcaaaggtcttgctgacgtgttttaattcgatcacggacgtctcccctcctctctcttacttaccgctgatggcgtccagcgtggtctgcttgccgccgtacaggcccatgggctccacatggatgccgcccacggacacgatgtgggtgttgttctgagcgttgaagtcctccagatagggcaggtgctggaagtagttggcggtgacggtgccgtcatccaccacggtattgggtaccacatagtcgttgtagacctgaatgtccagcgtcacgcccttggctgccaggatctgctttgcgacctccagaatttcggcgtggggcgtgggggaggcggcgacggagatggtggtgccgttcagagcatcatagttcacagaggcatcatagccatcggtgggattggtgaccacggacaccacagaaccgtcatacttctcgttgatatagtccaccacctgctggctctccagagcagccttcagtgccttaacagcatcggtgttctcagcgccctccttcacagccagaatgttggcataggcggaggcggagccctcgatgattagggaatccttcacggggttcagaccggcgttgatggcgtagttgctgttgatgacggcgtactcggcatccgccagcagggagggcagctgagcagcctcggcctccacgatctccacatggtagggattatccacaatgtcgttcttggtggcggtgatgccagcgccgtccttcagggtgatgatgccgttctcctgcagcagtagcagcgcacgggcttcgttggtggtgtcgttggggaccagaattttcacgccgctgtcggactttttgccgcaggcggccagactcagaaccagtaccagcgccaaagccagcgtggcgatctttgcaaatacggaatgtttcatgatgatttctccttaatcttctctcttgaatagttgattattgtatggggacagtccggcggcccctctcgcctgtgtgattcataacagataccgtgtccagaggacacattcgctgggtcagcaggatcaaagggatcagctccttttcggcaaaataaaaacagcgggaggtcatgcgaccttccgctgttcgttagcttggttcacccggtgacgggtcacagaacagatgccggaaagcagacgaccgaattggcgcagcgacgcatgcacatggagcccatgcacatccccagcatcatcatgttggtacgcagcttcttcatggtgccgtccgtcctttcctcaagcattcttgggatggtggcattgtacccctcccatcccctcttgtcaagtcttttctgggatttccccgattgttccaaaattcccgaagcatttcctccggatttcgtctaaatccccattatctgcccttgggcagcaccgcacggatcaccagcggctcttcgccggtgttgcggacgctgtggctgtggccttggggacagtagtgccacataccgggagtcagggtcacctccgtgccgtcgtcatggcacagccccgtgccggagacgatgcacatcacctcgcagttgtcggtgtgggtgtgggggccgatgctgccacccaccggcaccgtcagctgcaaaatgcggcccatgtcatcgtcataggcccggacggacaccacaccgtccccgcccttgaagccggacaccagctgctccggcagacgatcaaaggaaacgatcatgcccgctcacctcagttcaggaaatccttcagcttcttgctgcgggaggggtgacggagcttccgcagagccttggcctcgatctggcggatgcgctcacgggtgacgttgaactccttgcccacctcctccagcgtgcgggtgcgtccgtcctcaatgccgaagcgcagcttcagcaccttctcctcacggggcgtcagggtgctgagcacgtccaccagctgctccttcagcagggtgaagctggcggcctcgctgggctcggacaccccctcgtcggggatgaaatctcccagatgggaatcctcctcctcgccgatgggcgtctccagcgacaccggctcctgtgcgatcttcagaatttcccgcaccttgtccacgggcatccccatctcctcggagatctcctccggggaggggtcgtggcccagctcctgcatcagctgccgggatacccggatgaccttgttgatggtctccaccatatggacggggatgcggatggtgcgggcctgatcggcaatggcccggctgatggcctgccggatccaccacgtggcgtaggtggagaacttatagcccttggtatagtcgaacttctccacggccttgatcaggcccagattgccctcctggatcagatccagaaacagcatcccacggcccacataccgcttggcgatagacaccaccagacgcaggttggcctctgccagcttctgcttggccttctccccctgcttcacgtcctttttcagggcggccagctcctcctccgggatgacctcgccctccttctccgctgccgccatacgctccttggcggcattgccggcggacatggccgtagccagatgaatttcctcatccgccgtcagcagcggcaccttgccgatctccttcagatacatccgcacagggtcgtcgatgttgaagctgtccaccagcgtgttggggtccaccagctcctcttcctcgatctcggcgatctcctccaaaggcggctccccgtcatcgggcaggtccgtcaggaactcatcgctgcccacctcgatgcccagatccgccagcgaatcgtagatgcggtccatctggtcgccgtccagatccatggtatccaccacgtccgacagctcgccgggatccagcttcccggtcttgcagcccttggccagcagatccttcaatttctcgtttgcggtgatgagggtcgccgccggaagggcggcaatggtcttatcgtccagcttcttgcgggatttggagtcctcttcctcccgcttggcggcatcctccgccaaaagctggtcggccatggcctccagatcctgctgctccagctgctgattcaacttctcactcatgcttgctttcctccgtaaccctttttttctttatacttctcctgagccgccagaaggggatcgccctgtgcgttccgcttctgcgcctcctcccggatgatgcgtatataatccgccagcgcccgctgggccgaggccgtggcctccggcttctgcaatacgccggtgagatgactcatttcctcgccggacagctctccgctgagtccggccacactgaggggccgtccctcctgccgcagctgccacaggcggtcaaacacccggcccagcagcggcgaggaaaactcctcctgccgcaggggcgcctcctccggaaagacgctctcgtccttcagcagcaggcgcagcaccccttcctccgccatggcgctccgcacgttcgtgtagcggatgcctcgctcctggggctgtaccgacacggcgggattcagctcccggcgccggagggccttgcgctccttgcccagctttcgccgcagggtacgctccacctccagacgcatggcctcaggcgtcaggcccgccgcctgagcggcacgggtggtgtatacctcccgctccacagcgttctccagcttggccagctcctcgctgacctcctgtgcataggcgatgcgctgggtgtcatccgtcaggtcgtacttcccggcgatctgatccagtcggaactccacgccattttcgctgccggtcaaaagacgctcgaaggccgccggcccttgaagcttgatgaagtcgtcggcatcctgcttgatgtactccccgtccaccagccgccggggcagctgcaggaccttcacggaaaactcggagttgttcagcagctccagcgcccggcgggtggcctgctgtccggcgttgtcgttgtcgtagcacagcaccagctccttggtgtagcggctcagcagccgcagctgctcctgggtcagcgccgtacccatggaggccacggcgttgtcaaagcccgcctgatgcagcgtcaccacgtccagattgccctcacagaggatgatattggaccgcttggacttcttagccagattcatgccgtacagaatacggcgcttgctgtatgtaagtgtttccggggtgttcatatacttgggctcggacttgtccagcacacggctgccgaagcccaccacgtcgccccgcacatcgatcaccggcaacatcagccggttacggaacttatcatacagtcgcccgttcttcccgttcaccgccagaccggcggagatcagctcctgcttggtgtagcccttgtgggtcatggccgtcagcagagcatcccagctgtccggggccgcccccataccgaaccgcacggcaatgccacggcggatgcggcgcttgtccagatatgcctgcaccgccgccccctcctgagactggagcacactgtaatagtaccgggcggcatcccggttcagcgccagcatccggctgcggagcttttccgttccgtcgctgctctcctccggtaccgggaggttggcccgcttggccagaaatcggatggcatccggataggtcagtccctccatctccatgacgaagttcacgacgccgccgcccttcttgcagccgaagcagtggtaaaactgcttgtccggcagcacatggaaggagggagtcttttcgttgtggaaggggcagcagccccagtagctgccgcccttgggcgtcagcgagacgtagctgcccacgatatccacaatgtcgctacgggccagcagttcgtccagaaaattctggggaaacggcattcgacctccccctctctgctgaattttcccccggcacggtgcgccggagggtcgtgcgttctccggcccagaccgtcggaaaaacgacttctaatttcttatacccattcgggtggtgatttcctctttttctgcggaaatttttgaaaaaatctcactacgcagcagcacggcggaggcggacgccgcagcgtccgcctccgtttctgttcaaaatcacttactcgtaccacacattcatatccacgctggcggcccgtccatcccatgtggtgatgcccggcacccgaccgttgtcggtgtactgccacatatcgtggctgcggggatagccggtggaatcggcatagctggccatccagatgtagttatccccctccagctggcctatgtgcatccgatccagcaggtagtagtagctggcatagatgcctgccttgtacccggcacctcgtaccgtgtcgcagaaggcccgtgccacgctggtgcgctgcgtcacggacaagttgttggcccgtccgccggagccgtcatccggatcccaaacatcctccagatcgataaagatgggcatatccacctgatagccctgcacgtactgcacgcacatactggcctcctcaatggcctccttctcattgacggcctgactgaagaagtaaacacccacctgcaagcctgccgcacgggcgccctcgatgttcttgcggaaggagctatccagcaccagacgtccggtgccgtagcctcggaagcccagccgcaggatcacataggacacgccggaggccctcaccttctgccagtccacattggcctgccactcggacacatcgatgccgatgcggcccatcagcgctccgccgggggtgaaccggtaggcggtgccgtcaatgacctgcgtgccggtgacacgctcaccggcggcgttataatagtacttcacaccgtcctccgtctgccagccccgcttcaccggtgtgggctccggcgtcggctccgggtccggatcgggggtgggcttcgggtctggggtgggttccggctccggggtgggttccggctccggatccggggtgtcgatggagggcggcagctcctcgctggagccgctgccggcatcgtccggcttcttgtcgccgtactgtccgtcctcggtgcgggagtccacctcgtcggaggagaccacctgatccgacacgtcgatgacctctcgcttcatgggttccaccgtcaccacggtgtcctccggcatcagaaagcccgccagcgtccgcaggtgggccgtatagtccccctccggcatggcctccgtggtgatgacgccgtccagatcccagtccttacagaccgttttctgcccgtcgccgtctatcagctccaccacgaacagcgctccccgcactggctcctccgtgtccgctgccaggacccgcagcaccagctgctcctcctgagtctggctctccagatgcaccggcaccagcgccgtgtccgtaccgaagctcaccggcttggcctgtccccggctctccgccgcagccacatactgcggagcctccgccagttgccacaggcccagcgccgtggcggccaccagcaccgccatcacgccgcacaatatccgtacatactttcccatgggtgctcctccctatctgaccaccgcatatccaccgggacaccgacaaaatgccgaccatgccccatttttcttatgataacatcatcatatcccatttattgcattatgtcaacggggaagttcaccgtctgtggaaaaaatcagcgccggaagggtacatggtgttcccgtccggcgcacaatttcgttgtcaaagctccaccaccagcggcacatggccggtgtggggcaggaatttctccagcacgtcctctgtccgcagccgcagggagctggtattgcggcagggatggcagccgaaccaccggctttccgccaccgcccgatccagcaccagcgtcacccgatgctccgtgtcgttcagcagtcccagcaccgacgccgagcccggctgcacacccagcagctgctccagatcctccgccgtggcaaagctcagccgggaggagccgatctgcttggacaggtccttggtcacaaagggcttgtcccccggcatggccagcaggtaaaaagccgaccggttccggggcgtcagcagcagattcttgcagatgtccgcccccagcgcctgagagatgacggcgcagtccgccatgtcctccgccggatcgtgatccacccggtcaaaggggatgcccagttcctccagcgccgcataggtgcggtcctccaccggcgtccggctctctgccggggcgccgtgatacacaagcgatacgttcatgctctcacgctctttccagcagcttttccccggcccggaaaatgtctccggcccccaccgtcaggatcagatcgccgggctgggccaaagaggccagcgtatccgtcaccttctccagactggagcagtagatggcgccggggatctcccgtgccagatcctgcgaggagatgccgatgtcgttctgctcccgtgcggcgtaaatttccgccagcaccgtcacatccggcagcttcagctcctccacgaactgggaaaacagcgccttggtgcgagagtaggtgtggggctggaaggcacagatgacccgctgatagcccatggtgcgggcggtggtcagcagagcatggagctcaccgggatggtgggcgtagtcgtcgtagacctccgccccgtgatatgtccccttgtgctccatgcggcggcctgcgccgtggaaggtctccagcccacgggataccgcctcgccgggcagacccagcacatacgctgccgacgccgctgccagcgtgttgaggatgttgtgcttaccggggatcttcagctccacatgggcatagacctccccgtggatcaccacgtcaaacaccgggcagccgtcgaagaaggacacgttgtccgccacgcagtccgccgtccgatcctgtacggcgaaggtgaacaccgggtgctgcagtcccttcacagagtcccgtgcgccggcgtcgtcggcattggagatgatgtagccccgctggggtaccagatcggcaaaggcatggaaggagtgctcgatatccgccagatccttgaaaaagtccagatgatcctcctccacgttaaggatcaccgccaccgtggggaagaagttcaggaaggagttgcagtactcgcaggactccagaatgatggtgtccccctgccccacccgatagccggagtgcagcagcggcagcgtaccgccgatcatcaccgtggggtcggccccggcctccatgaagatgtgggttgccatggaggtggtggtggtcttgccgtgggtaccggaaaagcacacggcatttgcgtatttctgcatgatggcgccccaggcctgcgcccgctcatatacggggatgccccgtgcgatggccccggagatctccggattctcgtcgtggatggcggcggtgcggatcaccagatcgcagtcctttagattctccgccgagtggccgatggccacgtcgatgcccagtgagcgcaggtgccgtacggtatcgctctcggacatatccgagccctgcaccgtcagtcccatgccccgcagcacctccgccagcggacacatggacacgccgccgatgcccgccagatggacccggacaccgggcttgagatacgtatggatatccacagtgggatggatcatattcagattcctccttcatttcccgccgaaaacctgcttttcggcaagcgcttgcggagctgtatgctgcgccccgtcattataatacgccgctgcggcggatgcaagccccttactccctccggcgcagcaggctcttccagtccagctccatcaccagcaggctcaccatcatcagcgccgccccgatgtagccccgcagctgcaaaacctcatgggcaaagaaatacgccacgatggcagagaacaccggctccagcgtgaagatcagccccacatggctggcggaggtgtactgctgctgcaccgtctggatgacgaagcccacgccggagcagaacacccccagaaacagggccgctccccacacggcaggggtctgtggcaggcagggcttctccagcaggaaggccagtcccagcatcacgaagcccaccacccccagctgcaaaatgcccagctgcagggcgttgacctgcggatcgtggaccgcccggtccgtcagcaccagatccccggcgtaggctacggcgcatagcaggcagatgatatctcccagcgccgggcgcagcgccccgttgagggtcatgagccccatgcccacggtacacagcaccagcgccaccgccagccgccgatccggccgcttccgcagaaacagccactccagcagcggcgtcaccaccaccggcagagcgcagataaagcctgcgttggagagagaggtatacagcacaccataggtgcagccgatgtacgtcagcaccaggcacagcccgatggggatgctggcaagcagcgtccgccgggagatgccccgcagcttccggaagaagatggcccccagcacgaaaaacgccgtcaaaaaacgaaaggcgttcagggtcagcggcggcagctccgtcaggcacaggtccagcaggtagtaggacactccccagaatccggtggccagtaccagcaacagatccgctttacgctgcctgctcatatctcatccctcccgtacagcatatcgcttacgggacattatatcacaccttttccccagtgaaaagcactatttccatagccgcagccacccgctgtcatggagctgcttgacaaacagcagcgccatgggacacagcaccatcccagccacgccgaaggcgcagaagcccacatacatggccgccagcgccgccagcggcggcaggtccacctgcgccgccatgatcttaggctccagcacgctccgcaccagcgagatgacgccgtacagggccagcagccccagccccttggggacgttccctgtcagcaggcacagcgccccccacggcaccagcaccgtccccgtgccgaacaccggcagggcgtcgatgacggcgatcagtgccgccagcaacagggcatatccctgccgcagcaggagaaatcccgtcagcagttcacagaaggtgacccccagcaggatgcactgggccttgcaccactttcccaaggtggccagcaggtccgccttgacgcccctggcctgccgcagcctgtcctccggcagctgccgccggaggaacgcccggatacggggatagcttccggcggtgaacagcaccgccagcagcgtggtagcgcagaacagcaccgcctgcggcagcgccgccgctgccgccgtcaccgcccgcaggcaccgctggcccatgctctccagcagctccgccagctgagccgacagcccatccagcagagcctccagccagctccgcagtccctccgggcaggcagcgcacagctgctgcgccctgccccgtaccagctccgtccaccggggcagagcctccagataccccggcagccgacccgacagctcacagacctgccgcagcagcaccatggccagcagcaccagtcccgccgccaccgttcccagcaccaccaagctcagcaccgtggccgtaaagcctcgccgcaggtgcagccttctccggcacagtaccaccgccggctccagcagcgccgccagcgccagtgcaatgaggaacggcagcagccacaccagcacataccgcaccatcagccatataagcgccagccagaccgccccgtaggcgcaccggatgagaaacgtcagctttggatcccgcaaaaccgtcccctctttcttataaaaacagttgtattttctccaaatacatggtatgatgcagaggagagaaatcccgcccgtccccggaccggcaaaaggagtgtaagatcatggcaaatgaaaagttttacatcgtagcggcggacgccctgccggaggtattcctgcgggtggcggaggcccggcggatgcttcaggtaggcgaggccgacaccgtgggcgaggccgcctgcaaggccggcatcagccgcagcgccttctataaatataaggatgcggtgcagcccttccagaacatgaaggccgggcgcatcatcaccttctatactctcttgaaggatacgccgggtgtactgtccaacatactgtctatttttgccaattccggggcaaatatactgaccatcaaccagaccattcccaccaacggctgcgccggtgtcaccgtcaccgccgagaccagcgagatgcacgagtcgctggaggagatgatgaccgagatcaccgccgccgagggcgtgctgaagtttgaaattctggccgcctgaccccttccatatcaaagaaccgtcccctgtgctgtctttgcacaggggacggttttttgcagcggatggatcactgccgctgcttcgtctctctaccgtaggcccgacggcttttcatcagcagagcagcctgaaggtagggacggtacccctgctccgcaccctctgcaggcccggcggttatgcggctcattgaaaaaactccttcgcagctaaatgcgacttgatggctcgatatagcacagctttcgggaaatttcaacagccccgccgccacaaaagagggagaggcagcgcctctccctctcaagccccgccccatgcagaccgcaggaggcggatactctgttttccttatcctatgtgcccctcatgcccgcttcttcttgcgctgcagctgcagccggtcagcgatcatggcgatgaactccgaattggttggcttgcccttggcggaattcaccgtgtatccaaagtacttttgcagggtttccaggtcgccccgatcccatgctacctcaatggcgtggcgaatggcccgctccacccggctgggagtggtggaaaagcgccgtgccacctccgggtacagtaccttggtgacggcgttgatgacgtccatgtcgtccaccgccagcaaaatggcctcccgcagatactgatagcccttgatatgggccggtacgccgatctcatgaatgatggccgttaccatcccctctaaagccggggagtggtagggctcctcttgttccggatgtaccgcctgccgcatcagctccagcagagactcctcgttgacgggcttgggcaagaagaaatacacgcccagttccaccgcccggctcacggcctgctggctgcaaaatgcggatatgacgatcaccttcctttctcccggctcctctgccagctggcgcaggatgccgaagccatccagccccggcagtaccacgtccatcaggatcagttccggttttgtgcggcgcaccagctccatgaccatcggcccgtcgccggtggacgccgccacctcaaattcgccggtttcctccagcagctgcctcagcaaaatgcgaaactcctcattcgcatccgccagcagcactctcgtccttttttccatcgcatccaatccttttccacagtttgctccgccgcccccaaatgttctccagccattcccatttgtcgtgcagcttgtgtataatttatcatatttatctgatagtttcaagattattgtgtcgaaaaatcatcttaaaaacgcatctcatatcaaaaacccgttaaagccgatgaaaaatacaacaaaaatatcgcccgtcgtgctttcaatgccgggcgatattgtaactcacgctttattcaattttcgacggtctgtcagatatctccccttacaggaaccgatccagctccgcctccacgttcttccggtgcttcacctgcggcgcacggtgcagctgcccgtgggacatgaccagctctacatggcgcagcgcccgcaggtcggccagtggatccgccgccgtaacgatgaggtccgccgcctttcccggttccagcgtgccggtctcctgaccgatacccgccagctgggcgctgcggccggtggcagtgtacagagcgaaggcgttggacacccccacatacttgtggaagtagtacagctcccgccagaagtcgtactgggtgatccacgggcagcccacgtcgttgcccagcaccaccgggatatcctgctccagcgccgccttagcacagtcgatgatgccctcgaacaccacgttgccgttgtactgctccacctccgaggcgttggagacggaccggtcaaacagcgcatagggcagggcgggggagatggtggtacacaaaaacgccccccgctcccggaacagccgcaggatgtccgcatcgggcttggcgccgtgctcaatggaatccacgccgttctccagtgccacccgcacgccctccggcgactccacatgggccgccacggtgtagcccatctcatgagccttttcacataccgccttgaccatctccggcggcatcttcagctcgcccggcacgcccttctccttggcgtccagcacaccgccggtgatcatcagcttcaccagatccacgccctgctgccgtcccttctctaaccgggccagtgcctcgtcgatggtatgggccgccactgccacagacccggccatgtggccgccggggacggagatgccctcgttggccgccagaatacggggacccaccctccgtccggcccggatatcatcccgcagccgggtgtcgaagtccgccagaccgcccaccgtacggatggtggtgacaccggagaacagctcctctttggcaaagcccgccaccatgccgtaggccaccttccgggtcaggcccgtggagaggatggtctttaccagcttctcgttgtcccgctgcttcttctggggcttgccgctgcccgccagatggacgtgcatattgatgagtcccggcatcagatagccgcccttcaggtccaccacctcatagcccgtcagatccgtcccctccggtacgatgtccgtaatgcggtcgccgtcggtccgcagcaccagtccctcacggggctgcatctcccgtgtaccgtccagcagcttgccaccacaaaatgcgtatttcatcgctctccccgtccttttctctttctatcgagtgttttctgtccgctacgccttagcttctatggatcctttacggtacaatataagccccaccgccccgcctgtcaatcgttttgcagagaaaatcccggtaaacccggcgcaggaggcccggagccgatgctccgggcctcctgcctcacagggcgcttatcccgccgtggtcagcatattctccaggaagataccgtatccctccgccgggtttgccaccagcacatgagtcacggctcccaccaaccgtccgtcctgcaaaatggggctgccgctcatcccctgcacgatgcctccagtggtctccagcagctccgggtccgtcacccgcagcagcagatcccggccgtcccggctccgggggttcacccgcagaatctccacctcataggcacgggtatcgctgccggaaatggtgcataatatagacgcctccccggcgtgtacctcctccggctctgccaccgataccgcctcgccggagataaaacccgcatcctccaccgtgccaaagatgccctcgttgctgttgaccgtcaccgtgcctacatcccgctgcacggtaaagtcccccttcagctcgccggggtcgccccgctggcccttcttcaccgccttcaccatagtctccataatagagccgctggccagcggcatcagctccgccgtgtccacatccgtgataccgtggcccagagcgccgtaactgccggtggcggggtcatagtaggtcagcgtgccgacacccgccatgctgtcccggatccacgcacccaaccggatgccgccgtcctcgcaaaccactggactggccgtgacctccagcgttttcccgtcccgctgcaccgccagctccgccgccgtttcgccgttttccgccagcatggcctgtaaatgctctgtggagcggatcttctcaccattgaaggtcagcaggatatctccttctttcaggccgcactccttggccggggagcgagtctcctccgttccctgcaccggcgacacggataccaccagtacaccgtcggcaaagagcttgatgcccacggccttgcccacggggatcaactgccgctcctcatcggcccacgtccgctgccatcccagcgacagggccagcaccatcgccagcagtacggcagcgccccgccgcacgccttgccttgcttgcgtttcatgcatcggatcacctcttattttttgttttcgtcgccggcgacaccattactttgcgccgcagccgccggtttcatcggcgttaaattccgccagacatggcaatcgtcccgcacgactgtcacgccgccgcttttgcgccgcaggaaaaattttccgcagtgaagcgccagcttttaggacacctccccccgtttttctccgttgcagccccgcccgctcctatgttatagtagaggggaaaggacgtgaagccatgaaaggaaccacccgcctgctggccctgtgcggcgtactgaccgccttgggcgtggtgctgctgtgtctggggggtatcgtcccctttgccctgtatatctgccctattctggcctccatcgccctgctgccggtgcgctcccgcccacggtacgcatggtgctgctatggggccatcgccctgctgggtctgctgctgtgcccggataaggaggtatcgctgctgttctgcttcaccggctactatccgctgctgaagccccgactggacgccctccgcagccgccttctctccctgacgctgaagctgctgtgggccgccgcctccatggcggcgctgtacgccctgatcctctatgtgttctgcctgcccgccgtggtagaggagttcgcagccaccggccgctggctgctggccgccaccatcgccatgggcgtcgccctgttcttcgtctatgatgtgctgctgggccgtctcatggcccgctggcccgccaaggtctgaggggcagcgccgtctcttgtaaccttttcgcccgccgccgggcctctttttcacagaatatgggagtcaacggtcgtttccgccgtaggctcccctttgcttttcccgacacttccccagcgatatgtcccatttccgtcacagtgccttgtgcatcctgcccaaaatttccgtgcgttttttaccattctgaaaattttgttatcaatttgtaatttttgtgtagcttttttgatagagttgtggtatgatatctctcgtagttttccaaaaccaacgcagaaaggatggcaaaagcatatgtccagaaaatttgcctgtctctatctggccgttgcgctgctggtgtccagcatctggatcgccagcgccgatgaacgtgataccgtacaacaggaggtgcagtacagcgccgctgtggaggcgctggatgccgccgggctcaccagccgctccagcaatgttctgcccagcggcgagggtctggctctggcgctggagctgggcctgccggaggaggagaccatctccctctcccagctgcccaccgaggccctcaagaccagtcaggcccaggaggacgccgcccgccgcaagcaggcggacaccgccgcagccgccgctgacgccgccgccaaggaggccgcccgtcagagcctgctaagcgagtacgacggcgtgcagctcaccgaggccgttcggcttcgcagtgccgccgataacgacaccgccacctccctcaccatcgacagcggcaaggtggcccgcctcaacgactatcaggacggctggtaccaggtaaccttcggccagtccaccggctacatccccgccgagtatgcccagccagtccactatgccgactatgagggtacttctgccaccaacaccgtgcgggaggagctcatcgcctacgcctacacctatctgggtacgccctatgtctacggcggctccagctactccggtaccgactgctccggcttcaccatggctgtgttcgccaagttcggctactccctgtcccacggggccagcgaccagtattacaccgccacatctgtctcctccgaggagcggcaggccggtgatctggtgtttttcgataccttcggcggcatcagccacgtgggcatctatttgggcggcggtcagttcatccacgccagctcctccggcggtgtgaaggtcaactccctttacgaaagctactacgctgcctgctatctgggggccggacgcatcctcccctgaagcgtcacatagagacatcctaagagagccgcctgcgggcggctctcttactttttctttcgcctccgtatattcgtatttttattcattttcgctgcatttcctttgtgcaatttgcttctttcttccgcaatattcagtccagaagcgagcagtttgcatgattctctcgtttttgttgtaattttattcattttgcacttgacttttattcatctccgttgtatcataaccacatcctccggaacgcccggagccttccatccacaaggccgcctgcacaggcggcacaacaaatacaaagtgaggtatgagagatgaaaaaagtattggcccttctgatggccgccgccatgatcctgtctctggccgcctgcggcagcaagaaccccgacagcaacgacgatagcaacgacaagaaaaccgctctgatcctggggaccagtgccgactacgcccccttcgaattcatgtatcccgatgacaagggtgaactgacctacgccggcatcgacgtgtccgtggctcagtacattgccgacgacatgggtctttcccttcaggtggagaacatggccttcgagtacctgctgacctctctgggcaagggcgacttcgacatggtgctggccgccatggaggccacccccgaccgtctggagaacgccgacttttccgacccctactataacgatattcccccggccattctggtgaaggctgacaaggccgaccagttcaagacgctggccgatttcgccggcaagtccgtaggcgctcaggccgccaccacaaagctggatatcatcgccgactccatgcccggtgccaacgccgtgtctctccagtccgtgctggatctgatcaatgacctgacctacgacaaggtggatgccatcgtggtggacggcggcgtggcgcagcaatatgccgaatccaaccccgatctggtcatcgccggtgcctccagcgagctgggtgaggcctccgcctactgcgtggccgtggccaagggtgatcccaaggggctgctgcccggcatcaacgccgctatcgccaagcttaacagtgagaataagcttcagagcttcatcgatgccgccaacgagctggccaccaaggccgtggaccccaactgatccgaaactgcatccgccccgctgcgcccagtgccccgcactgggcgcagcgccgggtattcttccatctgaaaggagatgacgcccatgtggtggagcgacctgttcaccaacatgaaccctaccgatttcttcaacttttccttcctgcccaaatacggcaccgctttcgtccgtggcatcgaatataccctgttgctggccgtggtgtccgtgctgctggccattctcccggcattggggctggcccttatgcgcctgagccggaaaaagccggtgcgctggctctccggcgcctacatcgccgtgttccgctccacccccatgctggtgcagctgtccatcatctactacggcctgttctacgccatctccctgccccggctgaccctcttcggcttcgtggatatcagccgcttcatccccggcgtggtggcgctggccctgaatagttctgcctatgtggcggaaattttccgtgccggtattctggccgtggataaggggcaagcggaggccgcccgctctctgggtctctcccaatggcagagtatgcgtctggtggtgctgccgcaggcggtgaagaacgtcctgcctgcgctggccaacgagatggtcaccatggtgaaggaatcctccatttgctctgtgctgggcatggcggagatgatgttcgccgccaagaccatcgccggctccaccggcatctcgctggccccctacacgctggcggcactggtatatttctgtatcaactatccggcctccaagggcatcgaggccatcgaaaggaggatgcgtcgtggcgacaagcaataacgcactcatctccgtccggcagctgaccaaggagtttcgtcgtggcgtggtggcgctggatcactgcgatctggaggtccaccggggcgaggtggtggccatcatcggcccctccggctccggcaaatccaccctcctgcgttccctgaacctactggagcagcctacctccggcgccatctacttcgacggtgcggatctggcggacaaatccgtgaacatcgaccttcaccgtcagaaaatgggtatggtgttccagcacttcaatctctttccccataagaccgtgctgcaaaacatcaccatggccccggtggccctgaaaaagaaaacaccgcaggaggcccggcagcaggccatggcactcttggagcgcatcggtctggcggataaggccgatgaataccccaatatgctctccggcggccagaagcagcgcatcgccatcgtccgttccttggccatggagccggaggtgctgctgttcgacgaacccacctctgcgctggacccggagatggtgggtgaggtgctggacctcatgcgctcgctggccaccgacggcatgaccatggtggtggtgacccacgagatgggcttcgcccgtgaggtggccagccgggtggtgttcatggccgacggccgaattttggaggagggcgcccccgccgacctctttgaccatccccaggatccccgcctgaaggattttctcagcaaggtgctgtgagccacaaacacccgctcctctggtttgccagagcagcgggtgtttgtctggttctcccctttttgcggaaattcacttgtattccattgcctttttatatccgacagacggctttcttttttgtctcccacgggtaaccttctgccggtagtggctattacgatttatgcctccgacagcccacttttcccagtagccggaaaagtgggcaaaagagccgccagaaaccaatggtttctggacttcctttacacgcaagagcctcgtttgttatcagccgtaaagggaatcgacttagcaacagacccgctgccgctcccgctctggcgaagaggcgtgtgggtctaccgccgagagcggattccacggtagaacagcagactccctcaacttttcaatgcagcggcagcgatagtagaaatacgtcaattccctgcttcggcaagttttaggatgaaactcttgtacaccaaaagaggaagtcttgaaaccttaggtttcaagtggcgttctttcgtgcctttctttcgctattgaaagaaaggcacccgtcggagacacaaaagaagaacgccacccgccaaaggcagaacgcaccccaaacacaccagaaggcccgtttccctcacaggaaacgggccttgcagcagcttctattcagctcttggtatggatctcctcccggcacttgggacaggtaatgacgatgcgtcccttcccacgggggacccggcataccgtccggcacttggggcaggcaatgtacttgtgctcccgatcccgcatccgggtccgggtcaggccgaaggcattcttcaccggccagcacaccttgctcatgaaccacgcattctccgcccggcgcttggccagattccgggagaacatccgccacagcgcccacagcaccatggccgtagacagggtggacaggatcagatacggcacctgataccccttgatgaacagacacaccacgtcgatgacaatggccgtccagatggtgaccagtcccagccgatctccgccgttgcggccgtacatgaaccgggccatagcgttgccgacccgttggaagaaactcatacgcttgcctctttcctctgaagagataacgtcctcagaaattgacgatgctattttagccgaaaagtgaggaaaggtaaagccctcttgtgcagaatttacagattggtcatgattgccccgcctttcttccgcatttctccgggacaatccgttttctgcgttgcaatcaatgacggaaattgatataatgatagaatatgagctatgcacaacgggggccggcagaacgctccgccgaccccctatctgaaaagcggcaaccggacgctgtgggtgcggctgcggcgggggcgtccctcccgcccggccctgcgccgcttatggtatcctatgccgcagcggagccagcggttccgcagaaaggacagtcatcatgatcaagatcgccccctccatcctctccgccgacttcgcccatctgggccgtgacatccagcgcatctccgacgccgactatgtccacgtggacgtcatggacggcctgttcgtccccaatatctccatcggcatcccggtggtaaagtgcatccgcccggtgacggatctgccgctggacgtccacctgatgatcgaccgtcccgtgcggtatgtggagcagttctgcgatgcaggcggtgacctcatcacctgccatgtggaggcggacacggaggagaatattcactccgctatcgtcaaaattcacgccaagggcaagaaggccggtgtggtggtaaagcccaagacccccgcctccgccgtgctgccctttatcaatgaggtggaactgattctggtcatgaccgtggagccgggcttcggcggccagaggttcatggccgacatgatgcccaaggtgcaggagatccgccgctatatcgacgccatgaatcccacctgcgagctggaggtagacggcggcgtggaccccgccacctgcaagctctgcaccgccagtggcgccaacgtgctggtggccggctcctccgtctataaggcagaggacatccccgcccgcatccgggagctgcgtggctgatcctctgtatttacgcaatatcttcactgaaaaggacattatattatggaatatttccctgcgccccttgaaaaactggtggagcagttcgcccgtctgccgggcatcggctccaagtccgcccagcgtctggccttccatgtgctgaatctgcccatggagcaggcgcaggaatttgccaacgccatcgtggaggccaagcagaaggtgaccctctgtcccatctgccgcaacctcaccgccggcggcccctgccccatctgtgccaaccccaagcgggacgaaagtctgctgtgcgtggtggcggatccacgggatgtcatcgccatggagcgggccagagagttccatggccgctaccacgtcctccatggcgttctgtcccccatgaaccatgtgggtcccgacgacctccagatcaagccgctggtggaccgggtggcgcagggcggcatccgggaggtcatcatggccaccaaccccgacaccgagggcgagaccacggccctgtatctggcccggctgctgaagcccttcggcgtgaaggtcacccgtctggcctacggcatccctgtgggcggacatctggagtttgccgacgacgccactctcacccgtgcgctggaagggcggcaggagctatgaaacgactgctctgccttctgctggccctatgcatggtgctgtccctcaccgcctgcggcggagagcagccggagtctgtccagcttttcgccatggacacggtgatggacctcaccgcctacggtgaaaacgcagcagccgccctgacggacgccagccgggagatcaaccgtctggagcgactcctgtcccgcaccatcgacaccagcgagatttctcagatcaacgccggcggcgccgtcaccgtctccgaggaaacagcctccctgctggctcaggcccagacctataccgccgccaccgacggtgccttcgatatcaccatcgccccgctggtctccctatggggcatcaccaccgacagcccctacgtccccacccagcaggagatcgatgccctgctgccgctggtgggggcggagcatctgcacctgtcaggggacaccgccacactggacgacggctgcgccatcgatctgggcggcatcgccaagggctacgcctccgaccgggtggctgccatcttcgcccagcacggcattacctccggcaccatcagcctcggcggcaatgtctacgtctgcggcgccaagcccaacgggcagccgtgggtggtggccattcaggacccccgctccgacggctacgccgtcaccgtggccctgacggactccttcgccgtcacctccggcggctatcagcgctattacaccgccccggacggcacggtctaccagcacattctggaccccaagaccggctatcctgtggagagtgacctgctgtccgtctccatcctctgtgacaacg

SEQ ID NO: 12388 - DNA, 526 bp, Unknown
  gut microbiota DNA sequence
tgaaggaaatcaagggcaatgaataccgtgtggcggccgtacccgccaccgtgcatgagatcgtgcgtcacggtcacaccgtgtacgtggaaaccggcgccggcgtgggcagcgggttcagcgatgcgcagtatgaggctgccggcgctatcatcgccgacaccaacaccgtctgggagaaggccgacctgtactacaaggtcaaggaactgttcccccaggagttcaagtggatgaacaagggcaagatcctcttcacctacatccactccaacgctcaccccgacgagacggacaccctgctgggcagccacgtctccgccgtggcctatgaggatgtgcaggacgaggagggcaagttccccctgctgcgccccatgagcgagctggccggtaagggcggcttcctggcggccctgcactttgcccagtccgtcaacggcggccccggcaagctgctggccaacgtcaccggcgtggagacccccatcatcaccatgctgggctgcggcgtggtaggtaccgg

SEQ ID NO: 12389 - DNA, 1271 bp, Unknown
  gut microbiota DNA sequence
ccacgatctggtgtgcctgctccacgaaaagccctttgccggggtcaacggcagcggtaagcacgacaactggtcgctggccacggataccggtgagaacctgctcaagcccggacgcacccccagtcagaacgcacagttcctgctgtttctggcggccttcatcaagggcgtggacgagtatcaggagatgctgcgctgctgcgtgtcctatcccggcaacgaccaccggctgggcggcaacgaggcgcctcccgccattgtgtctatcttccttggcgacgagctgacggccatcctccgctccatcatcgacggcacggcctatgtggacatcaccaagaagaagctggagatcggcgtggacaccctgccggagctgccgcaggataccaccgaccgcaaccgcacctccccgctggcctttaccggcaataagttcgagttccggatgttgggctcctcccagtccatcgccagccccaatgtggtgctcaacaccatcatggccgacgagctgaagcagtttgccgaccggttggagaaggcggagagcttccatcaggccctgcaggagctgctgcgggataccttccgggatcaccagcgcattatcttcgacggtaacggctacgacgacgactgggtacaggaggccaagcgccgggggctgagcaatctgcgggacaccgtggactgtatgcccgcctacatcgacgagaagaatgtggcgctgttttcccgcttcggcatcctgacgccggaggagatgcacgcccggtacgagatccatctggagaattactgcaaggtcacggccattgaggccgctaccctgcgggatatgaccctgcggggcatcctgcccgccgtcacccgctacaccggcgatctggccaagggcgttctgaggaagcggcaggcggagatggccacctcctgccgggtggagagctatctggtggcgcagctggacgccctcagcggcgacctgctggacgcctgccaggctatgagccgggcgctggaggccgctcccgccgccgatgccggcatcgacgccgcccggtactaccgggatcaggtggcctcccggctggaggagatgcggagcatcatcgaccgcatggagccgctggtgggggccgactactggccctatcccacctatgcagacatcctgttctccgtgtaatgatacccgatacgaaaagagagtgtgttccggatggaacacactctctttttcgtcaaccggcggggtgagccag

SEQ ID NO: 12390 - DNA, 1771 bp, Unknown
  gut microbiota DNA sequence
caccagctcctccaccgacaagcggttgcgggtatagttggtgtcgctggcgctctcaaagcgataggccacatagccccgcagcgtcccgtcgtcggcgcagtagccgatgcggcgcacctgaacatccgtgcgggctgcccgaacctcctcctcgaacttctccaccatgccgtggttctgggcggcgaagcggctgtgacaggccagcacccggtcaaagtcctccggctgcagcaggcgcagatggcggcgggcctccccctcgggcttgggcagcacggcggtgggcagatggtactcgtagagcttccccgcaaagccatagcccatgcggcggtaaaaggagatctggaagggcagcagcagcgtcagcagagcgccgtggcggcgggcgtagtcctcgaagtagcggatcatctccagcgccgccccctgctttttatggagggggtgtacctccagcgccatcaggccgcaggctgtctgcatccggccgaagcagttcatggaaaagaggatcagcttcatggtggcaatgagtacgtccccttcaaacaggcccaccgtctgcacctgacggtcctcccgcagctccagacggtgcttctcccggtagtgctcccggcacgcttcgtccagcgttttataggccgggtaggcgttgaggtagatgtccagataggcctccagatcctgctgggtcaaggggcggatggtgcggttggtgtgttccatggcggcgggctcctttcacatgattagatgaagctattgtaccgtgttttgccggttccgtcaacgacgggtaagaaaaaagcccatccgctcaggcggataggctttcaagggaaactactttacaggggcaggctcttcgtccacgcagagacctcctgtgcggaggcatggctggacaggcgcttgccctcgttccagcgggtatcgggggcgcaggaggatcgcaggagctccacggtcttacccatgccgctgccgccggaggtagcgaagggaatcacggtcttgccggagaaatcggcgctctccagaaaagtctggatgatgcggggcgcctgataccaccagatgggaaagcccacgaacaccgtgtcataacccgccaaccgaggggtctccgccatggccgggcggctcttggggtcgttcatctccacgctgctgcggcttttggcgttgttccagtccagatcggcagcggtgtaggccgtctggggacgaatttcgaagagatcgccgccgatgacacccgccagcgtcttggccagacgggccgtttcgccgctggcagaaaaataggcaaccagaattttgctcatgtgtatgctcctttcaacatttctccgggatcgctccgggcggcgggacatcccgctcccccccattgtatcagccgagggcggcggatgcaaggcacttttcccggaaatgggtgcttatcggacagtgaagcccagccccatcagccagtccgccacgtcgctccgggcggcgctgctgccgaagcgctggccctcctgccagtcgccggtgccggccagctgagccagcgtctccccgctctggccgagggcggaggaggcggaggtacagaaggggatcaccgtcttccctgtgaagtcatttgccttcacaaatccgttgacaggccatgcgctgccgccccaccagatgggatagcccacaaacaccgtgctgtattgctcccagtgctccacggtggcggaggtgagagccacatcttgcagag

SEQ ID NO: 12391 - DNA, 817 bp, Unknown
  gut microbiota DNA sequence
ccactcgaccacgaagggcgtttcttcagctcgcctgccaatacggtcgaacatgaacaccagcagaatgtcgaatttgccctgttcggcatattccttgatgagctggatcttgtcacggtcattggcgctaactttgaatcctgatacgccgttttcctgttcctcatacacgatggtccagcctatccgctctgcgaactcacggcaggcttttctctgcacggggatgtcagcttgattctggtcatcgtgatcgacctgcttggtggtggagacgcggtacaggcagcacactctgttttggatgctgagtacattttgataagaacaacaaactctttcagccataatgtatccttcctctcaatgaatgatttagaaatgtgagaggttcagatacaccttttcatgtattcacttttcaaagtacacggcattccgccaccttgattatctcacatttcaggttgaatagctatcaaaaccttgaaatataagcaacaaagaaacggcctccgatccggtaaaatcgcgcttgggcagcttgggtggaagcttgggtggcaccacataagctgcacatctctgataaactaaaatcttggtggaggatttttatcaaattacacggttatggaaaacaggccgcagcggtaaactgcggcctgtcaccatgtttatttaattccagttgtctgtatgctgctggcgctccagatattccttcgattcttgctcatcggcaggccgcactctctttttgccgcagtccgggcattggtcacatccagtttccgcttcgaaggtatagtgg

SEQ ID NO: 12392 - DNA, 623 bp, Unknown
  gut microbiota DNA sequence
ctgacgctggtgatggtcatcgtcacctccgtgctgaacattgactacggtcccatgctgacccatgaatacaatgctcaggtcaaggacgatctgttcaccacccccgagcgtccctttgagggcgccgacgactacgaagagggtgccaagcactcctccgtgctggatctgctgctgcctgttatcgttctgatcgccctgtgcatcgttggtctggtctggaccggcggtatatgggacaccgagagcgacaactacggcaacttcatcatgtccttctccgacgccaccgccggtaccggcctgtgcctgggttccatcattgcactggtctttacgttcatgtactactggctgcgcggcctcatcaccttcgagaagtccatggaggcgatccccaatggcttcatccagatgatctcccccatcctgatcctctgcttcgcctggaccctgtgcggcctgtgccgtgacaatggtctgcaggtgggtgccttcgtagagggcgttatggccaacaccggcagccttgctaagttcctgcccgccgtgatcttcatcgtggcctgcttcatcggcttcgccaccggtacctcttggggtaccatcggcatcatggt

SEQ ID NO: 12393 - DNA, 5156 bp, Unknown
  gut microbiota DNA sequence
tcccgtctggtgcttttgttcgttcattgtttaatttacaagatacacgcccgcttctgcggaacattgctattatactctgcaaagccaagtttgtcaacaggttttttcatcttttccaaaaaacttttagcagccatttggtactctaatggaagctcctatgaaaaccgctctgcgaaacagcttgtttagattaccagaggaaacgccatttgtcaatacctaatttcaaaaaatttccgttttttctccgtccataaagccagtgacaaacgaccgcttctgtggtatactatccggcgacatgaaccatatatgattgaaccatatatgataaagaggtgatcccttgcagatcgagcagatgagcgccacctttggcagactgaacggctcccagctggaccttcagccggggctgaatgtgatctgcgcccccaatgaatccggcaagtccacttggtgccggttccttcaaaatatgctgtacggcgtccccaccaaggagcgggggctgctggctgacaagaaccgctacgccccgtggagcggttcccccatgcaggggcggctactgctgcggaacggcgacgcccgctataccctcctgcgggagaccagacggacctccgcccccatgggtgatgcccatctcacctacaccggcaccgccgaccccgtccccggcatcctcgccgccgaggccggtcagtatctgctgggcattccacgggaggtgtttctgcgcagcgccttcatcggccagaatgctctggcggtggatcaggacgccgagttggagcgccgcatcgctgctctgatctccactggcgaggaggacacctcctactccgagagctatgagcggctgaaaaagcagctgaacgcccggcgagccaaccgctccaccggacagatcccggcactggagcaggaaatcgcccagctggaggatgcgctggcccggcaggagagcctgcgggagcagcttgacaccgcacagctccggctgcaagatgcccaacaccagttggaggaactgcagcagcaggacgcccagtggcagcagctggagcgccaagccgcccgtcaccaatacgaggaggcccaagcagccctatccaccgcccagcagcagtatcggcaactggagcagcgctgcgacgtcctaccggacgaggagacactctcccagctggagggacaagctaccgctctgacccagtccatcgccgcccggcggcaggccacggagcaagcggcccagctgcgccggcaggccgccgaggccatggcccgctgcacggcacaccccctctctcccgccgacgggccgcagctgcaaagccgcctgtccgccctgacggacccgcccgcaccatcgaagctgcccctgcctgtgggacttcttctgctggtcggggccgtagcctgcgtgctgctgcatctgcctgtgtatgcgcccattctctgtggcgcagtcggtgccgccgctctactatatgatatagtatcccgccatcgtcacgccaaggcgaagcagcaggcagacgaccagcggagcaccttacagcggcagattgcagaatatctccctctactgacggaggctcaggaggccactcgcagcgccgatgccgccgcagccgccgccgaagccatggctcataacgatcaggcccagctgctggcgctgctggcacgggtccgagccttccattccaccgctgtggatctgcctgccgtacaggtggccctgtccgccgcccgccgcagccgcaccgccctccgatcggcccaaaccgctcaggagcaggcacagatgtactgccgcctgttggaggagcgtctgccgcagggggagctgccggatccggccattcctctgccccggccctcccgttccgtcgaagccatgcgctccgccatcccggaggcgcaagcccaattggccgccgcacgcacccggctggataccatctccggccagctgcaggcgacccgtgacccctcagagctgacggcacagctggctgagaagcgccgaaagctggagagcctgcaatccgaatacgaagcgatccaactggccatggacgccctgtccgccgccaaccagaccctgcaaaaccgtttctccccggcgctgggcgctcgcacggcggaaattttctccgccctgacgggagggcgctacgacaaggtactgctggacaggacgctggctctctccgctgagccctccggtgactccacaccccgcagcattcaggtgctgagtcaaggcgccgccgatcagctgtatctggcggtgcggctggccatctgtcagctggtgctgccgccggagaagcatgtccctctgatcctggatgacgtgttcgcctccttcgatgaccagcggctggccgctgcgctggagtggctgctccaagagagtcagaatcgtcaaattctgctgttcacctgccatgaccgggagcggacctatctggcgggccgccccggcgtccacattcttaccctgaacggaggtgccgtatgttcccattgaacacctttgaaaacctctgtgtatttttcctgctgctgatgatttacagcgccgccggttgggtgggcgaaatgttctactgctccgtgggcaagggccacatctgcgaaaaacgtggctttttgaacggttttatctgccccatctatggacacggcgcccttttggtgctatatgtattacacgggggcctgaaaaatcccctgttgacctttctggcaggcatggcgctgacctctgcgctggagtacttcaccagctggtttatggaggccgtcttccatatgcgctggtgggattacagccgcaagaagatccagctcaacggccgcatctgtctgcagaacagcctgctgttcggtctggcctgcgtgctgctgtgccatgttgtgaatccgccggtgatggcgtggctgttccacatcggctccgcctacaccatccctgtggcctcgttcctcttcggcctgtatctcatggataacgtcctctccgtccgcagcgccatccagctgtcccaccgtctggacgatctgcagaaggtgcggcaggagatccgctcccatctggaggagaaggccgcccagctgcagcagaagtatgagggccggctggaggaggtcaccgaccgcttcatggccggcttagaggacgctaacgacgacttcctcaaggagaagaagctgtatctggcccagctccgcagcggcgaggacctcttcgagcgccgtctgctccgttcccaccccgatctgcgttccaagcgccacagcagaaagctgctgaacctgctgcgtgaaaagcgccccggccagaaggacaagaagtaattcccatcagcatctcagcacctttgaagctactattataataaaggagatattcccatgagtgaatgcacccacgattgcagcagctgcggcgagagctgcgctgaccgtcagggcggaagccccttccagatcaagccccttcatgagggctgccatgtccgtaaggtctacggcgtcgtctccggcaagggcggcgtcggcaaatccatggtcaccagccagttggccgtcaccatgcagcgccggggccaccgcaccgccattctggacgccgacgttaccggcccctccatccccaagtgcttcggcatccacggccgggccgttggctccgaggatgccatcctcccggtgcagacggagaccggcatccagctgatgagcgtaaacctgctgctggagcacgagactgaccccgtcatctggcgtggccccgtcatcggcggcgtggtgcagcagttttggggcgacgtgctgtggcaggacgtggactatatgttcgtggatatgccccccggaaccggcgacgtggctctgaacgtgttccagaccctgccggtggacggcgtcatcatcgtcaccagcccgcaggatttggtgggcatggtggtggaaaaggccgtgaagatggctcagatgatgaacatccccatcgtcggcctggtggagaatatgagctatctggcctgtcccgactgcggcaggaagatctacctcttcggtgagggcaagacgcaggaggccgccgaccgctatggcctgcccctgttggctcagatgcccatcgacccggcgctggcggctctggtggacgccgggcgcatcgaggacttccaaggctcctggctctccgccgctgctgaccggctggagtgctgacccgcaccgcaagctttcaggagtgcctgaggccgcagggcttcaggcgctccttcctcatcccgcaaaaaccggaggccctccttacggaaggcccccggtcattcattttacggcttttccacgttgatatacgtggggatatcgctgatgcgctgataggtgtaggtgtccggcacggagaagaaatgcacgctgtccttcccgtcgtaggtcacatacgggaccgtcagtccctcccccttcagcacatagacgccgttggcgtcctcggcatacgtcccggcggacagcacgccggactgccggtacagggtgtagtctcccttctcgccaaacaccagataggtaccggctccggggctcagcccctcgcagaggtaggtgcccgtcagcggctgatgccgcaggctcatgcccagcatcaccagcagagccacgatcaggcacagagaggctgccaatgcagcccagagatacttagactttctttgcataggtggtcacgctcctttgttcccttcggttttccgcctttagagcggcctacgcccatagagtatcacacctccctccctctgtcaagaaattttacctgctttatagcgaatttccatggcaataactgtttattttcatgataattatgtaattttctatgcaaaatgtatacttttatgttctggccgccaatccgctccccatgggaacaaccctcctgcttttctcccgttcccggcaatttttttggaaaagagtgttgacaaacccgcctgcgcttgctataataaacaagcttgattcctacgagcgagatcaggccaagtagttcagttggttagaacgccagcctgtcacgctggaggtcgtgggttcgagccccatct

SEQ ID NO: 12394 - DNA, 435 bp, Unknown
  gut microbiota DNA sequence
catgtggtgtttgcgccgaaatatagacggatggagatatatggaaagataaaagaggacatagggatcatactgcggaagttgtgccagcaaaagagcgtagaaatcatagaagcacaagcatgcccagaccacatccacatgttgataagcatcctgccgaagtacagcatatcccagattatgggatacctgaaaggaaagagcagcctgatgatatttgaccgacatgccaacctgaagtataagtacgggaatagacacttttgggcaagagggtattttgtggatacggtaggccgaaacaagaaagcgataaaggcgtacatacagaaccagttggaggaggacaaaatgtctgaccagattagcataaaggaatttatagacccgtttacgggtagtaagaatcccaaggcatagataaaaacccct

SEQ ID NO: 12395 - DNA, 8581 bp, Unknown
  gut microbiota DNA sequence
atagttgggatcggtgccggcaaagccaaactggtcatagcgggccttcttctccgggtcggacaggacctcgttggcctcgttgatctccttgaatttctcctcggcctccttgtcgccggggttcatgtccgggtgatatttgcgggccagctttttataggcccgtttgatctcgtcctcgctggcgtttttgtctacgcccaggacctcgtaatagtctcgtttttctgccataccggcgtttctcccttctccgggaatatccggcggccggaaagacggccggatatcatctggttccaaacgccacaggaagggacaggaagccctgcccctttccggtggtcaagctgcgctgcggggcgcaggatgcttacttattctggtcgtcatcatccacgaccttgtagtcggcgtcgtaatactggccgccctgtgcgccggtgtcgccgccgggctgctgggcagcagcgtcgccctgaggcgcctgctgctggtacagcttctcgctcatcttatagaaggcctgcgtcagctcctcggtggcggccttgatggcgtcggtgtcctcgcccttcagggtctccttcagcttctcgataccggcctgaatgggggccttctcgctctcgggtaccttgtcgcccacctcgctgagggtcttttccgcctgatagaccatctgatcggcctgattgcggacctctaccttctccttgatcttggcgtcctcggcggcatactgctcggcttccttcacggcacgctcgatatcatccttgctcatgttggaggaggaggtgatggtgatgtgctgggcgttgccggtacccagatccttggcggagacgttgacgatgccgttggcatcgatgtcgaaggtcacctcgatctgaggcacgccacggcgggccggggcgatgccgtccagatggaagcggcccaggctcttgttggcggcggccatctcacgctcgccctgcaggacattgacctccacggaggtctggttatcagcggcggtagagaagatctggctcttctttacggggatggtggtgttgcgctcgatgaggcgggtgcagacgccgcccatggtctcgatgcccagggacaggggggtgacgtccagcagcagcaggcccttgacgtcgccggtcagcacgccggcctgcagggcggcgcccatggccacacactcatcagggttgatgcccttgaagggctcgctgccggtgaatttcttcacggcctccaccacggcggggatacggctggagccgcccaccatcagcaccttagacaggtcgctggccttcagaccggcgtcggacatggcctgacgcacggggcccatggtggcatccaccagatggccggtgagctcgttgaacttggcacgggtcagggtcacgtccagatgcttggggccggtggcatcggcggtgatataaggcaggttgatgttgctgctggtgacgccggacagctcgatcttggctttttcagcggcctccttcaggcgctgcatagccaccttgtcgccggacaggtcgatgccgtcggtgcgcttgaactcactgaccagatacttcatgatgcactggtcgaagtcgtcgccgcccagacggttgttgccggcggtggccagcacctcgatgacgccgtcgtcgatctccagaatggagacatcgaaggtgccgccgcccagatcgtagaccatgatcttctgggtctgctccttatccacaccgtaggccagagcggcggcggtgggctcgttgatgatacgcttgacgtcgagaccggcgatcttgccggcgtccttggtggcctgacgctgggcgtcggtgaagtaggcggggacggtgatgacagcttcggtgacgggctggcccagataggcctcggcgtcgctcttcagcttttgcaggatcatggcgctgatctcctgcggggtgtagctcttgccgtcgatgttcacacggtggtcagagcccatctcacgcttgatggaagcgatggtgcggtcaggattggtgatggcctgacgctttgccgtctggcccaccatacgctcgccgctcttgctgaaggccaccacggacggggtggtgcggttgccctctgcgttggggatgacaacagcctcgccgccctccatgacggcgacgcaggaattggtcgtaccaaggtcgataccgataactttagacataatgattgcctcctgataagatatatatagattgattttttacggatcgttactgctggtccgggttcacggggatcacgatggaagcgatgatataggccagcaggccgctgccgcccatgaggcccagcagcacccaagccagacgcaccagcgtggggtcgatgttgaagtagtcggcaaggccggagcacacgccgcacagcattttatcgttgacgttgcgatacagtctctttctttccatgatgcttctcctttcagttggctaccttgaccatggcgaaccggaggaccttatcgcccagctggtagccctgctggagcacctccaccacggtgttctcaccgacgttctcgtcctccacgtgcatcacggcatcgtgcttctgaggatcgaagggctggccctgtgcctcgatgcgggtgacacccagcttctccagcactgccagaaactgccgacagatcagctccatgccctggcggtgggggtcgccctcgtcaaactgggcaaggccacgctccaggttatccagcacccccagaaactccttgacggtgtccgccttggcatcggcgtagacgttttccttttccttggtggtgcgcttgcggtagttgtcgtattccgccgccagacgcagatacttgtcgctggcatcgctgaccatcttggccagctgctccatctgctccatctgctcacgggtgacggtaaaggtctcctcctcgacggtctcttccgcagcctgctccgtttccggagtggtattggcctgcggctgctcctcctgaggggcgttcttcttttccttctcgctcatgactgttcctccttggtaggcggcagctgccgcttttcaaacatatgactcaggctctcggcaaagcaggtaagccgggccgccacggacgcatagtccatgcgggtgggacctaccacccctaccagcccacgcataccgtcaccgatatcatagctggcaatgaccacgctgctctccttcagagcggcatccacattctccggcccgatgaggatctgcaccggggcgttgcctgacggcaccggaaggttctgcttgttgtccaccataaaggtcatcaggtcacgggccttgtcggcgtcccggtactccgggaatttcagcagctgggtggtgccgcccagatagacctcctgcccggcagcgtccttcaacagctgtccggcgtattcgcacacctgattcagcagcaggaaccacttgccggacacctgatccgacaggctcatgagccgggcgttcatctcctccggcccaaggccggtaaagtgggtgttcagcaggtgacttatctccgtcagggcctcccgctccaccggcagctgccagcgaagcagctggctcttgacccggctgtccgacagcatggccacggcgatgaagctgtcatcgtccacggcaatgaggtcgaaccgctgcaccgtcaccgcttgggtgtggtccgccatggcataggcggggtagcccaccatgctggagaccatctggcccgcttgggccatcacctgatccacctgagacattttcccggtgagggagaggcggatgctctcggcctccgcctccggcagcgcacggcgctccataagctcgttgacgtagagccggtagcccttggcggagggaacccggccggcggaggtgtggggctgctccagatagcccatctccaccagatccgccagttcattgcggatggtggcggagctgatcttgccgggcatcttctcggcaatggccttggagctcaccggctccgccgtggccacatagccgtccaccacgatctttaatatttgctttttccggtctgtcaattccatgataaaactccatttagcactcctatctcctgagtgctaaatggagtttaccaccgtgggcaggtaaagtcaatacccgcaattttaattatttgtaaacacgtcgcttaccagcgcaggcgaccgcccggcagctgctccgggagccagtgctggcgctgcatcaccggcagcaccgcctgaaacaggaagcccagcagcagaatttgcagcggcagatacagggcgtttttcacggcgctctgggtcaggtagtagaggtagcccttgctgtacagaatggcgctccagagggcgcccagcagcacattctggatattggtgaggagcttggccagaatgatgcgccgccacgtgatcttggcccggtagaaaaacagggcgtagatcatgcagccggtgatggtggtcagcatatagccggggaaataggggtagccgccggaggacaggaagaagctgagggtatcctcggcggcgccgaacacgatcaccgccagcgggccgcagaccagtgaacagagggctctggccagaaaggtgatgctgagggacaggctctcgcccagacggatggagcagtgactcaggacgatgcaggcggcgatcatcagggccatgaacaccagacggcgcagagccttcagctccccggcggcgctgcgccagtagccgggggacaggggatggggataaagcggcataaaaaaacctcctctgatttggcagaccggacaggccggacagccgcacagaggagcgccggggcgtgctgccccggagatagccgctatgcggcagcgggatgcgagatctgcactgcaaggcgatgccatttcgtccggcggacaactccccgttccgccggcactgtgcccccatgggggcgacacgcagatccctactctgcctttgtatgtgtgatgggtttagtatagcacatcggcgggaaaatgcaaggataatcgccgaagcgccgccggtggcggagaaagcgaggcgatttcgaggaagtgtcccggttttcacgccccaaaggggctggaaaccggctgacacaacggtgttccgaatcgccgaagcgccgccggcggcggaaaaagcgaggcgatttcgaggaagtgtcccggttttcacgccccaaaggggctggaaaccggctgacacgacggtgttccgaatcgccgaagcgccgccggtggcatacttttcccagcagttctttctttttgtctccggcggcatactttttgtcaacagcgacaaaaagtatgcaaaaaacgccgccagaaaccgatggtttctggacttcctttcctctcaagagttgcgttcgttatgggccgtaaaggggatcgactgtgcaacaaacccgctgccgctccctctcaggtgaaggggcgtgtgggtctaccgctgggggagtacggatccccacgaccagtctgcggactggtctcggaatgacaggggggcaaggcgggaaaagggcgctctccccggtggggagagcgcccttttgtatggaaaaatatcagagtctaacttgcagcggtaggcttagcccttgaccacggtgtaccaaacatcgccgttggtctgagtctgagacacgaccttgtaaccatcggccacgaagttggtgccggcaccctcggccgtgcagttggacgggtcgaagttgataaacgtaccgccctgaatgatggccttcgccgtaccattcttgtaagcgccgtccaagcagttgatcaagaagttgtaaccgtaagtcgggttgctgtacggctcgcaggcgaaggtaccgccgttgatgatgagggtacccttctggacctgcacagcagtaccgccgccgtaatagtagccgccgttgatggtgagggttgcaccattccggacgttgatgccatagccgccgttgacgccggtatcaatgccgccgttctcgcccgcattgatggtggtatctgcatcgatgataagggcgcagaagttcgtattgttgttgcccatgttatcgggggtgatgatcttcttctccagattcagcgtggtgggctgggagatgacgatgcgggccgcagccgtatcctcaatgttgttggtctggatatccttggtaacagccacgacgccgccggtggtcagagcctccttcagttccgtaacgttcgccacagggtaagtggcgttggcgtcataggtgttattgaagctgtcgctctccacggtgtcctgcgtggcgtagacggtgaacttgacaccctccagcgtcttattcatgtactcgttgccggcggcctcgtccatatgggcggatacggtgatcactttggaagcaccgccgttggcagtcagatggccctcggtgttcatgtcaaaggtttcctcgccagtcttataggtgaacttgatgaccttcagcaggccagtgtcgccctccagaccggtgacgacgatcttatacttcagggccagattgcccttgttgacgatctggaagggggtcagggtgtaggtgcagcccggctcccacaggggcgtttttccatcttcggcgaaagcggtaccgtctttcgttgcccatgccagagtgtcgatcgccttgccagtctcatcctgaatctcgatatccaaattaccggcctgaattttgttgacacccgtgcttgcggtgtcggtgaaccatgcgaaagtagcgcctaccagcatggccaggcacagaaccatggccatgacgctgcccagcaaggcccgtttggtactcttgcggtttgtcatagtatctgcctcctattttttgcgtgtgaccgatggagcgctcgcacggggaataaccccttatcgtttcgcctgaaacgataaccgcccatgggcggttcggcacactgtctatacacgtatgttagcactccttacggcaaattgcaagaggagttgacatttttttgtcgttttttacatagcggttttacagcgatttcacgcaaagcgcccctctcgcagggagaggggcgctcaggcggtacatgggcaggatcagcagcggaccagctccaccagcacctgcaccatcttctccatggaggccacggggacaaactcatggacgccgtggaaattggcgccgccggtgcagaggttggggcaggggatatcccgctcccaagagaggcgggctccatcggtgccaccccggatggggacgatctccggctccacgcccacggcccgcatggcggcgcaggcgttgtcgatgagctccatgtggggcagcagcttttccttcatattatagtagctgtccttcagttccagctggaaggacccatcgccccaaacgccgttgagatagcggacggcgttttccacgaaggtcttgcgggcctcgaacttctcacggtcgtggtcacggatgatggcgtggagcaccacctccgtctcgttgccggacacgtcggtgacgtggtagaagccctcgtagccctcggtgtgggcgggagtctccgcctccggcagcagggagatgaactggtgggccatgaggacggcgtttttcatcttatccttggcagagccggggtggatgttgacgccgtggacggtgagggtcacggcggcggcgttgaagttctcgtactcgatctcgcccagctctccgccgtccacggtataggcggccttggcggggaatttggcggggtcaaagtggtcggcgcccttgcccacctcctcgtctggggtgaagcagacggccacggtgcggtggggaatctccgggtgggccagcaggtactcgcaggcggtgacaatctccgccacgccagccttgtcgtcggcgcccagcagggtggtgccgtcggtgacgatgagctcctgccccacgtagcggctgaggaaggggaagtccttcacccgcaggcagccggtcttggccagcggcaggtcgccgccctgataggtgacgatctggggctggatgtcggcaccgctgacggcgggggaggtatccatgtgggagatgaggcccagcgccgggacgtgctcctgacccggtgtagcgggcagaacggcgtagacgtagcccagctggtccatgtgggcgttctccagccccagacgggccagctcgtcggccagataccggcccagctccttctggtgggcggtggtggggacggtgtcggacgtctcgctggaggtggtgtcaaaggagacgtatttcaaaaaacgttcggtcacttgcatggtggttcctcctgtatcaggcatcccgcaggataccggtattctttgccttgtattgtatcacagtttcgggaaaatacgaaacttttttcgccgccgggggagatttttctgcggcggcggggatttttgcttgagtaacggcggcgggtgtgctatactggtcactgtatgcgggcgtggtggaattggtagactcgatggatttaggtgatgtcacctcagtgtaggttttt

SEQ ID NO: 12396 - DNA, 3609 bp, Unknown
  gut microbiota DNA sequence
atcagcgtgactgggagtttgccaagaagttcggcctgcccatcatcgaggtggtgcagggcggcgacgtcaccaaggaggccttcgtggccaaggacgatactgccatcatggtcaactccggcttcctcaacggtatgaccgtcaaggaggccatccccgctatgaagaaatatgtggtggagcagggcttcggcaaggagaaggtgaacttcaagctccgtgactgggtgttctcccgccagcgctattggggcgaacccatccctctggtgaactgcgagaagtgcggctgggtgccggtgccggaggagcagctgcctgtggtgctgccgcaggtggagagctacgaacccaccgatgacggtgaaagtcctctcagcaagatgaccgattgggtcaacaccacctgcccctgctgcggcggccccgccaagcgggaaacggataccatgccccagtgggccggctccagctggtacttcctgcgctatatggacccccacaatgacaaggcactggccagcaaggaggcgctggattattggagccccgtggactggtacaacggcggcatggagcataccaccctgcacctgctgtactcccgcttctggcataagttcctctatgacatcggcgtggttcccaccaaggaaccctacgccaagcgcaccagccacggcatgatccttggcgagggcggcgagaagatgtccaagtcccgcggcaacgtggtcaatcccaacgatatcgtggcccagtacggcgccgacaccatgcgtctgcacatcatgttcattggtgacttcgagaaggccgtcacatggtccaacgaggccgtcaagggctccaagcgcttcctggatcgctgctggaacctcatggagctggcgcaggaaagcgatgagatctccgggaagaacgcctccatcatccacaagaccatcaagaaggtcaccaccgatatcgacgacctgaagatgaacaccgccattgccgccctcatggccatggtcaacgagttctacgcttccggcctgacccgtggcgacctgcagcagctgatgctgatgctctctcccttcgccccccacatggtggaggagatgtgggaactcaccggctacgccgccaagaccggcaagatggccatgcagatgccttggcccacttgggatgagtccaagaccgtggactcccacgtggagatggccgtgcaggtcaacggcaagctcaagggtaccgttaccgtggccatggacagcgacgaggagacggtgaaggccgccgctctggcgctggataaggttcagaaggccaccgacggcatgacggtcgttaagaccattctggtgaagaataagctcatcaacctcatcgtcaagcccgccaagtaaaaacgcagaagcgccgcctcccacgaagggaggcggcgctttttctgcccaaaaacccctttttccccggagaatgtggtattttatgtaatgctgcataagcacactgcaaatatttgcgtcaaatcgatgaaaattggcgttccctcttgcaatttgccgtaaggagtgctaatatgcgtgtatagacagtgtgacgaaccgcccatgggcggttatcgtttcgcctgaaacgataaggaacactccctgtgcaagcgctccatcggtcacgcacaagaaaataggaggaagatatcatgacaaatcgcaagtccaccaaacgggccttgctgggcagcgtcatggccatggtcttgtgcctggccatgttggtaggcgctacctttgcatggttcaccgacaccgcaagcacgggtgtcaacaagatccaggccggtaatctggacatcgagattcaggatgaaaatggcaagcccgttacaaatctgagctgggtcaaggccgaaggggccgagggcgagcaggttctgtgggagccgggctgcacctatgagttgccccccttccagatcgtcaacaagggcaatctggccctgaagtacaaaatcgttgttaccggtctggagggtgactctggtctgctgaaggtcatcacctttacctataagacggcggatggagctacctttgacatcaatcaggaaggtcacctgaccgccaagggtacggataaggcatcgaccggtctgatcaccctcaccggtacgatggataccaccgcaggcaatgattacatgggcaaggagctcaagaacatcaccatcaccgtggtggctacgcaggacaccgtagagagcgacagcttcaacgacagatacgataacgctgccgagtatccagaaaaggtacccaccaccgttaccgttgcaacggctgaggaactgagaacggcactgaccaccctcacggatgcaggctccggcgacaacaaggtcatcatcaacggggatatcacgctggcagagggcgagacttggacgcccgttacggtggatggttatcgtggcgccggtgtcattacggtggagggcaacggccataccatctccggcctgaacaacgctctgttcgccggcggttttgccggtacctccggtatcgtgatcaaggatctgacgttggataagatgaccatcaacgacagcaccaatacgcagggcatcggtgcattcatctgcaatgtggattccatgccgaaaatcgatctggtcaactgccatttgaccaattccaccatcaccagcaccgctggcgctcgtgtgggtggccttgtgggctggtcctccggctataacaaacccaatgacggaccggtggatacctatgtgaccatcaccaactgctctgtggataactgcgaaatcacggccaaaggctctgtgggcgggatcatcggtcacgccggtgcaaaccccgccacctatcactccatcaccgactgcacggtgacgaataccaaactgcactccacggatgatggtggctggcgtgtcggcgtagtggtgggtacggccaatgttggcgaggtcaccatcaaccataccgtttctaccggcaatacccttgcacaggacagcaagacagctcctgccggtcagagcgagctgtacggacgctttgttcccggcaccaccggtaaactgaccattgacggcattgcaataaatgactaaatcagtaccgttttgaatgcaagtcccgcctgtatcgacaggcgggacttttttcgcaattcccgccgttttttctgaaaatgccttgacaagtaccatacttcccggtataatatcccctgttaaagtcatgtatagtggctcttaaagagcaccctggaaatagccgggtgcatcggagggagggaaaaatagatgtccgaagtacacgtcaaggaaggcgagtccctggatagcgctctgaagcgtttcaagagaagctgtgcgaaggctggcgttctggctgaggtgcgtaagagagagtgctacgaaagccccagcgtgaagcgccgcaagaagtccgaggctgcccgcaagaacagaaacaagagatattattgatctcactgcgaaggtctgagcatctgctcagaccttcgttttttcagattttcgatgcgtcagccttccccggtgaagagagatcccgtgag

SEQ ID NO: 12397 - DNA, 1051 bp, Unknown
  gut microbiota DNA sequence
ctgggcaaggccgacacccaagctggcagctgtggtggttttccccacgccgcccttctgatttgccagtgcgatggttttcaaaagcacacctccatttcgtgcaacaaaaaaagagcctttcggctcttgctctgacagtattctgttctacccgtttccgccgctgaggtcatggcccaccatcagcgcgtagtggttatccatggtcaacggcgcgttatacagtgcagtcagcagatatggcttcacatggcgcacctcggtggtgttctcgttgatccgatccagtacatacagcagatgtgctccggtcagcttcagcagccttgaacgcactacctccgctggcagctcctctcccgccacgtgaatggaggacttggtagagcacacggtatccagcatcaggctcaccagctcatccaatcgctcgcggtcggcgttggtataatttgacaggtaatcgtagctgatgttttccctgatctgctcgctgtatatcttcctccgttccattctgtccttctgcgtagatctatcctcgcgccagaaggaagggaaggatgtaagaacatccgtattttgtttctctttactttgttcttgtatatttaattgggcgggcttttcctgttcaggttttacctgttctggaaaagcccgtttaggtgcatcggcagatttttccgcctgaacgggattttcccgtttaggagcatctgcctgccgcgactgctccaaaatggtgtattcgatgctgcccagcgttccgtctgcgcggcgttcccgcttccgcacgatgtaccccgtgccttccagctcccgcaccgtggtacagatgctgtccacaccgtccttgcagatacgcgccaaccccttggtggtgtagtcccagtcctccggcagcgacagcatcagggacagcagtccctttgccttcagcgacagtcttttgtcccgcaggtgctggttggacatcacggtatagttccgcgttttctccactctgaatacagccatgggcgttcctcctttccatttattctat

SEQ ID NO: 12398 - DNA, 476 bp, Unknown
  gut microbiota DNA sequence
gccaccctgccctatctgctgcagatggcggataagggctttaagaaggccatggaggataaccgcctgctgcgtctgggcatgacctgctacgacggcaagctgacgctgaaggagacggctctgaagcagaaccgtgagtggaccgacgccgacgagctggtcaaggtctggtaaaacgccattccctctatttgataacctgtttccattactcctcatcacacggggtgctccggcgtcagattcctgacgccggagcagggaacccccgcagagtggaagtccccccggccgaggcgaatggagacctgttatatttctataccatcgctgtcaggcgtgtttgcccttgttcatcggtggtactacgcaagcaacacaagcagtaacacgaaaaagagaaacaacctgaaaacttgaggaggtaaatatggataattatggtatcctttctctggctcctgctctgatcg

SEQ ID NO: 12399 - DNA, 17552 bp, Unknown
  gut microbiota DNA sequence
agtttccattactcctcatcacacggggtgctccggtgtcagattcctgacgccggagcagggaacccccgcaggggagccggaagcctgttatataccctatacgcaagcaacacaagcagcaacatgaaaagagaaataacctgaaaacttgaggaggtaaatatggataattatggtatcctttctctggctcctgctctgatcgccgttatcttggcgttcattacgagagaagccctgttctccatcctgtgcggtgttctggtgggtctgctcatcaccggtcaggacctgctgttcggctttaccggtctgattcagagcgctctgggtaatgctgactatatttgggtcatcggtatcgaggtgttcatcggtatcatggtggccttcttccagaagtccggcgccattgaggccgtggccaacaagctcaatgagaagcttcacatcacgccccgcattgctcagatcatgggcgctgcgctgggtattctggtgttcttctccgactacttctcccccctgttcgtgggtaacgtgatgcgtcctatcaccgataaggccaaggtctcccgtgagaagctggcctggctgtgcgactgcacctccgctcccgtctgcatcacccttcccttcaccgcttggggcgtgtatgtagccggtctggtggtgggtttcggcaccttcgccacggcggacgctggccaggccgccgtcatccactccatccccttccagctgtacggcatcctgaccatcgtcatgatcctgctggtggctctgggcttcctgcctgactacggccccatgaagaaggccgaggagcgtgcccgcaccaccggcaaggtggtggccgacggcgacacccccatgctgtcccgtgagctggacaccatcaagcccaaggagggcttcaagtccaacatcattctgcacttcctgatccccgctctgatcgttatcgccgtgaccatcggcacctatgtcatcatgggctccgccaagacgctggaggccttcgtgctggccgttacctatcaggccatcgtgctgctgatccagaaggccttcaacatccgtgagatggtccaagtggccaccgagggcatcaagtccgtggtcagcgccatcctgatcctgtccctggcctactgcatcaacgccatctccaagacgctgggcacctccagctacgtcatcagcgtcaccgagagctggatgacccccgtgaccctgctggctctgaccttcgctgtctgtgccttcatggctttcttcaccggcaccagctggggcgtgtacgccatcatgatccccatcgtgatgcctctggccttcaatatgaccggcggtgaggccaacaatctggtgtacgccaccatcgctgctgtcatgggcggcggctgcttcggtgaccactgctcccccctgtccgacaccaccatcctgtcctctctgggcgcaggctccgaccatctggctcacaccaagacccagctgccctacgctctgaccgtggctgtcatcacctgcatcggctacaccatcatcggcttctgcctgaagtaagtatccgatcgctcactgcttgtgtgtttgtagaagagaccgccgggtcactattcccggcatgactacctatcataccgaaatcccccctgtttcacaggggggattttgccctatcctaaattctgcggccaagggccgaaaggagtcctcaccatggaacggatgcccagtatttttaacgacgtgctctccccggtgacgccggggccgtcctcctccaacacctgcggcccctaccgcatcgcacggctggcccgtgctctgctgggggagatgccccgccacatcaccgtccgcatggcccgccggggcgggtactacgacaccttttacagtatgcacagccacgaggccattctggcggcgctgctgggacaggagctgctgcgctgcgacctgagcaccatgtgccgtcaggccgacgaggctgggctttgctacgacttccaatttgtagatgacctgccggtaagaccctcagagctggcggagatggagctatccggcgaccgccgcaccatccggctgacaggggtgtcgctgggtggcggcgagatcgagatcacccgtctcaacggcagcgacatcctgctgcggggcaagcgccgggagacggtgtgtctcggcccggagggcgcccgtgtggtgccggaggataccgcagccgggcccggccagtggctggcccgactggagcctctgttccccttcccccagcaggagggagccgtccccttccgcacggcgcaggagatgcttgcctatgcccgtgacaccgggcgtccgctgtggcgggtggctttcgactatgaaagtgccctcaccggcgccacggaggcggagctgcgggcctacgcccggcaggtgctggatatctgccgccatgcacggcagcagggcgtccgcccggacaaccactttatcggtgtcaccgacgcccgtgccgcccgctataaggctctacgggaggggcggaagctcatcgatctgggggccgccgatgaggcgtgtctggatgccatgagcatcatggaattcagcaatgcccacggcaccatcgtctgtatgcccactggcggggcctccggcatcgtcccggcggcggtataccgcatcggagaacggctgggcaagaccgagacggagcaggagaacgccctgctggtagcggggctcatcggtgccttctactatcccacccactacaccggggccatcggctgtcaggcggagatcggcgtggcggtgtccatggccagcgccgccctgtgcagcatgatgaccgacgatcccgacaccatccactgcgccgcctcgctgggcggtcaggtactgatggggctgctctgcaaccccatcgagggctatgtgcaggttccctgcatcgtgcggaacatggccgccgtaccaaccgccgtcacctgtgccaatgcggcgctggccgggatggatcacatcgtgccgctggataacgtggtggccctgatgctggcggtgggcgaaaagatccgtccctgcgatgaggcggggacgtacatcctggaaaaggaggaagaataaatggttcgacagacattggcgcaggagatcacccaatatttgacggagcagggcgctgtgcgggtgggctttgccgacctccacggtgtggcgggggcatcgctgccctacggcatcacggcgctggtggcgctgccccgtgagatcgtagggccgctggcagatcagccccatcgggcctattacgatgcctatcaggccatcaatgtgcggctggacgccatggcagagggctgtgccgccctgctgcggacccatggctatcaggccacggccaacacggaggagcatctgcccaccggtgctgaggatcgctctcctctgcctcacaaggcggtggcctgccggtcgggactgggctggatcggaaaaaataacctcctgaccacccccgacttcggtggagccgtgcggctgtgtaccgtggtgacggatgccccgctgcctacggcggagcccattctctccagccgctgcggcagctgccgggtgtgcgtggacgcctgcccctcctccgctctgtacggcaccctgtggcacacggggctggaccgggacgatctgttcgaccacctgctgtgtgagcgcaccgcaaaggagcgaacaggccgttccttcggcatccccattgccatctgcggcaaatgcttcgccgtgtgtccctatacccagcgatacctgaaaaacggataaaaaaaccgccggacagtacaactgtccggcggttttcggttgaaaggcgtgtcccctgctgtgcgccgcttatacctgccgctctatgcagcgctggtacacatcccacaggtcgtcgctcatttcgtagaccatgcgccccatgcggatgccctccggcgtgcggccatagcggcacacggccaaatactcgtccccctcgttgcagcgggcataggccagcatggtattgccatccttccgggtccactcccccaaggtcaggggctggccgcagtaggggcaggtcagggccgtcagctgcggatccgcttgtgccgcaggcagatccgggtacggcagaccgcctacccggcccgccagccggtctgggccgtagtcgatgtagcgcaggcagtactcctccatgcagcgctccagatccatgctgccgcagacccggacggtgttgcgggcatcgttgagggcgtcgtgggcacgatccggcttcagccgcagcagctccatggcccgctccagtgagcattggcggtcatcccgcatgatctcatggccgaagatacgctggagatcgtagccgtcggggagggtggcgtccagtccgtgcatcagaaggttatccatcagcaccggcagatcatccggcccccaggtacacagacagcagtcctcgccgcaccagtcccggaaggcggcataggccgccgggaagtcgggagctttttccagctcctgcggccgtatcttggtgagctgcaccacatggccgttcatggccgggtagaacaccggccgcacgaagcttttgaactccgacacctcttcaaatcggttgttcagcttcagcgccccgatctcgatgatctccgaatcgaagcggaatggctgggtgatggtctcctgccccggcatgggctggttccactccagatccagcacgatataggaaaattcctccatactctctcccccgtcttgagcggtcatctctttcggccgccgtctctttcaaaatctgcttctttcgatatgagtataccacgctcccccgtccccggcaagcagaaaagggatatcccgtggggatatcccttttctggtatacaacggtcagtgggtcatggccatgagtgtgcggatgttctccagctgttccagagccatgatggcatcggccagagccctggcccgttccggcgtcagcttcgccgccgtgcagatgaagaattttttccgcagctcctcgtccggaattgggtcgctgagatgccccaccgggaaggcccgctccttgataaaggtgcggccatccttacagcggatggtaacgaaggccggacccacaccggcatcgctgggcagattgtcatactgcggttcgtggtacagctccgtgcggcggatgatgttctgcacctccggcagccggatagtctcccggttataattctctggtgcattggcccggcccgtgagatacaggccgatctgaaatcccacgctgaacttggcctcctcgccgtccgccgggttcggcgtcaccagctcccgtagagcggagatgcccagtccgacccggatgctctcgatctccgccgccgacagctgatttatccggatcagttccatgatgccgtccaccggccggtgggtgctggagcaggacggccagcgcttcagagtgaaccccggcgcacagatgtcccagtcgtggcccatagaggccatgatgcgatggaactcgtccccttcctcccgcaggtctgcgtactcgtagaggaagccctcctttccctccagcgccactgtggaggaggtaaaaccggcctgtgccagtcgggcggctcgataaccgtcctcggcgcacttgccgatgtggatggatttggtctgggtgccgaaattttcccgcaggccggaggccatggaggcggcaatgcccagtgcatggctggtctgctcttggctcagaccaagcagatacgcacagcctgcggcagcgcctatccctgcggtaacgctgctgcaatgccagcccttggcgtggagccgcttggcgcagatacgccccagcttgcacgtcacctctgtggcaatgaggaagccctccagcagcagccgcccggaacagccggtctcttcgcctatcgccagcagtgccggcagcaccgccacggtggggtgtcccaaattggaggaggacgtgtcatccagctccagctcatggccggagattccgttgacaaaggcggcatcccggccgcataatttttcgctgcggcccggcaccgtacagccgccgccctccgtcacggtgagggcctgccgcaccgccgccgtctcgctaccggcgatcatagcccccatggtgtccagaatggaccggcgggccagataaagtgcctgctgcgtaaaaggcgccggttccgccacaaagcgggcgatcatccgctgcagctccatgttacgcctcctccgccagctttccggccatggcgtagagggcctcccgcttttcgtccagataggctcgcttgctgcgccaatccgcctcaaagcgctccacggctccatggcccttgtcgatcatctcctgtacacgggcgggactggggcctccgatgacctgacggcgggtcacgttctccacggggtccagcgcatggtgaatttcctgctccgtcatatgcagctccatccccagcgcctcctgcgccgcacgggccacaaaggcactgtcaatggcgtggatggataccttctcctgctgggccatcgtgaccacccgaccggtgatcttcttggccgccgagaaggagagatcgtggtgctgcaccatggcatccgccaaatcggtcacagtggagaagccatccgccgtgacctgcagggcacgggccttgtccacctccagcgtgcggacgatcccctccagcagataggcgctgtcaatcatccgctgcacgatttcgtagtacaggctcaccacaaagcccggctcccggccgttgccctgcggataggccttcatggccgccagcatggacatcagggccccgtaggtccactctccggaatagcgcagcgtctccagcgccacggggttgcgcttttgcggcataatggtgctgtacgagcagtagggagcggccagccgggagatgcccacctcattgatgttccacagcagcagactctcggtcatacgacccatgttgttggcaaagatagccatggcacaggccggctcataggcaaagtccagcgcagcggtggcatccatggaattttccagaaatccgtcaaagcccagcagctccgccacacgctcccgattcaccgggaaactggtggtggccacggcagcgccacccatggtactcaggttcacacgggcatagctctccagcaggcgctccatatcacgggagaacatctggaagcagctggtgtagaagtggcccagcgtaatgggctgcgcctgctgggagtggtgggtgtaggcaggggtcaccgtctccttgtgttcctgcgccatcaccagcagcgtcttcagcagcagcgttatcgcctcgcacaggtccagaatggtgcgccgggcatgcatccgctcaatggtggaattcatgtcgttgcgggaacggcccgtgtggacccgcccgcctacctgaatccccagctcgtcgatgagccactcctccacattggagtaaaggtccgtcaggccgggacggaaggggatcttatccggccccatttccttcagcttcagcagggccttcaagatcgccgctgcgtcctgccgagtgatgatcttctgctccgccagcatgataacatgggcgaagtggttttccagctgactatcaaaggcacggatatcctcggcaatggtatctgccgcatggcggtccagaatcacggtgtcccgcccggcatagggcttgcaataatccatattcacagttgctccacctccttacgcaattttcttgccgaacagcctggtagccagcaggaacagcaccaccagaatcgccagcgccaccggcagggcgatgcccgccgccatctgggtcacacccacgatgagataggcgatgaaactggccaccgccgccagtagagcataggggatctgggtgcggacgtggtcaatatggttgcagccgccggccatagaggacatgacggtggtatcggagatgggggcgcagtgatcgccaaacagggagccggagagcacggcggcaatggtgatggcctcagacacaccgaagccgtaggccatattgatgcccagcggcagcaggatagccatggtgccccagctggtgccggtggcaaaggagatgacagcaccgatgataaacagcagagcgggaaccaacgccggggacaggaagccgatggtgcagtccaccacgaactgggaggtgcccagcgccgtgcagacggagccaacgccccaagcggcgatgatgatcgccagaataccggccatcttcttgatgccgctgacccacgtatccaccacctcagtgaaggtcatgatcttcttgacgatgaccatgatggcaagcacgatggtcgccagcatatagccagaggtcagtgcaatacggatcttggagccggggatattctggccggggaagccccagccgatgaacatgacgaaaatggtgacgaacatcaccagcagggggatgatcatctcccacgccgtggccttgttggcgttctcggactggacgatggacttgtcggcctccagctcagcggcggtgggaccattctccagtacgtaggtctcgaatttggccatggggccgaagtcccgcttactcagtgcgatgagggggaccagcaccagcgccagcagcgcatagaactggtaggggatggcctgtacaaaggcactggcatcgctggtctggatgcccagattttcaaactccgtggcgatgatgcccatgatgtacacgccccagccggtaatggggaccaggatgcacaccggggaggaggtggagtccagaatgtaggccagcttggcacgggaaatccgcagccggtcgaagatggggcggaagatgggccccaggatcaggctgttgccggagtcggagaagaagatcgccagtccgcccagccaagccgtggtctgggccgtgctgcggcggtggaccttgttggctatggccgccgcaaaggctttggctcctcccgtagcctcgatgagtgccacgaagccacccacaaaggacatcatgatgatggtctgtgcgttggatgagccggtcatgtccacaaacaggtgatcgctgaacatgacctgcatggcattccaggggttccagccagcagtgatgagacagcctacaaacaggctggccatcagagaaatgatgacgttcttcgtccagaatgcgaggacgaccgccagtattgccgggatcagtgacaatacgccataggatacgatttcttcggtcatgtgtgatttcctccttcgtaattttacacagggagcactcccttctccatagttttaagcaagccccatgccaaaaccgccgatattccctttgccgaatacgacatattttcccgtctcgtttcgtcactatgccccaagggtctcccccacgggaggggccgttttcactccaccgcaggcagcgccctccgctgccatgcactccttgccgaatgacggatttccgtcgctgctttcccgctatttttctgcacttcagtcaggagctcctgtcaccgccggcccacaggcggtctgcaggacgcctctcccctttccggcagtttttgctgtctccgccgcttatttcggtaattccgtccttcttttgccggatttatgcgttaattttgcacagtctatacaaagaaaacgcaggaacaaaccggccggtctgtccctgcgctcttccagcgacggatatccgtcttcaatatgacgaattaccgtcgtttgatatcgtatttttccagcttatactgcaggctggtgcgtgggatccgcagccgggccgctgcgtccacgatcttccagttgctggccttcatggccgctaaaatcagcttcttctcgtaggcggccaatgcctcgttgagggacaccgcctcccgtgggctatgctccggggtatcctcctccaactcatccacctcgctgaggtagatcggcagatgctccagctccaccgtctggccgtcctctaccacattcatggcagattcgatgacgtgctccagctcccggacattgcctcgccagctgcggttcatgaggaaggctgtcacctccggcgccacgcccgctacctgtttgcccatttcggcgctgtatttctccacaaatgccgccgccagaagggggatatcgtccagtctccgccgcaagggcgggatctggatgctgatggtattgatccggtacagaatatcctcccgcatctggccgctggccaccacctcgctgatcggccggttggtggatgcgatgatgcgtacatccagcgggatcggcttggaggctcccaacggtgtcaccgatttctcctgcagcacccgcagcagcttcgcctgaagcagcaacggcatggagttgatctcatcgagatagatggtgccgccgttggcctcggcaaacatcccctttttgttctccgccccggtaaatgcccccttctgggaaccgaacagcagtccctccagaatactctccggcagggcggcacagttcaccgccacaaagggctgatccttgcggctgccggcattgtgcagcgccgagacgatgagttcctttcccgtgcccgtctcgccgtacaccagcaccgaggagcggctgtccgccaccttggcaatggtgcgcttgatctccagcatcttgctgttctgggtgacgatatcctccagcgtccacttggcctcggtgccggagcggcgcttgggcgtcggccgggccgccggagccgtccgctccccctcatagtgggtcacatcccgtgacagctccacggccccaatgatctttccccggctgatgataggaaaggtcacgttgctggtcacggatttcttgccggagtggttgatggtacactgattctcccggtacagcaactcgcccttctgcagggtctgcaataaggtgctgtcgctgtggctcagggacggaaacacctccagcaggttgcggttgagacaccactcgttatccgcagcattctccgcatcgctatatcggggattgtagcgctccttcacagtgatcttgccagtggcgtcgatcatggtgacagaatcaatgtagctgaagttctcctgcagccagcgcaggcgctcgtcatgatacctcatcccatccgtcctttccgcctgccggagcatcaatcgaaatagaagccctcccgcaggtcgtcgttgtctgcaaacacaaatttgtggaagcccgtgatgcgggcctgtccggtgatctccgtgagatactccgtgcggccgttcttctcctcgacgcccttcaccacgccgataaagggtgcatccacgataccctcgtggacaaaaggctcatcgatggccagtttcccgttagcgcacagccacgccaccttggcgctggtgccggtgccgccgggggagcggtccggagagccatacccagagctgtggaccacccgcaggtccgcctccttggacttaggttcatcataccactgaaccagcgtcacggcaatgcctttctctgcaatgacctcccggatacgggcggaataatgcttgatgcgctccatataggagggctgtatcttgatgccgaaccgggccgccggtacgatagcaaacacgttgccgccgtaggccagattcaccggcacatccttcacatcatccacgtcgatccgcagttcgttttcaatgacgtagctgttgacgttgcggacggtggtgctgtacacatagtcctccttgaaattgttcttgatccacaccagacccgccggggtctcgatggcgtagcggtcccgatgggccttgggcaccagcccgatttcctgcagggcagtccctacgccgatgctggcatggccgcacatatccagatactgcacgtcgtccatgtagaagatgccgaaatccgcctccggcatggtgggcggcaccaccgcagcgcacagcatccccgcatggcctctgggctcgtaggtcagccgtgtgcggatatagtcatagtgttccttgaaatagtcccgcttctcccggacagaatttccctccagcttggggatgccgctgagaatgatccgggtcggttcgccgccggtatgggtgtccacagtctcgatcatttcctgaaaacgcatagtgtttccctcctgttttgtccggtatgctccggttttctgtcaaattgtaatagcaactcccatgccatgtccctccgcagggcataaaaaagccgccccggcgggcggcttttttcagcgaatgatggtattcccccggctgtcgatgcctacgatagcgtagaaattctccacctccagccggcaaatcgcctccggtcccagatcctcgtagcacacgggtgtttttttcttgacggcctccgccagcagcgccgcagcgccgccgatggtgataaagtacacggctccgtgctcccggatggcctgcaccacctctgcagaacggcggcccttcccgatcatgcccttcagtcccagcgccagcagcggcggcgtgtagggatccattcgatagctggtggtggggccggcggagccaatgacctcaccgggcttcgccggggagggccccacatagtaaatggtctcccccgccagttccaccggcagaggctttccctcctgcaagcagcggcacagccgctgatgggcggcgtcccgtgccgtatacagcgggccgctgagcagcacctcgtcccccgcctgcaaggccgcaatgtccgcttccgtcagcggcaatcggatatgcttcatgcgctccctcctttacagcaccgcatgggcgtgacgataggcgtggcagcagaggttcaccgccaccggcagtccggcaatgtgggtggggtacgtctcgatgtgtaccgccagtgccgtagtccttccgcctaagcccgccgggccaatgtccatgcggttgatctcgtccagcagctcccgctccatggcggcgtaagccggatccggatgctggcttcccaccggccgcatcagggcaaatttggacagctgggcacacttatcgaaagttcctccgatgcccacgcccactatgatcggcggacaggggttgggccccgccttttccaccgcagacaggatgaactcccggacacccttttctccgtcggcgggcttgagcatcttgatggtgctcatattctcgctgccgaagcccttgggcgcaaagaagagctccagcctgtctcccggcaccatctcatagtagatcaccgccggggtattatctccggtgttctcccgatgaaataccgggtcccgcaccacggattttctgagatagccctcccggtagccctgcgccatgccctgctggagcgcttcctccagcggctgacccacgatatggagctcctgccccagccgcacccgaaataccgccatgcccgtatcctgacacaggggcatggcccgccgggcggcgatttcatcattgcggatgagcttgtccagaatactccgggccaagggcttctcctcccggtcccgtccctgccgcaggctctccatcacgtctgcaccgatgcagcagttggcctgcaccaccatatccgccaccgtctggcagatcagcgccgtatccagctctctcatggctcagtgctccacatgggccttcacggcctcggccactacatccgccacgcccatgtcgaaggtgctgggaatgatgcactcccggctcagctcctccggggagacccgcccggcgatagcataggcggcggcgatcatcatttcctccgtgatccgtgaggcacgggccgccaacgctcccttgaagattccggggaataccaacaggttgttgatctgattggggaaatccgaccgaccggtggccaccaccttggcccccgccgccaacgccagctccggcataatctccggaaccgggtttgacagggcgaacaccatcgcctgcggtgacatggagcgcaccatctcctgcgtgacgatgccgggaccggagacaccgatgaacagatcggctccctccatgacctccgccagactgccctttcgcatggcccggttagtgaccttcgccatggccgtcttggccccgttcaggccctcccggccctcccaaatggccccctgccggtcgcagagggtgatatcccgcacccccgccttcatcagcagcttgcagatggagatgcccgcagcaccggcgccgctgatgaccgtctgcacctgcggcagctccagtcccagacacttggccccgttgatgagagccgcaagcaccaccaccgccgttccgtgctgatcgtcgtggaacacgggaatgtccagtgtttcgatgagccgctcctcgatctcgaagcaccggggcgccgaaatatcctccagattgataccgccgaagcccggtgctatcagctgcaccgcccgcacgatctcctccgggtccttggtgttcaggcagatggggtaggcatctacgccgccgaagcgcttaaagagacacgccttcccctccatcaccggcagagccgcctccggcccgatatcccccagacccagcaccgccgttccgtcggtgacgatggccacagcgtttcccttgcccgtatatcggtatacctgctcccgatcctgtgcgatctccaggcacggctccgctacccccggcgtatacgccagagacagatcatgcttggtctcgatgtccaccttcagcgacaccgccagcttcccccgatgcacctcgtgcagctgcagggtctcctctttcagcgtactcatatggtctcctccttatgtcgtgatggtcctgtgcggcaccttcaaaatggtgccgtatctatgattttatatagcaacttccatgccactttgctatctctgtcctcgccatatagcagaaaagccgcccgcagcggcttttctgctatatggcggcaagttttccggctttccccctcaccggtcgtcccggacgtctgtgatctcccccacaaagagcatgtgcggctgccagccgccctgaaagtccgggtacacctgcggcgcagcggcgtaatacgcctgaatttccggggccagatcatctctggagaattggtgctgatacagcttcttacagaggaaggtcagattcgcctcccggaaggtcacgccctgccccatgaccacaggcgtcagcccggcagcggcaatcttatcgccgtcccggccggagtgggagccgatataactcagcgcctttcggcagctctccgggtaaaagctcaccgtgaaaatgtcgctgtcccttaaaaactcactggtgtagcgggccggatggacatagaccgtaacgatggggcagctatgtcccgcatggccccagatatttcctaggcttccccagctgacggtacagctgttgtaatgcgccatggacccggcggtaacgatggcccactgcttatcaaacagctcaaaaatcttgtattccttcgccttgaatccctccatgggacacctcctacatcttcttgtgctccgcccacaccggtctattgtccctccatccctgcaagcttcaggaacttcttgtcgctctggatgccctgggtcaggaattttccgtcccgaaacaggacataggtggtcaccggcgacggcacattctgcgcctgctccctgctggtgacatggatgaccttcaagggaatatgatgcgccttggccgcctccaccactctcggcacccagtagtaggtgaagggacactgatccgtgtaatagagcacaaagccgctctcctccacaatgggctgtttggcgcagtccttgaatttcggcggctctgtacagggaacaagaggcagatacagcaattcgatcccgcatgcagaggtatccgccgttgtgaagcccttgtgcgccgggtacttcgggtcggagagaaactcacgcttccgtccttgggcggacagggtgcacagaccctttcgcccctgcgccttggcatcccggatgcactccgccagcaggtcattggagtagccgtggcctttcatggagccggaaacccacaggcagttaatgtagaggtatccctccgcttgaatgggaagccatgcgtactccgccgggatatattcgatgaagcacttgccccgctcccggctccggtaaaagacaagttcctccgcaaaccgctgcctgagccattccttcttgacaaggctctgtttgccggacatggcgcagcagatgtgctctccatcgatgttgtcctcggtgatccgaatataatccatggaagccctcctttgcctgcggagaattttctccgtcgcactttttaatagggtgccggataacggttcttcgcttttccggtgccaccttccgtgggtcggagagatagatctcgtggtggagccttgtctcgctgaaattactgacatagcctttctccgccagaaactcgtcagcggcacaatttcagcgtcattaatccccacgaaaaagatcacataaaaaacaagctcttattcctcggatacacccgtaccaccgtgacggtcctaccccgccatgagctctgtccgtaggccttaatgctcatatgagctcttcttcctatctttagggtatcataaacctctcagcggaacaagaacaaaacaagaaaaatttcccgtcatagctgcaagttggccatcataggcaaagaaaattcctgccgactttcatcggcaggaatttcgtttttggcaggggcagaaagattcgaactctcgacacgcggttttggagaccgctgctctaccagctgagctatacccctgtgtggtgggccttcggggactcgaacccgggaccggacggttatgagccgtctgctctaaccaactgagctaaaggcccaagtaatcggttctctcggtggacatcatggaaaaagaaagtgtgccgccaccttacgagtggcggcacacccttggcgccttctgtagggctcgaacctacaacccttcggttaacagccgaatgctctaccattgagctaagaaggcgtgttggcgctacctatctttccgggccgtctccagccaagtattgtgggcagaagcgagcttaacttccgtgttcgggatgggaacgggtggaccctcgccctaatcagcaccaactatgaaagcttacaccttcaaaaccgaacaaagaagaggatggaaggaaggccattgcctgcataaatcgtaggtcaagccctcgggctattagtaccggtcagctgcatacattactgcacttccacctccggcctatcaaccagatcgtctttctgggcccttactccataaaggatgagagatctcatcttagggagagtttcacgcttagatgctttcagcgtttatctcgtccgtacatagctacccagctatgcccttggcaggacaactggtgcaccag

SEQ ID NO: 12400 - DNA, 6698 bp, Unknown
  gut microbiota DNA sequence
aagctccgccccaccctctgggacggtgcagtggcagcgctggtggccactctggccatcgtgacggctctgtgcttctacggccgccgcaccggcgccccccagaccgtcaccatcacccaccggggcgctctggttcagaccatccgcctcaccggcctgacggagacaaaaaccgtcgccatcgacggcgactaccatctggagattcaggtggacagcggcggtgtctgcgttacccgcagcgactgtccggggcaggactgcgttcacaccggccgcatcacccgctccggccagagcatcgtctgcctgccggagcaggtggtcatccaactcaccggcggcacatcggacgccgatgtggtgttgggatagggggcggcgcatgaaacatatctccacccgacagctggctctgtgcgccgtgttgacggcgctggcactggggctcagcacgctggaaaacctctttcccgtgacgctgctgatccccctgcccggcgtgaagctgggccttgccaacatcgtcaccgtgttcgccctgtatcagctgggcgctctcccggcgctggccatcctcacggcccggtgcctgctgggcagtctcttcgccggaaacgcctctgccatgctcttttccctgctggggggcctcaccgccatgctggtgatgatcctcctgcgccgcctgaaggggctgtccatctacggtgtctccatcggcggcgctgcgggccacaatctgggccagatggcggctgccctcatcacgctgggcaacaccgccgtactgggctaccttcccttcctgctgggcatctccctgctgacggggaccctcacgggcttcgtctcctctctgctgttccgggccatggcccatatcaaactctcgacaaaggagtaatcgacaatggataaaaaagacgagatcatcctccagcagctggaggtcatccgcaccatgacggagcgcaacctccgcagcatgggcgacgatttttggggcactcccttcgagggtgtcctgtcccccaagtccccctccgccccgccctccggcgggaagcctgtgggcagcgccgacggcaaaatgcccgcccagccgtccgatggcaagaccgccggtggtcagcctgccgccaagaccgagaaagcagaggtggtggagcccctgcccaaggaggacatgaaggacctgcaggcggagctggacagctacatcggccttgccaccgtcaaggaggaggtccgcaacctcatcaacatggcctccgtctacaagcttcgccgccagcacgacctgcccaccacggatatgtccctgcacatggtgttcaccggcaaccccggcaccggcaagaccatgatggcccggatgatggcccggatctaccggagtctggacatcctctccaagggccagctggtagaggtagaccgcagcggtctggtagccggatatgtgggccagaccgccatcaagacccaaaaggtcatccagaaggcgatcggcggcgtgctgttcatcgacgaggcctatgccctcaacggtaagagcgagaacgacttcggtcaggaggccatcgacaccatcctcaaggccatggaggatcaccgggacgacctggtggtcatcgtggcgggctacaccgatctgatggatcggttcatccactccaatcccggactggaatcccgcttcaaccgtttcctgctcttcgaggactacacccccgatgagatgctggacatcttcaagatgcagtgcaaaaagggctgctatcagttgtcggacggcgtggaggagctggtgcgggactacatcaccgaggaaaacggcgacccggaaaccttcggcaacgcccgtggcgtgcggaacatctttgagcacattctggtggcccagaataaccgtctggccgccatggagaccgtcaccaaggaggacctgatgaccctcacacaggatgacgtcctccacgccagagggaagctggactgacaaaaaatgtcggaaagcgtgaaaaacctcttgcatccggctccaaaagagcatatactgttaaggttgatgtaaaactatacccacgaaaagaaaggggtttttcctttgcagaacgaaaaactgagaaacgtagccatcatcgcccacgtggaccacggcaagaccacgctggtggatcagatgctcaagcagggtggcgtgtaccgggagaatcaggagacggtggagcgtgtcatggactccaacgatctggagcgtgagcgtggcatcaccattctggccaagaacaccgccatccagtacggcgacaccaagatcaacatcgtggacacgccgggccatgccgacttcggcggtgaggtggagcgcatcctgaaaatggtcaacggcgttatcctgctggtggacgccgctgaggggcccatgccccagacccgctttgtgctgagccgtgcgctggagctgggccaccgggtcatcgtggtggtcaacaagatcgaccgccccgaccagcgcatccacgaggtcatcgacgaggtgctggagctgctgctggatctggacgccaccccggagcagctggattcccccatgctgttctgctcggcccgtcagggcgtggcctcctactcccccgacgtccccggcacggatctcaagcccctgttcgacaccatcctcagctacattcccgccccggaggcggatctggatcagcccttccagatgctggtgtcctccatcgactataacgagttcgtggggcgcatcgccatcggacgcatcgagcgtggtgtgctgaagcagaaccaggagatcgccgtctgcaactaccacgaccccgacgcccccgccaagaaggccaaggccgtctccatgtacgagttcgagggactgggcaagaagcccatcaccgaggccaccgccggcaacatcatcgccctgtccggcatccccgatatcaccatcggtgataccatctgcgccacctcctgtgtggagcctcttcccttcgtgaagatctccgctcccaccatggagatgaccttctccgtcaacgactccccctatgccgggcgtgagggcaagttcgtcacctcccgccagctgcgggagcggctgttccgtgagaccctgaaggatgtctccctgcgggtcacggagctggatggcgccaccgacgccttcaacgtggcgggccgtggcgaaatgagtctgtccatcctcattgagaccatgcgccgggagggctatgagttccaggtctctcccccccgtgtgctgtaccagaccatcgacggcaagaagtgtgagcccatcgagcggctggtggtggatgtccccagcgagtccgtgggcgccgtcatcgagaagctgggcgcccggaagggcgatctgctggagatgacccccgtgggcagccgcatgaagctggagtttctgatccccgcccgcggcctgttcggctaccgcaacgagttcctgacggatacccgtggcgagggcatcatggcctccgtgttcgacagctacgccccctataagggcgacctgaaccggcgcaacaccggctctctggtggctttcgagaccggcgagtccgtcagctacggtctgttcaatgcgcaggaccgtggcgccctgttcatcggccccggcgtaaaggtctacgagggcatggtggtgggtgtcagtcccaagcaggaggacatcaccgtcaacgtctgcaagaagaagcagatgaccaatatgcgggccgccggctccgacgatgccctgcggctggtgccgccccgccgtctgagtctggagcagtgtctggagtttctggccgacgacgaactgctggaggtcacaccggagaatctccgtatccgcaagaccatcctcaaccatgaaaagcgcatgaaggcctcccacggcggcaagaaaaagtaaacagcaacaagcagcgagggccgttggccctcgctgtttgtcatctgcccctttacgactgcaccgctgcactccccggcagctccgtgtcatctcacttcaaccggactgtgcgctctgctggtggccgtggcgctgttcctgtcctgcggcgaaaaggagtacgcctttctggagaaggagccgccggaggtgccgccggagcggagttgggtcatctggacggtggccggtgtgttgttcggtgccgtgatgacggtgatgcggctgctgaaccgaaaaaaataccccccaaggggctttagccaaaaggcccggaggtctgtgacctccgggccttcgtttgttttccgacagctcctctttacttcttgaagctgtccttcagagaaacgctgcggttgaacaccagatgctccgccgtgcagtcccggttatccatgcagaaatagccggtccgcatgaactggaaggtgggtgcgttgacgccggtacggttctcccggcggtcgaactcctctgccacagcggccatgctgcgttccaccttgcagccccgcagcaccatcagggagtcgggattcaggcagtccaggaaattcttgtccgggccgtcgggctggggatcggagaacaggttatcgtacagccgcacctcggcatccagacagttgtcggcatccacccagtggagggtagcgcccttgaccttccgcccgtcggcgggatcgccgccccggctgttgggatcgtactcgcacagcacctccgtcacatggccgttctcgtccttgacgcagccggtgcagcggatgaggtaggcgcccttcagacggcactccgggccgtcggggtacaggcgcttatacttgggaataggcatctccagaaaatcctccgtctcgatccacaggtggcggccgaaggtgatctcatgggtaccctgcgtgggatcggtggggttattctccacagtgaaggtctcgctctgtccttccggatagttggtgaccgtgagcttcaccgggtgcagcaccgccatggtgcgctgggccgtggcgttgagatcctcccgcaggcaatgctccaaaaagccgtactccacagtgttgggggacttagccacgccgatgcgctcgcagaaattgcggatggagcgggcagtatagccccggcggcgcaggccgcatagggtgggcatccgggggtcatcccagccggagaccagcttctcctccaccagctgacgcagcttgcgcttggacatcaccgtgtggtcaatgcccagacgggcaaactcgatctgccggggcttgtaataggggatggagacattgctcaccacccagtcatacagcggtcggtgggactcgaactccagtgagcacaggctgtgggtgatgccctccagagcatcctgaatggggtgggcaaagtcgtacatggggtagatgcaccacttggtaccctgccggtggtgattgatgaagcggatgcggtagatgatggggtcacgaaggttcagattgccgctggccagatcgatcttggcccggagggtcatctttccctcctccacctcaccgttcttcatcttttcgaacagccgcagattttcctcgatgggccggtcccgatagggggaggtagcggggatgccgatgtcgccccggttggccttgaactcctctggcgtcagctcgcagacgtaggccagccccttcttgatgagctccacggcatactcgtagtccttctcgaagtagtcggagccgtagaaaaagcggtcgccccagtcaaagcccagccaatggatatcctgctggatggcgtccacgtactcggtgtcctccttagcggggttggtgtcatccatgcggaggttgcagagaccgccgaacttctcggcggtgccgaagtcgatgcacagggccttgcagtgtccgatgtgcagatagccgttgggttccggcggaaaccgggtgtggacggtctgtccctggaactgaccaccctctgcgatgtcctggtcgattaggttcaaaataaagtttctgctctcctccgtctcaggggcggcggtgtttcgttcctcggtcattgtctcacactccttgtcacattacaaaaatacggcgggatgacccgctaaaacaatgtaatattatacccaccgccgtcggaaaaagcaagcccttttcccgattatcggatggatgttgatttacaattatatcgcaaataggcagcggctgcgctgcgtgctgcaaattaacgaaagaaggtattagcgtattacctccgtagtgaattgggggtcaatccttttgcttatggagcaatcaaggacgagccatttgtattttgataaaacgcagtaggagcgggaggtttgcacttcccgctccgttttcgttgtctgacagatataaataccgccgccacccatgcgccccgtgtaaagccgtcagcggcccttagcagccattttgattttcgcgccactcgctttcatttgcgccagcggggaaaagttgtcgtagttcttcgtcaaatccgcgtcgtaaatggcacaatagtgttttgtcatagcaagggtggaatgtcccaatagcttttggagcgtaaatgcgtccccgccgcagtcaatcagatatttccgtgcgaatgtgtggcggaacaggtgaatagaagttttttgcactccgtgccgcatgttgtatcttgcgatagattgccgcaagccgtt

SEQ ID NO: 12401 - DNA, 895 bp, Unknown
  gut microbiota DNA sequence
aatgttccgcagaagcgggcgtgtatcttgtaaattaaacaatgaacgaacaaaagcaccagacgggagcacatgaaaatgtgcgacgaaacttggtggagcagggttaagtcaattacctgcgaagctaagtataaaaagtttttgaagctatgacaaatagctctgtaacgagattagctcagcggagacgctgtgttgatacgatttatagagagtttgatcctggctcaggacgaacgctggcggcgtgcttaacacatgcaagtcgaacgagaatctacggatcgaggattcgtccaagagaagtagaggacagtggcggacgggtgagtaacgcgtgaggaacctgcctttcagagggggacaacagttggaaacgactgctaataccgcatgacacattggagtcgcatggctctgatgtcaaagatttatcgctgaaagatggcctcgcgtctgattagctagttggtgaggtaacggcccaccaaggcgacgatcagtagccggactgagaggttgaccggccacattgggactgagatacggcccagactcctacgggaggcagcagtggggaatattgggcaatgggcgcaagcctgacccagcaacgccgcgtgaaggaagaaggctttcgggttgtaaacttcttttgtcagggacgagtagaagacggtacctgacgaataagccacggctaactacgtgccagcagccgcggtaatacgtaggtggcaagcgttgtccggatttactgggtgtaaagggcgtgtagccgggaaggcaagtcagatgtgaaatccacgggctcaactcgtgaactgcatttgaaactgtttttcttgagtatcggagaggcaatcggaattcctagtgtagcggtgaaatg

SEQ ID NO: 12402 - DNA, 359 bp, Unknown
  gut microbiota DNA sequence
atgcagtagtagttgaaggggatctggctcaggaacatgctgatacgggagccggggaagccgtcgggcacgtaggatgcaacggcagcggcccaagaggacacgggagccagcatacagacgggagcggcggtggcatcaatgacgtaggccagcttggcacgggagatcttgtggctctccgtcacgggacgcatcacggcgcccacggtcaggcagttgaaatagtcgtcgatgaagatcagcacgcccagcagcatggtcagcagctgcgcaccggagcgggtcttcacggccttcttggcccagcggccgaaggcagcggaaccgccggccttgttcatcaggtccaccatgat

SEQ ID NO: 12403 - DNA, 2891 bp, Unknown
  gut microbiota DNA sequence
acgcacgatctcatgcacggtggcgggtacggccgccacacggtattcattgcccttgatttccttcaatactccgatgaccattttttgttacctcactttcgggaagcaaagctctcgtcaatttcacaatagatggttcaaagatcgaaacatcttttgttgagagtattgtatacaatatcgaacgcaaggtcaagttaaggtatcgttcacaactgtgacacaagaataaataaaccgttaaacggtcgtgagaatgcgacggaaaccgcccgacggtacaggacttcgtccgccggacaaaacaaattgccctgcaccataaaatgtggtgcagggcaatatctttatgcttgctttacggcaaagggtgtgctatcatcacagctgttgggattcccggacacattcctccgccagctgcaggtcctccatcagggccagcacgcccttctgctcgtcccggtcccggaacgcctcgaagatgcgaaggtggagatccagcgacagactgttggtggtggagctgtcccagaacagcaggtaggtagcgaccttgttctgcaattcgttgagatacttctcatagtaggcgttctgggcctccatggtgatgatccaatggaactcccgattcagctggacatactccgtcatgttaaagaggttcgtcaaatcctgctgcttttgcaggttctgctccatctgaaggacgctctcatcactgcggcgatggacggcggcccggaaggcccccacctccagcacagcccgtgcctcatacacctgccgcagatccgtggcggagggctttgccaccacggcgccccggttgggctgctgctggatgagaccgtcataggccagccgcatcagcgccgagcgcaccggagtccggctgacaccggtctcccgcaccagatcctcttccacgatgcgggtgccgggatagatggccttggtgacgatctgatttttgatgtaatcgtagacgatatccgccggattcccctgtttcattctctgatctctcccattccctatttttggcccgtggcctatatcaaaaaactgtcattcgatcaaaaagaaagaagtggaccgctatgaaaaacaagacctttctggcaaactgtgcgctggtgctgtgtgcagttatctggggcatgaatttcatcttccagaagcaggcctcccagcatctgggggccttcaccttcatctccctgcggtactatctgggcgttctgtccctgctgcccttgtttttctatatgcgccgccgcaaggctctcgccgctctggaggccggcgaggaggtggagcggtggcacggcaggcgcttctggctggcggccttgggagccagccttgccaactggggcggtgcggtgctggtacagatcggtctccatgtggccgacgccaccaaggccggcttcatcgaatccgcctacatcgcactggtgccggtgctggacctgctgctgttccggaaaaagacctcccgccgggtatggatcggcatcgccatggccatagtgggcctgtatctgttgtgcatctccgacggcttctcactggacgtgaacgatgccgccatcatggccagcaccctgtgcttcgccctgcatatcctgctgtggagtcggttttcaccccacgtggacgccctgcccttcatggtggtggagttcctctgcaccggtaccctgtcgggactggtggcccttttcaccgagagcctgacgctggccgacctgacggcggccgtggcgccgctgctgtttgccggcgtgctgggggtaggcgttacctacaccatccagatctacgcccagcggttcacccccgcctcggtggcggccctgctcatgagcatggaggcggtgttcagcgccgtgggcggcgtcatcatcctccacgagatgctgtccgtccgggagtgggtgggctgcggcatcatgctgctgaccatcttttatgtccaactgccccatcgggagcctgtcaagcgggagcctgtcaaggccgcctgaaaccgcataccccgccgggacgccgcaggtgtcccggcgcttttttacagagggacattgattttccgcatatcctcccatgcgatctggatatcctcccggaggcccaaaagacccttctccagatcccggtcccgcagagcctcatagatcatggtgtggctgacaatggagttgttgtcgctggactgatcgtagaagatcatgtaggtgttgatcttgttgtacagctcgttgagatacttctcatagtacttgttggcggaggcctccaccaccaaccagtggaatgtgtggttcaaggtcacatattcctgccgggaataatgctgggtcagcacctcctgggccttgagattctcctccatggcccgcagctgggcctcggtgcggtggcggatggcgtcctccagcatcccatgctccagcacctcacggacccgatatacctgccgcagatcctcctcgctgggcttggccacaaaggccccccggttggggatcatctccaccagtccctcgtatttcagccgcagcagcgccggacggatggaggtgcggctggtgccggtctcccggatgatgtcgtcctcgatgatgcggttgccggggaacatggatttgcctatgatctgattcttcacgtactggtatacgatatcctgcggttttgccttcttcataacttcaatccctcatctccctgtctgtgtgtatcccggagggacaaaaacgcagaacataggtattttaaccacactattatacagcaactctccagaagaatccactgtttttatgaatcttaataaaaatttattataaaccttttataagaaattatcaact

SEQ ID NO: 12404 - DNA, 1337 bp, Unknown
  gut microbiota DNA sequence
aaaccgatgtgttcagagaaggagaggagcaggctgtagaataggcagagtgccagtcctaccaataaatactgcaaggcatgaatgcgggtcttgttcatgatttcagtgaagaagataactccgaaagtcagtaggataatcagaatggcatactttgcggaacgcatagactgttggtactgttccaccggaattttgaagttcacaccgaaactggaactctcaatatccttgatatttgaggtgttgaagtcaaccatcacttgtgagtaattccggttcaagtttaaaacttgccattgtgcggaaaattccttctccgtaatattccggttgttaggcagatagtttccggtaaagctcggtgtattccagttggctttcagatctacacgggttgttttacccaatggaataaagttgagtgactgtgaacctttcagtttgatttttatttcgtatggcagttttttgttctgcttcaactccgacaaattagcgatcgcatgaactccggtgttagctattcctctgttgtccatacccggttcgaatatataaacagaatctcccaaggtgatgctgatttgttcgctgataccccgcatatcggtcaggttcaagcaaatagctgccctgtcaaactgcaactggtccatgtctattctgctctttttcaattcttccgaactgaatgaacctttcaatgtcagttccgattgatatacattgacctcatagatacttcttttcaggatttcagtcttcagttgtccattgaccataagctcgtcaggaaaaagtatcaggtctttgatggaaaccttcttctcaccgttgttttcagtgacaaccggatactggagattcaggtaagggccagtgatggtctgtgcaagactccatttttcgcttacctcgtcgatagcttcttcctgggttcgtccccgttcggaaataagattctcaatcataaacatgggtatcatcaggagaaggattaataatccgatgatgacaaccttgattgttttggagaaacggtggaggcatcccataggttgctgcgcctgttgctcatttaaattttcattgaaagcgtccataagccagtagtgttttgatgaattatttattttgattttagaaatttctctaaggcttcaatatgcgatttgaaagcttctctgccttgcggggttgcctgaaaaacagtccgtggctttcgtccgacaaaacttttgttgcatacgatatatcccagttcttctagggcacgggtatggctggcaagattgccgtcggtcagagagagctgctctttcagaaaattg

SEQ ID NO: 12405 - DNA, 2459 bp, Unknown
  gut microbiota DNA sequence
tcggtcaggttcttggctgcaagctcccgcatggccttgtcccaggtttcacagtcggccagcagcttcttggcggcactgcgggcgcgggtccaggagggcttgctctcggcattgacttccagagaaaggcttgcatcctttccgcaccactggatttctccctcgaaggtatcatagtccttgtccagcttcagttcacccagcacctggtcctggatcaccaccggcttgtggtactcgtccagaacggcttgaagttccggacagtcctcgtgggccttgaccacctgggagatacaccagggccatgccaccagatcttttgcccattcctctttcatctggcggatcttcaggcggcagatctgctcgttttgaaagcgttcccagcccttttcgctgttacgctcctcatcggtgaccggccactccagccgctcctctttggtgctgaccttgccggtgtcacaaaataccacgcccagcgtcacaacggtcatttcccaaaagttgcctttccagttaaatccgcctccgatgcagcgattgatcagagcgaccacttcctgctcctcgggctcgtacatctcatagaattcttcaaacatgggtgtgatctcctttacagcagttcccgcactgcggcagcaggctgggcaaactccgccgggacttgctccaatacatcctggtaggctttcaccgcttgccaggagtagtaatagaagctgtagaacaggtcatcggggaagacctcgtcctcctcgtagcgcatctcatcttcttcctcgtcgtattcctccgaccacagatattcttccttcagcaaatcggagaacagcggaagcgcctcggcgtgttccatctcatccccaccgtggaagcactggaggatgcaggcaaagaagtccagcagttccccggccaggaaatgggccacggggttctgcccgctctctgcgagggctttctccagaatccggttcaggaacaccatgccgaagggggtagcgtgccacagggtactctggtgctccatgttggtggtgagctcatagagggactttttgactgtctctatatcctccatctgctccagcaccgccagatgcgcgggaaagtccgtcccccggccataggcggtggtgagccggtgccacgggacatccgtgaccttgagatgggtgatataggttctgttttcttctgtcatgttgccgcctccttattctgctgtttggctgcggtactccttctccagagcgatgtaccaccgttgcagcatggtttccagactggtttttcctttccgatcataaaaagcaaggaacttgtccagcagcgcaggaaacaaattcttaccgatatttgtcagatcctgattgagatagaccatccgcaggatacggccctgccggtccagagggttctttttcagcagttccttttcaaagcagaagcgcagaaacaccacattctcgtcgtagaagtcctccaccacagccgcgccaatgctggtgtatgtgatgtcgtacaccaaccggctccagtcaaatttctcggcatagagcagtttcagcgccttctcccaatgttcctccgggatcaccagcatcctgtgctgggcggtgctggagtagccgcagtagacgggttccggctgtcccagcagctcactcacgctgtcggcgtagacgaagcacagctcctcatcgaacaggccgccgatgaagttgccattgcagtacagcatataattcttggacttggctggagaataagagaggctgtattcctgcgaatccaggcttttatgtactttatttagaaagtctatggatgtcatggctttactcctcaaactcaccctcgatcatcccgttcagataccggccgggatctgcgatgaagtcatcccatttggccagagggtggaattcctcatgctcgatgtccagataccacagctttttgtccctggggctccacagcagcagatagtcgctgtaattgtccatggccgccataagtgagagcagctttttccgtttccatgtcatctcctgcacatccatgtaggagtagagctccgcccacttcacccatttctgatccgggaactccaagcgcagggggccggtcttcaagtattccaccagccgggcgggcagcttgtagggcatgagctgccggactttttcctgttcattgtgccattcctccggttccaggcccttcaggtaatcagccatctcctgattcctgttctgaactgccacgctgtaagggcggtcgccgtatttgtcagcaatggtgatgtcggctccttgctcaatgagccagcgcaccatggggagattcttatgccgagccgcttcggtgacagcggtagaggcgttcggaaacaccatgtccggcttgtggtaattgatgtctgcccctttttccagaagcag

SEQ ID NO: 12406 - DNA, 4198 bp, Unknown
  gut microbiota DNA sequence
aagttcgctgacatggtggtcatcgaccgtgacatcttccacatccccgaaaacgacattaaggatattcaggtgctgaacacctacatggccggcatcgagagatatcaccgcgactgatatgcgcggcacaacaaacaaaggggctaagacatgaaattacattcttttgacaaggtcaagcagttgacggaggatatggtcgccatccccagcatcaacaaggagccgggcggcgagagcgccgtagcccgctatatgcaggacttctatatgtccctaccctactttcaggcgcaccccgagcaggtcaagtgcttccagaccaagaacgacttcgtggtgcggcatagtacgctggcctatgtgaagggcaccaagggcaattctaaccgcacggtcatcctcatcggccacatcgacaccgtgggggtggacgattttggcaccatccgcgagtatgccttccgctgcgaggaactgcccgccaagctgcgcgagacattcgtgctgcctcaggaggtcattgacgacatcgagtccggcgagtatctgtttggccgcggcgcgctggacatgaagtccggcgtagccggccatatgtacctgatccagtatttctccgagcatcccgaggagctggatggcaacctgctggccatcggcgagtgcgacgaggaggacaactccaagggcatcatcacggctctggacctgctggaggagctgaaggaaaaagaacacttcgagtatgtggcgtgcatcaacgccgactactccaccaactacgcccccggcgatgaaaaccgctacatctattacggcagcatcggcaagctgctgccctgcttcgccgtgttcggcaaggaggcccatgtggggcaggccttcagtgcactggaccccaacctggtgctggccaacatcacgcggaagatgtgcctgaacaccggcctgtgcgacatcgcccagggcgaggtcgccatcccgcccatctccctgaaacaaatggacaccaagggcccctacaccgtgcagacggcgctgacggccttcggctactacaacttcttcacccacggctggagccctgccatcgtgctggaaaagagcaagcagatggctgtggaggcctttgacgaaacggtggagtacctgaacgcccagtacaagcgcttctgtgagctgagcaaggtggacttccatcagctgccctggaagacccgtgtttacacctggaacgagttctacaacgagctggccgctgcgcacggcgaggcgttcaagaaggccattcacgagtttgccgtgaagctgcataaggacgaccccgagctggatctgcggctgttcggcctgcgtgtggtgcaggaggcttggaagtggtctgaggacaagtcccccgccgtggtagtgttcttcggctctatcttcagcgcccgtatcgagatgaccggccgcacggccaaggaaaaggctctgctgggcgcggtggagagcgccatcgaggtggtgcggcccgaggcccagcgccagatcaagacccgtatgttctacccctacatctcggactccagttttatggccgtgtgcgacgatacgctggctattcaggcactggagacgaatatgcctcagtacggcgtaaaatacacgcacccggtggataagatccgtcagatcgacgtccccgttgtcaatatcggtaccttcggccgcgacggacacatgctcaccgagcgcgtggatatgcggcagacgttccagaatgtcccaaatatcacctatgagacggtgaagcgtctgctgagctgagagatcttcccctacccactgagaaatccaggcaaaagcacagaaaacgcacagacacaaaacgcgatcccagagaaaaccacagaaagcgcacagacgcaaaacgcaatcccagagaaaaccacacattgcttcgcgtgaaaggagaaaaagtatggctattttgaaggtgattcaagacttcggcaactggttctggggcattcccattctgatcctcatcggcggcgggggcctgttcctgaccatctatctgggcttcccccagctccggcactttggctacgccatgagccagaccttcggtaaggtgtttgccaagaaggaagagggtaaggtccgtcccatttccgccgcattcgcggcgcttgcctgcgccgtcggcgcctccaatatcgtcggtgtgcctgtggccatcgccctgggcggccccggcgccgtgttctggatatgggtcctggccatcctcggtatgtgtaccaagtactgcgaggtcgcgctgggcatcaagtaccgccgtaagaacgacgtgggcgagtgggtcggcggcccggcttactacctgcgcggtctgggcaagaagatcggcgtcgtgttcggcgtcggctacgccttcttcttcatgattgagctggttccctccctggcctctcagggtgtctccgctgctgagcagttcaacgtgttcggcgcaaaccagactatcaccggtatcatcattgctgttctggtgggcgtgattctggccggcggcttcaagcgtgtgtccagcgtcaccgacattctggttcctgtgatggcctgcctgtacgtggcgggcgcgctggtcatcatcttcgccaacgtgggtgagctccccgctgttttcagcatgattttccagaacgccttcaccggccacgccgctgtgggcggcttcaccggcgctaccattatggcagcgatccgctggggcgccgcccgtggtgtgtactccaatgaggcgggcgtgggctccaccattgccggtcactgcaccgccgaaacggatcaccccatccgtcaggcccagttcggtatcttcgaggtctttatggataccatcgtcatctgcaccatcacctctctggccgttctggcctccggcgtgtggacgcaggagggactgagctccggccagctggcactggctgcgttccagtccgtgtttggcaacttcggcgctatcttcgtcgccgtcacggtgttcctgttcgtgttctccacgatcatctccgccggcttcttcggtcagatccaggctgagatcctgttcggccgcaagttctccaaggtatgggtgtatatttatcccctgttcatctgcatcgcctgtgcgttctccaacgtgaccaccatgtatatgatcctcgacggcttcctgggcgtggtcgtcatcctgaacatgattggcctggtgttcatgtgcaagcaggtgaaggatctgcagaaggagtattacaatactcccggtatgtactatctggctgacaaggctgccaaggaagccaagagagccaagaaggcggcaaagtaatggctgacgcactctgcggcaggtagcaatataagtaaagcgtagggagccggtcatttgaccagctccctacgctttatgactccttcagccaccgctggaagtcctccaaggcgatggtcccctcgtcgcattcctttttctgcgctctggcttgttcgctccaagcgtagaaatcctcatcggatatgcgcccggccttgatccacgcaaagcgccgcttgtattccttgcggtaagccttgaagatcgggtcatccgaccgcttcttcgtccactgtttgaaagccccgatctcccgacagacctgctctcctcttggaacaggccgctcgcaatactccgcgctgacccgcccggtctgcggaaaccatcgtccgcagttcttgcagcgccgcacggtgatgttccgctccacgcagctccgcagagagtagtcgatcatatcccgaatgccggaggaatacagcaccggcgaacaccgccccggctccaccggctcaaagctgagcgggatggggcggaacgaaaacaggccgggatctttcggagagtcgtgaaagtaattttttgccgcctgtgcctgcggctcccgtcccgcgctgtccacatccagtatcaaatcgaaaaagcgttgcacctgctgctggtacagcggaagctgttcagggagctggtgcagctcatccagtatctgcgcatcctccgcactgcctcggtcgttccgaataaatattgctgtctggcggtagtaacagtggacatagagaagttgaaaataaatgtgtacggaggctaattcgcccagctttttcatggcactctcca

SEQ ID NO: 12407 - DNA, 6980 bp, Unknown
  gut microbiota DNA sequence
cactccaccctgctgcaaacgggacacatccgtgccgggatgttctgcttttacaccaatctcagcaaccttctggtgctggtgtatgagctggcgctggccattgccgccggcctcccccacagcgccgtcctgcgtctgctgacggacgataccctcagcttctccatggcgttatgcatcctcgtgacccatctggtatatcagttcgttctggtgccggacgccaagcgaaatggcaagcgctttgccgactttggtgccagcttcggcaacctctgtgtccactatctgacgcccctgctggtggtagcccagtggctgctgctggcagataaatcctccctcggctggcgcagcgccctatggtggttgacgctgccgctggcctacttcgcctttgccatgctccggggccgcagcggcaaacccatcggccacacccgtctggtgtatccctacccgtttctggacctgccccggctgggctggcggaaattcaccggatatgtgatggggatgctgctgagcttctttctgctgggctatggcatgatgtggctgggtcggctggtaggaacgcctctggcatgaaaaagaggacagggacaagccgtttcgcttgtccctgtccttttctatatcacttcttccgcttcttggcaaaagcagctttcttggccggggacatcttccccttctggccgggaaccgatccgccattgcggcgggacacatcaggccgcttaccgcctctatgctccgaacgtcctccgtgatgcacctcccggcggagatttccctctccgccgtgctgtccggggcgccgcttttccccggagggctgctgctccggctgcttgccgaagtacttctcccccttctggggtcgaatgaggcactccggcgtatagccgatgagatcggtgcggcctgccctctccagtgcctctatgacaagcccccgcagctctggccgcttccactggagcaacgcccgctgaagggccttttcatgggggtcacgggccacatacaccggcgtcatatcccgtggatcgatgccggtatagtacatacaggtggaaagggtgccgggggtgggatagaagtcctgcacctgctggggctggtggccggtgcggtgcagaaactctgccagccggacggaatcctccagcgtgcagccagggtgagaggacatgaggtacggcaccagatactgctgcttgccctccttctcattgagcttctgatactgccgccagaatcgctcaaacacatcgaagtggggctttcccatatagtccagcaccgaggccacgcagtgctctggtgccaccttcagctgtccgctgatgtggtagtccaccagttcccggaaaaaatcctgatttttgtcctgcaaaagataatcgtagcgaataccactgcggacgaacaccttcttcacgccatccacccgccgcaggcgctgcaaaagcgccgtatactccgagtggtcggcgtccagattcctacacggctccggggccagacagctgcggcccttgcacatcccccgccgcttctgctgggcgcaggaggtgtggcggaagttggcggagggacctcccacatcgtggatatagcccttgaacttcgggtcctgcgtcagcagctccgcctcccgcaccacggactcgatggagcgggaggtgaccatgcgcccctgatgaaaggccagtgcgcagaagttgcagccgccgaagcagccccggttgtgggtgatggagaagcgtacctcctcgatggcgggaacctcctcccgatacatggggtgaacctcccggacatagggcaagtcgtacagggcatccagtgcctcccggctcagtggacgggccggcggattcaccaccagcacccggccctgacagggctgcagcacggcgcacccccggatgggatcgtgctcgtcgtactggatcttggtggctctggcgtaggccgtcttgtcggcgcacacctcctcataggagggacaggccaccggatgaaagccgctgccctctccggtgggcgcaatgtaggcggtgccggggatgtcggtgatctcacggggcggcacctttctggatagcctccgggcaatctcacgggtggccgcctcccccatgccgtagaccagcagatccgccggggcatcaaagaggatgctgcggcgcaccttgtcgtcccagtagtcatagtgggcaaagcgccgcagggacgcctccagtcccccgatgacgatgggggtatcgggaaaggcctctctggcccggttggcatagacgatggtgggccgatccggccgataccccatttttccgccgggggagtacagatctctgtcccgccgccgcttggccacggtgtagtgggccaccatggagtccagattgcccccgccgatgagtaccccgtagcggggtctgcccatggcccggaaagcctcagcgtcgtgccagtccggctgggccagaatggccacccgatagccctccccctccagcatccgtgcaatgagcgtggtgccgaagctgggatggtcgatataggcgtccgccgtcaccaccagaaaatcatagtaataccagtcccgctggagcatctcctcccggctcactggcaaaaattccgtgccacgcatgggtcaccttctcctttccgcccctcacagggggatatgggcgtccagcacccgtggcgtgatgttcttctccataacgtcgccccccacctgggaaaagcccagcttctcccagaagctccgctgccggtcatcgccgcaccgcaggcgcaggcgcagcaggcccatgtggcggcagcgctggatgatctgtcccaggggctggatgccctgatcccggccctgccactggggcagcaggccgtaccagccgatctcccccacgccctcctccgggcggggcagcagctgataagcgccgatcagctcgtcaacaaagcggacagccacaccctcgccgccggagggaacgcccaactgctgccgctcctcctccgtcagcggggcatacagttggcccatctcctgaacccccttctgccgccaccacttctgcttggccagcgtggagagccctgcctgtagcagatggctgttgtcatcccggtacagcacccggatgtcatcgccctccacctccagccgggccacggaggtgttgtctccgaagggcgtgtccccgatctccagcaggctcaggccctgcaaagttcccagcacgatccgcatggcggcgccgtgggagaaaatggccaccgtctggccgtcatgctgccgggccacccgccgcagggccgggaggtagcgatccagcacctgccgggccgtctcgctgccggggacctgccagcgatccagccggtggttgaaatcatggtgggactgggggtacttccgcagcagctcataccaacagtgctcctcccactcccccatgcagatctcccggaaggcagggtccggatgcagctgcagccccttgggcagatagatggactgtgcggtggtgcgggtgcggatcaggtcgctggcatacacggcatccaccggcacatcccggaagcgctccgccagcgcccggatctggcggcagccccgatcatcggtgatgcagctgttatagtgtccgtgggcaatgcgatagaggttgccctccgcctcggcgtggcggacaagataaatcgtcgtcatagcttctcctttgtgggtatccgggtcacaccaccgtgacccaatgtttcatctcccggacggcatcgtccatggccgccggcacgtcctctgcgtattgcagggcatcgtcgatgaccatggcgccccggccgaaatcgtcgaaggcatagctggcagcctcgccgctgcagccgtccagcagcaggaaagcgtccttcagccgccgccgcagctcccgcacatccagactgtaatccgtctgggccatgatcccggccccccggcgggccatctgctctcccgccgccaaaaacaggcggcgatccccagccatgaggttctgcacctccgccgcacccggctccgccgtgcggaccagcgcaaacagagccttgtcctccccggccgccgcagctccataatagggcgagacagtcacggcgtcggcattcacctcaccgcccagccacacggcgggatcggcgcagcgtgcgtccacaatggcgtaaaggccctgactgcgggccatatgcaccagattcgacagcacgtccagccccatagctccgcacaggaggtagcggtcggcccgcagcaccactgccggcagccgctgggccgcctgagccatcagttgggtgccgtgatagcgcagtgcctccgaccgggccatgacgctctcgccgtagagatcggtaaacctcttcaccaccggggcgggaagccggttcgcctccgggccaaggcccagcgccagcggtgtcttttttttgcggatatgttcctgcaaagccgtaatggacatgaaacgctccttctcgccgcagagcggcggcatgatcagatattttattcattatatgcgctgcggcagcttttggcaaggcatagacggttatttcccgccggaatggatatactatgaccgtaccgaaaaaggagtgatgcaggaatgtgtaaggtcagtacgttcgtcactggcgtatgcgtcggcatggtggccggcgcactggtagaggtgatggtcattccccggccgaagacgagaaaaaccgctgtaggcaaagccatgcagcggatgggtaacgcagtggattcggcgctggagaccgttgccgagaagatgaactgagggtatcgcatggaagggggccgcaagcggcccccttccaaaatttatcggttttttgtgcttttcgcttgacaaggcgcagatttttggtataatagaccgtgctgttgcggcagcattttatatgcagtggtatcgaagtggtcataacgagcacgactggaaatcgtgttgccgtcaaaagcggcacgagggttcaaatccctcccactgcgccatattaacgaaacggtatagatgcgtctggtgaaaagccaggcgcatcaaccgtttccgggctttttcaggcccggattttttctttcaaaccatagatgcaaatcgctgtttcagagcgtctgccccgattcgaaccgggcattttcccttttcgggcagatgcgttcagccagcgccctttttcagcggcgtttttccggctggcagcggtatttttctcaaaaaagaatcataaagatttgggcgtcgttttgttggtcctgacggactaagaaagcagcgccctttttcatttcaaaaagggcgctggtcgcagcgcctgcatttgtaggtcggagcatgattgctccggccttattttttatgcatgggaggagctatatgagcatcagcgcagaagaaaagaaccgttacctcagagaagcagcaatcgtccttgccaaggagggtttccagttggacgaagttcacactgacaggctgtgtatcctgcttgacggttcgccgctttgtgaagtaactgagagcggtggtgttgcctaccgcaatgaggatattgacgagccagaacggatcgctgccaaggacaaggtgtatgagatcgtcaggaccacagcggagtatatgcggcagatggagatggcgccctttttgaaagccgacggtctggaggacggctacaaggtgctggcggatttcaacggcactgtgctggctggagttcagagcaaacacggagtccacttcgtcacatgggattgggcctatgggcacacaggagtatgtcatgggcactatttcatggagaactatgcaggagccaaacaggactttgctatccgctccgggctgattcaaaaggaacggcttttcaccccagagcagatgaccgagatttatcgctgctgtgcggactctgtagacggagatttctttgaactcacgggagagcaggaaaaaatgatccgcagtgttcagcagcagattgaggagtgtgtgccggatttggacgagcgaatccggcagcaggaagaagccttggaacaagtcgcgcagcaacagacaatgtaatatcaaacggaacgggccggagtcttagcaataagattccgacccttttttcatttcagagaggagttcacttatgccgtactatttcatgcgagacacgccgctgcaggcgttggagcagttgatgatgtctcagcccggtcaaaagcccagaggtggtggaatatatcgcagcccatttcgttacacgcccgaagatgtggcgtgcgaatactgccagaactatgtccgcaagcatccgtgccgcctatgtgaatgtacctgcctggaggagcggatcgaggcaggtgtgctggagctgaatgcgttcatgtgggactgcttcaccccctctatggggccgcagtttcgaaaaaggatgcatcagcaattcagagagaggaaacctcaattcttccaattcttcctgtccgatgcccaccggcgaagatggacacattggcgagagcgctgctggcgtttgtccgaccggaacaaagcggccctcttcctgctcacggcatacgagagcctttggcgcaggatggtctggaaatgcgggaatgacggctttgacttccaaagcgtccggctcggaggaatcgagccggagctatacagcgtctaccaggcggcgaaggccattgcggtcggctgctgtaatatcactctcgcagaccttgcgtctccggaattggtcacagatgaggcgttccacctgatcactggcgcactactgatggccaaatacggagatgcggttttgaatttggaaaaaggagttgacgaaacatgatgatacaagcggtgcttggcaatccgcatcacccagaatatggcgtggcgaccatc

SEQ ID NO: 12408 - DNA, 2639 bp, Unknown
  gut microbiota DNA sequence
gaaaataataaaaagtacataagtaataaaaaataatatgtttataatttatgaaaataaattttataaaactattatacgaggaggagaacaatatgaaaaataataagggtataaccctagttgcgttagtcgttaccatagtagttttgttaattcttgcaggagtaagtattaacttagtactaggcaataacggaataatagcaaaagcaaaagaggcagaaacaaaatctgcagaggcaagcgaaaatgacttaaaaggaatgaatgcattaacagaagaaatgaataatgcattaggagaaaaaccaaaagtagacttaacaaaatataaaatcggcgacttcgtaaattacgaatacgatgttgtaagtagtggatatgaaacaccatcaacggaaaatggatttggaaatcagacaatagcccaaagtacagaaacattaaaatggagaatattaaatatagatgaagcaaaaggaacagtagacttagcaagtgcagcgccaacaagtaatacagtagggtttaaagcaatattaggatataataatggaccatatgtaatggataaaatatgtgaagcattatatagtaataatagtcgaggaataaaagcaagaagtatagacttgttagatatggaacagcacttaacagcagccggaatagctgcaagaaatgcagattcgggtgcagtaaaatatggaacaacaaaaacatatgcaagtaagactcaatatccaagcttatatgcaggacaaaagggagcaggagtaaacgtagcagaagcaaatgcaagtacaatagtccaaccagatataacaaaaggaaatgatccatataaagagagtgagctaatagcagaaacagagccaacaaccgacaaaacatttggaacaggaaatccactgacagtaacacaaacatattataatatatcaataaatgcaacaaattatggagatgcagcaagtgtattaaaaaattcgacaacatattgggtggctgcacgtgttgtctttactgactcagacgttgcaggcttcggtctgcgcagtgctgaagatagaactgacggtattcccatgttcgaatctaacggagacattggtatctataactttagtcttcgtccagtagtttcgttatcatctagtatcttgagtgatacaaaagatgcaagtggagcatggaatttgaaatagaagaaaccagaaatacaatgagctaggggctcacgcctcgcatagcgaatgaaatatgctatgtgtcaagaaccagactctattaccgataagactagctttacagtgagatagtctttttgatgtaagcactcaataaaacggcgtattgttcttccccatattttatagtaggataagatctataaaatatgaggaggaattttttttggcaagagtttaaagtgatgaagaaaaagaggaatatttagcggaatatcacgagagagggaagagtaaaagcgagttttcgagagaaaaagatattccaacaacaacatttcgaaggtggatagataatgaaaatagatcaacatatggaatgattgatttaaacaagttagataaagaaaaacaaccagtaatgtcaaaaatattaaaaccaaccgtttttgcaagtagcaaaataaaaatagaactttaagaaggatatgataaaaatttgttaacaagtgtagctgaggtgttgataaatgatacaaaagttattgagtgaaataacaacaatatatatggcaccatcacttgcaacagaagtaatatatcaaaaatattgcatgggagcaccactttgtagacaagagaaaatgtgggatgatttagggttagtacttccaagaaatatgatggcaaattggtgtataaaaataagctaatattagttacccatgcagagcgttgggcacatgcaagaagaaaattttatgatagcattccattaataaatagacaaatggataaaacatctgcaggatatgaagtagttgaaataatagacgaaatatttaagcaggaagatataattgaagagcaacttgcaccaagtatagcaccagatgaatggataaaacaaaaatttgaactgagaaaagagaaaaattatttattggaaatactgacgcaattagaaggagaacagaaatacacagatatagaaaattatttgccagggtcagaagaattgccatacgaaataagaaattatgaagaagaatatacagaactaaatttggaataaaaataataacctcagaaatttaagcaaaacttaaaaatctggggttattttacgacgttttattgattgcttactttttatttctaaaaaaaaacggagagaactcgtgaatatgactttcctgaaaaatacgattcaacaaaaaagacaaactttagaaattaacaaaaaactattgcactggtgtgaaaataatggtatcatctaggtggagtatttatgcctataacgtatatagaaataaatacgattaatgcaacaaatatatacgtggtagatgtatgtacgaaaagtgaattttatagtaaaaaagcacttaattgaattaataaaaatacaattaagcaaaaaaattaaaaattaaattcaac

SEQ ID NO: 12409 - DNA, 377 bp, Unknown
  gut microbiota DNA sequence
gcgcgcacgcggtttaccatttttcagagtcttttctctggggttctcaaaccacgccagttccttgagcttcagaccggtgaaggtatccatgagccgctgggcaatctcccgatgggtaaatactccacagtcccaggagcccatcagccatgtctgtataaagtcgcccaccttgctgccaggagcaggcggcccgtaaacgctctcgtccgcccacatgacctccatcttttcacattgatctggccggggacaggacttcttgttgccgtatcggtacatgatattcacataaccgaagtccttgccggttcggtcatgaccgacggcttccactttataggcagttatggacattgcagttccacctcctg

SEQ ID NO: 12410 - DNA, 13223 bp, Unknown
  gut microbiota DNA sequence
aagttaagctcgcttctgcccacaatacttggctggagacggcccggaaagataggtagcgccaacacaagagaaggcacccaatagggtgtcttttcttatatatgaatcactggtgtctccgcacgaggagcatggaacaatgtcatcttgcgtttttactagatgttgaaaatggttgctgatgcgttcacttagaagatcatttgttgcttcttcgatggtcataccgggtttcccatgcccgcaggcatccttccggcagggtcgccctctgttgcttttgcatcactcgccaattttcttcttgacattcaccaactgctttatttttcctttgttgcgacgcagacagcatgatattatagctgcaacccccttcaccatgccgcctgcgccgtcgctgtaacagctgtaacagctgtaacagctgttacagctgactcagcacctcaccaataggcgcacggatggtgagatcggcccggacgccggcgcccacctctcccttgttgatgaccaccagcttgtggccccggtagtactgcaccagtcctgccgccggatacaccaccagagacgtgccgccgatgatgagcatatccgcccggctgatatactccagcgcatgctccatcatctgcatatccagactctcctcatacagcaccacatctggcttgatatcgccgccgcagctgcacttggggacgccggtgctgtggaggatagcgtccacgccgtagaatttcccgcatcgttcgcagtagttccgcaggacgctgccgtggagctccagcacctcgtggctcccggccatctggtgcagcccgtcgatgttctgggtgatgacagccttcagcttcccatcccgttcccattgggccagcttcacatgggcggcattgggccgggccttcggagcaatgagcttctgtcgatagaaatcaaaaaactcctccttgtggcgctcataaaacgtatggctcagtatggtctccggcggataccggaacttctggtggtacaggccgtccacactgcggaagtccgggataccggactccgtggacacccctgccccaccgaaaaatacgatgttatccgatgtagctaccatttccttcagctgcatcacagcaggctccattgtatatccctacctttcaactttacaggaggtttcttatgaacattcagatcttcgggctgcggaagtccttcgacaccaaaaaggccgagcgctggttcaaggagcgccgtatcaagtaccaatacatcgatctggccaccaagggcctctccgccggagagtaccgcagcgtccgggccgccgtaggctacgatgcactggtggaccgggactgtatcgactatcgggaactgggcatcgactatctgctgccccaggccgccgaggagaagctgctggaataccagcttttccgggtgcctatcgtccgcaacggcaagcaggccaccgtgggctactgccccgacgtgtggcagacttgggaataacgccctgccggcaccgtcatggtgctggctttttcttacacatagggattctccaccgtcaccacggcgtagtactctcccccatccatctgccgcacccgctccctgatctgccgggcggcctccgcctccgtgatatgctccccgaagggcagcaccgcatcaaaaatgagattggtgtggctgggtcccggcaccacccggaaatcgtggatggtcatgccgctgtccacctgccgcaccagcttcgccacccgtcggcgcagctgcacgatctgtgcatcatcggtgatgatggggtccatgtggatcacggcgttgcagtgcagggtgcgcttgagctccatttcggcggtgtcaatgacgtcatgcagctccagaatatctccgtgagccggcacctccgcatggagggacaccatcatccgaccggggccatagtcgtggaccaccagatcgtggatgccgcagataggcgggtgggacagaaccatctgccggatcctctccaccagttcctgctccggcggctggcccagcagcggccccagcgtctccttggccgcctgatacccggaaaagaggatgaagcacgccaccacaaggcccacccaaccgtcaatcatcaaggcggtgaaccgtcccaccagcatagccgccagcaccgccgtggtggcgatggcatcggacaggctgtcggtggccgtggcctccatggcggcggaagatatccgcctaccgatacggcggttatacaggtacatatacagcttcacggcgatggatgccaccagaatccccaccgccagcagactgaagtccaccgcctccgggtgcaggatcttctccacggaggacttccccagctccacacccatcagcaggatcagtcccgacaccaccagccctgagatatactcgatgcgcccgtggccgaaggggtgctggggatccggcttcttccccgccagctgaaagcccagcagcgtcaccaccgacgagcctgcatccgacaggttgttgaaggcatctgccgtcacggccaccgagccgctgacagtcccggcgaacagctttccgccgaacagcagcaggttcagaccgatccctaccagcccgcacaggcggccgtaggccagccgtaccgccggatctccggtattttcccggttccggatcaaccaatgagacagtaattcgatcatacgccgtcctttcgcccggggatctccagcgtcatacgacagcaaagctggtccagatcctcatccgtcgccgccgggagccgcagcttcccgccgcaggcccggcaggtcagatccacggcatcccggtggatgcggatgccgtagtcccggctgccgcaggtacaccttacaccgccccggccggccatgtccttcaactccgacagcacctcatacatgatgacattgtcggtgaatgcctctcgctgctccgagcgttccttgtccactcggatggccagctcctccgtccgggccatcacctggctctcctctccggcgtagcagcacagctgcttcgtctccgggcaggccagagcgatgccacggccctccagcagctcctgagcgctgcactccgcctgatgtaccccgccgcacaggccgcagggtacccacagccgaaagcgcacgccgtcggtctgtacctccagcgccgactccccgcacttggggcattccatccgtaccgccgccgccgacagggcgaacttgctgcgccgggccaccacggccttgccgcacttggggcagacgtatccaaagcttctcgtttcctccataaaaagcacctcgctttccctctttcaagtcatatggtctcagtatacgccatcttgccgcatttttccagtccctgtgttcttttgggcataaaatctggcacattttcccattgccaatcgccgcctgctccgttataatccagctatctaccctgtttcgactttttttgcaccggaagtgatattttatgcagccctctcccacctcctggcggtcagccctgcgggccgccttcccccacaccgtccccattctggctggctttctggtgctgggcgctacctatgggatgctgatgcaggccatcggctacggccccctgtggtccggcctgttcagtgccatcgccttcggcggcagcacccagtatgccgccgtccccctgctggcggcgggcttcgatccgttggaggtgttcctgctgagtctcaccatcagcgcccgacacctcttttacagtgtgtccatgctgaaaaaatatgacgatctgggctggaagcgctgggcgttgtactataccctctgcgacgagaccttctccgtggtctctaccgtggagccgccggagggcgtggacaccggaaaattctatctcttcgtctccctgctggactggagctactgggtcacggcctccatgctgggtggcctattgggcggcgtgctgcccttcgacatttccggcatggattttgccctgacggctctgttcgtggtgctgtttctggagcagctgcggcagaagcagcgccgcctgccgggagccatcggcatcgcctgtgccgttgtggccctgctggtctgcggcccggataacctggtaatcccctctatggtgctgatcttcgccagtctgctgatagggaggaaaaagctatgcgcctgaacgccatccaaacactcatcatcctgctggccatcaccgtgggtaccgtcatcacccggttcctgccgcccatcctgttcccccacggcaagccgctgcccaagttcctgcaggagctgtgtaccctgctgcctccggccatgatgggcctgctgctggtgtacagtctgcggaacgtctccttcgcctccgccggtcagtggctgccggagtgtatcgccatcgccgtcaccgccggactgcacctgtggcggcgcaattctctcctgtccatcgccggcggcaccattacctatatgctgctggtgcaggtggtatttgcctgacgggccgggatatgctatcacagggtcgtactgtagcggcacggccctgtttttatcacattgccgcaaggatgtggaagagatgcacatcgccatctgcgatgacgattcccggctggcggcggagccaaacgggtgggcatcacctccggcggcgaggcccggaagctgatgatgacccgtgcgctgtacaaaacgcccccttcatgttgctggacggacccaccggcggcgccggatccggtgtcggagtacgaggtgtaccgccgcttccgtcacatctccggcggacgcacctctgtctaaatcggtcgccggctgacctcctgccgcttctgcgacgagattctggtgttcgctgcatcgtccagcggggcagccatcggcagctgctggcggaggaggcagtatgcccggctgtggcacgctcaggcgcagcatgataccgatgccctgtgacgccttatcattccacctctatagagtaatttcgcatgacagaagatatcccccggagacaatacctccgggggatatcttctgtcactttcttcaggcggactgtttttcccgccgcttgcactgaatgaagtgtaccatcatacacaccaagaataccacgcttagatagccgaacaccgggaaaataacgccgatcaggtcgccgaagcctgccagactaccgatccacgacagcaccgccgccgctgccagcgtcagcttcttgtgcctgcggaacaccgcctgcttctgctccatgtaggtcagcatggccaccagcgatgccagtgcgttgcagaacatactcagcagcagcacgatgccgtaaaccgtccccagcgtggggctgatggccgtggctaccgccaccatgggcagctccgcctcaatggccgccggatacaccgccatgctgaacaggatactggctgccaccaccgtcagcatcagccccgccagggtgatgccccagtagatcaccgagcgcttcttcaccagcttgccgatgggcgccatgatgccgatgccccccagcaggttataggccacaaaggtcagggatgccaccagccatgtgggcatcaggggattggtgttgacgttctctaaccggaagatattccccgtgccgaactttatgcaggccgctgcggcaaaggccagtgtggccagcaccagcaccgggatcagcgccgaaaaggcgctgaccatgccggtcactcccagcagagccaccagcgccaccgccagcatgaacagggcgttgccgatccatgtaggcaggcccgtcatctgctctaatagcgctccggatcccgccgccataatgaccaccacgccgaacagaaaggccgccgccacaatgccggaggctgcccgcagccacgggatgttccaaggcaccagcagccggtccatctcatcggtgtgggccacctgcgtcagccgcaccagcaaaataccgaacagggtaaacagcaccgccgccagcagaaaacccacatagccccagttgccgaaggccccgaagaactgccacagctccgggccggacacgaagcccgcccccagaaatacccccacataggtgaaggccagcggcagcgttttcatctcgttcatcttttccactcctactcctctgctctttcagcgccgcacccgcagcgctgctttgtgtaccatcgatcgtatcagcatcaatggcataatttcgttcatatggatatagtgtatcgtctccccccggtcctcgtcaacccccattcgccatatttttactgaatcattcaaccattttcgttgacgttcccgtccgtaggatgtataatgggcataaagtcggtctttgcggcgcccaatttcccctgcctgccgccgatttgcaccgatttatctgttaggtagtatcgctttacacatattgatatcagtcaaaaattcaggaaaaggagctggaaccatggtcaatccgacgtatgaaaaactgggcagtgccccctccatgatccgtgagctgttcgcctacggtctgcgccgctcggcggaggtaggcccggaaaacgtgttcgactattccctgggtaatcccagcatccccgccccgcagccggtgcagcaggccctgctggatgtgctgcacgacaccgatcccattcaggtccacggctactccatggccggcggcttcgacggcacccgccgggccgtggcggaggatctgacccgccgcttcggaatgaccatccgcccggaggagctgttctttacctgcggcgctgccgccgccctgatctctgtcatccgggcgctgaccgtatcgccggacagtgaatttgtggccatcgccccctattttccggagtacctcccctttgtggaatccaacggcggcaagctggtgtccgtccccgccgatctggacactttccagatctctctggacattttagaggcccatttaacgtcccatacacaggcagttttggtcaactcccccaacaatcccaccggcgtggtgtacagccgccagacgctggaggggctggcggagcttcttcgccgcaagagtacccagttcggccaccccatctacctgatagccgacgagccctaccgagagctggtctacgacggcgtggaggtccccttcctgcccaccatctatcctaatacgctggtgtgctactcctactccaaatctctgtccctgcccggtgagcgcatcggctacgtctgtgtcccctcctgtgtggaaggtcaggccgacgtgctccacgccgtggccggggccgcccgcagctccggccatgtctgcccgccgacgctggtgcagctggctctccagcggtgcgccgatgcccggccggacttggcggcctatgatgccaaccgccgcttgctctatcgggagctgacccagatgggctacgagtgcatcccgccgcagggcgccttctatctcttcgtccgggtccctgacggcgacgatgtggccttctcccagcgggccaagctggagcatgacctgttggtggtccccagcaccgccttccactgcccaggcttcctgcggctgagctactgcgtctcccacgacatgatcctgcgcagtctccccgccttccgggccatacgggagaagtaccaataagacacgcccccgtcgtcaagcgggaaaggtattaagaaaataagaagctccctgtcagcagacaggagtagtttcaaaaaagcaaaaaaatcccggcaataagcggaaggtgtatccatacgacaggaaactccgtcggcggaggacattttgcgaatcgtcagacggtgccatccttcgcttgctgatatgctctgcttacccgttttctccgcacctgtgacaaggcgcatccctgtgcagcttgctgcccagcggtgcgccttgttttatatggctctgtgtatgtgccgcacgcttttctggaggctcttgtcctaagcgctttcagttttttcctccgatatttcaattttttcttgtatttttcggcaaatgctcctataatagctgtatattttttcaaaaaagagaggtgcttacgcaatgagcaaggtctgtatcccacagggctacaaaaccccgttgtctgtctatgaaatgcagcgggccatcgagtttatcaagagcaattttcaggtgaatctcggcaatgccctgaatctgcggcgggtctccgccccgctgtttgtggaagaaaattcgggtctgaatgacaacctcaacggcgtggagcgccctgtctccttcgatatccccgatgtacacgccaccgggcaggtggtccactctctggccaagtggaagcggctggctctgaagcgctatcagttccaccccggcaagggcctctttaccgacatgaacgccatccggcgggatgaggtggtggacaacctccactccatctatgtggaccagtgggactgggaaaaggtcatcctgcgggaggatcggacggagagctatctgcgccagacggtgcgggccattatgggagccgtctgcgagaccaatgatgcgctggacattgcctttcccagcctgcacacctgcatcgaccgggacgtgtatttcatttccacccaagagctggaggatcggttcccggacctgactcccaagcagcgggaggacgccatctgccgggagcaccacacggtatttctcatgcagatcggcggaagcctgaagcgctccggccagccccacgatggccgtgcaccggactacgacgactggcagctcaacggcgacatcctgctgtggaacccggtgctggagcggagcttcgagatctcctccatgggcattcgagtggacgaggcggcgctggatcgccagctcaccgccagcggctgcgacgatcggcgcactctcccattccaccggatgctactggcgggggagttgcccctgaccatcggcggcggcatcggccagagccgcctgtgcatgatgatgatcggcacctgtcacatcggggaggtgcaggccagtctctgggacccggagacggtgcagacctgcgaaagcgctggtatcatgctgctgtaaaggaaaaatactgcacagagattttggtaaaaagcgaccctgtccggctgtggacagggtcgctttctacgcttacagagttcagaactggatgacgcccaaatgctccagcagaattttcaggcccatgaggatcaggatggcaccgcccaccatctccgccttgttcttatacttcaggccaaagacgttgcccaccttcaggcccacggcggagaggatgaaggtgatgcagccgatgaacagcaccgccgccgcgatattcacccccggcagtagggcgagggtgatacccaccgccagtgcatcgatgctggtggccaccgccatcagcagcatggccttgggggcaaaggaggcgtcggcggtctcctcgtccttggagaaggcttccttcagcatattgccgccaatgacggacagcaggatgaaggccacccagtgatccaccgacgtgatatactgctcgaaggcggaacccagcagatagcccagggtgggcatcagcgcctgaaagcctccgaaccacgcacccacgatgagatagtgccgcctttgcagcgtctgcgtggacaggcccttgcagacagagacggcgaaggcgtccatagacagccccaccgcaatgagaaacaattctaacagtcctatgatggttccctccaaaaaaagaaaatcaggcacggtatgcctgaccaaaacgcccaagcacgacccccgccatacttgagtctcgttgtttaagacaagccagatggggtcccatcagtctgttgacttgccactcgctgccgagccatctactccctcagtataagctttagtgtaccatatccggcagaaatgtcaaccttttgacgcaaattccacctgtcatgccagaaaaagtttttgttgacaaatcaacatttgcatggtatgatacgtcacacttgttgatttatcaacatttaaggaggagccaccatgcagcagcgcttcgagacctttaccgtgctgattgccaaaatcagccgcagcatccgccgcatcaaggcggaggagatgtccgaatttcatttgaaggggcctcacgtctcgtgtctttattatctgacgcagctggggccgctaaccgccggacagctgtgcgaccggtgcgaagaggataaggccgccgtgtcccggtcgttggaatatctggagcagaacggctacgtcacccggccggacaagcgataccgcagtcccctgacgctgacggagaaggggcaggagacgggccgggccattgcagggaagatcgaccggctggtggaggccgccagcgagggcttgacaccggagcagcggcaggtcatgtacgacgccctaacctgcatcagcggccatctggagcgcttggcagccccccgaaaatcacagaacggagaaacagacttatgaccagaatcatcatagattccaccatcgacctgccggagcaataccgcaggcaggtacacatcctacccctgaccatccacttcgggacggaggagctgctggacggcgtggacatcgaccgccagcgcttttatgagcggctggtggagtcggacgtgctgcccaccaccagccagccctcccctgacgctttcgcccagctgttcgatcaggtggaggccgccggggacagcgccgtggtgctgaccatctcccacaagctgtccggcacctatcagagcgcctgtatcgccgctgaggggcgggagcgcatcttcgtggtggacaccatgtccgcctccatcggctccggtattctggcccggtacgccattgacaacgcccatctgcacgctggagagctggcggcgttgctggatcggcggcggcaggacgtgtgcatcatcgggctggtggacacgctggagtatctgaaaaagggcgggcgcatctccaagaccgctgcctttgccgggggactgctgaacatccacccggtgctgaccctgacggacggcgaggtgaccatcatcggcaaggcccgtggctcccggcagggcaacaatctgctggtgcagaagatccacgagagcggcggcatcgacttctccatgcccctgctgctgggctattccgggctcagcgacgccctgctgcaaaagtatgtggccgacagcgcccctctgtgggaaaacggcacggaggcgctggagtccgtgtgcatcggcagcgtcatcggcacccacgccggtccaggcgccgtggtggcggccttcttccggcggggaggaaaataataggaaagccccgccctccccattagggagggcggggctatgttttggcagccgaaacaaaaatcaggcggagaagcagctactcctccgcctgatttttctattccgccccctcggtggcccgctgcaccacatgacgggtgatgcgggcggtgagcccccacagggggtagggcagcccatcatacaccggtacctccacctgccccggtgtccaccggtagtccggcggcgcctgcacccgggcataggggaattgctctgcccccaccggcagcaggggataccggtatacctccggcggatgggccgccaaccagtccagcgacaccagaaacgtctgccgcacctcggcggggttcagccgcagccgctccagcgccgccggggccacctgtcccagcaccgggtgcatcagggcctcggagcgcaggtgcaggaagtccgcccggcccagcagccggatgtcctccggggggatgcccagttcctcccacgtttcccgcagggcacactgctccggcgtctcccccggctccatgcgcccaccggggaagcagacctccccgctgtggtggtgcagggcaggggagcgcacctcatacagcaggctcagaccctccgccgtctccgccaccggcaccagcacggcataggtggcggtggcccccagcaggcccggcacatggccggaaaaggccgcctgtaattgtttcagctctatggaacatcccttctttcatgccggcatcaatgctacctattataatagagtctgcccggtgccgtcaaccgctttgatgctgcggcatatgctgtattggggctgcggccccaccgactatcgaacaggagtggatgtcatggcaagctttaccaacttcgccaccttgatctataacggcggcacctccaattccaacaccgtcaccggtgagctgctggagacgctgaccctcaccaagacggcggccagcagccgctacaccgccagagacaacgtcacctacgtgctgtcgctggtgaacggcggcacagcgcccctgacggaactggcgctgacggacaatctgggtggatacgccttcggcacggacaccgtgtacccgctgacctacaatgaggggacgctgcgggtatatgtcaacggtgtcctgcaaacgacccccacggtgacggcagggcctcccctgaccgtcaccggtctcaccgtccccgccggaggcaatgcgctgctggtgtacgaggccgctgtcacccgctatgcgccgctggatcaggaggccgccatcaccaacacggccaccgtcaccggcggcggtctggcagcgcccctgacggcgcaggcgaccttggcggcggcccagcgggcggacctcaccgtcagcaaggccatctgcccggctaccgtcacggagagcggacagctgacctataccttcgtcctccagaacttcggcaataccgccgccacggcaggggacaacgtgatcctgacggataccttcgacccggccctcaccggtctgacggtgacgtataacggcgatacgtggaaggaaggagacaactacacctacgatgctgccaccggtacctttgccaccattgccgggcagatcgccgtcccggcggccacctatacccaggagacggatggcacctataccgtcacacccggcaccaccacagtgaccgtcaccggcaccgtgtaacgctgcatcggaaaaagcagggcgcttgtcctgctttttctgcagtggcaaccaaagacaacccccggctctgccggggggaaaaatagcctatggcgaggggaaaagt

SEQ ID NO: 12411 - DNA, 30467 bp, Unknown
  gut microbiota DNA sequence
aaatccctttaggaactaaagggcgcacttctatactctcctatcgggagtatcgtgcgtcctgggtcgcttcattcccggtcagcagaaaaaaactgcccgaccgaacatgtttcgtcacgaccttccgtcaaggtggctacacccccttgcgccgcttgtgcggctatcccctgtgtacttgccgtccgcaaacggttttgacaaaccgtttgccgccagcaagtttgaagattagacataaacaaatcctccgcatggtctaagccatacggaggatcaactgttttacggacgcccgtctatgccgggccgtctccctgttttttctgttcagaataccatagatggacgagggcaagcatggctttgccaggcagaaatctgtccatcctgcgtcaaatcccttgaccatctcccatgcagagcaaaacactgtcccgctcagctgtttttgcgcttgtcgctgagccgcagcgcaaaataaaacactgcgatcagccccaccgccatcagcatcgccggattgacggaggcagacgtccgcatcgtatatgcgctggtggagcatctgcgccggtcccatacgggatcctgacaaaaagcaggcacatggccggatggccatgtgcctgctttttgtctatttgcctatcggagaaagtctccgaagagtcctctatctcatcagatatccagcgtttgcaggtccgtctcctccaccttccgcagctcccggcggctgaggaggtcatacatacacggcaccaccagcagcgtcatgagagtggcgtacagcagaccgccgatgcacaccagcgccaccggctgcatcagagccgtaccggcgtcgccgccgaaggccatgaccacaaggcccagaatggtggtcatggacgtcatgagaatgggccgcagacgggtgacaccggcctccacaatggcctcccgccgctccatccccgacaggcgcagctggttgatgtagtccaccagcacgatgccgttgttgacgatgacgcccaccagcatcacaaagccgatgagggacaccacgctcagctcgataccggagatcagcagggccagaaagccgccggtaaaggccagcgggatggtgaacatgacgatcagcggggagcgcagagactggaactgcgccaccatcaccagatacaccagcagcacgcccagccccagcatcagcagcagctggcccatggcatccatgatggcctcgttctcgccgctgaactgggcggtgatgccctgcggcaggtctaccccggccaccgccgtctgggcggcggctgtgaccttggtgacgttgtagccctcggctacctccgccgtgacggtaacgcagcggcgctgctgctcccgctggatactgccgaggctgacggtctcctcaatggcggccacgtcgcccagacggaagctggacacttcctgaccggcagcgtccgtcagggcgctgccgccggagaacgtgctgccgcccgccagcgcagacattccgcccatggaggaggtgctgccgctcataccacttatgtgactcatactgtccagattcgtaccactggacggggtgatctccagatccatgagcttttcacgggtcatgcggctctcctctggggactggacggaaacctccatctccagtccatccagcgtcaggtcggaggaggcggaggtgttggtcagggcagaggccaccgccatatacacctgcgccacggtgacgcccttttccatggcggcgttgcggtccacggagatgtggagggccgtggtggcctcctccagaccgtcggacacctcgccggtaccctccacggttttcagggtcgccgccagcgccttggcggaggactggaggtcctccatgtcgtcgccgtagaccttcagagagactccgctgcccgccagataggtggacatactgtccatggagccggaggccgtcacctgacagggcaggtcggcgcacagctcctcgatggccctgcctgccttggcgccggaggccccctccggcatggtgacgtaggcggtgacgtcataggcaccgccggagccgcccatcatgctgctcatatccatgccgctgccggaggacatcatggcacccacggcatccacattttccaccgtcccggcccggcgcaccacctcgtccgccagcgccaccgcctcctcccggctgatgccctccggcatggtaacggtgaggctgacgttattcatatcgatctggggcatgaacacgaagccccggctgacggcaccccacgcagagccagccagcagcaccaccgccagcagcagtaccacagccttatggcccagcgaccagcccaccgccctgcggtaggcgggatagacccgctccagcaggccggccttcacggccttttcctttttcagcgtcccggaggccatggccggcaccagtgtcagggccacgatgaggctggccagaagagaatacgtcatggtcaaggccagatcggtgaacagctgcttggtgattccctccacgaacacaatgggcaggaacacgcacaccgtggtcagggtggaggcggtgatggcccccaccacctgcgccgcaccggacaccgccgcctgaatgacggtggctcccttggagcgcagccggtagatattctcgatgaccaccacggagttatccaccagcatacccactgccaccgccagacccgacagggagatcatattgatggtgacgccggagaaatacatcagcaccacggcgaagatcacgctgacggggatggagcagagggtgatgagggtgggccgcaggtccttcaggaacaggtacaggatcagcaccgcaaacagagcgccccagcccaaggaggacaggatggagttaatgatgatatagatgtagtccccctgatccatcagcggcacgaagtgcaggccgtcgtactctttctccagcgtgtcgcagcgggcctgaatgttgtcggacacctccgccgtggcgtaggcggactgcttgttgaaggagacgatgacgccgttgtcgccgttgagcttggcgtagatcgcatcggagttatccgtcaccacgatctccgccacgtcggagagcttcaccggctccacgccctccaagcccagatcaaagagtaccatgtccgacagctcctgacgggaggagatgctgtcgcccacggaaaccatatagttcacgccgtcctcctgcagatatccggcgggcatggagaagttctgcgccgtcagcagggcggtgatggtctggatgttcagagccccggagaggtccgcctgctccagcgccgaggcacgggaggactccagcgtccggagaccctgctccagctgggtcagggcgctgtccagctgcacattggcggagagcagctgggtgacgccatcggccatggtgatgactcccgctgttacctcatcggcaatggaggccacctcggaatcatcctccagccggcggatctgctcttttagctgctccagcgtctcctgccaccgcttggcgtcctccgccgcctgctcccacgaggtgttcagtgcggcgattcgcagctccagctccgcaaggtccgcctgcagctggatgtactccgggtcgttttcgatggcggccagctgctccgccttctcctcctccgtcagggaatcgtcctgccggatggcctccatccgggcctgatagacggcgtttttggcatccagctgcaccttcagcgcctgaatctccgccagctccttcaggttcgcctccagccggctctggctgctgcggagggtggtcagagactgctgcacggcggtcagggcctgcatggcggcctcccggacggcggactcctccgtcgagcggatggcccccttggcgctctccagctggctgcgggtcccctccagctggctggccgtctcgtccagtgtcttgccgatggcctcccgcagcgtggcggtgagggcgtccagcttctcctgactgaggatgatatgggcctgccgctgcaccgtgccgctgacggtgacgctggctacgccggagatgccctccagcttctgcgtgagggtgttttccacaaaatccgacagctccgtcacatccttgccgctgtacgacaccgccgccacctgcaccggcagcatggaggggttgatcttcagcacatagggggtgccgacgccgtcgtcccagttgccctccagcatattgatcttctgctggatgtccacgctgacggtatccatgttcacgccgtcctcaaactccagcaccaccatggagacgctgtcctgcgaggtggaggtcacggacttgattcgatccagcgtggacatggactgctccatgggccgggtgacggcggactccaccgcctcggggctggcaccggggtcggtggtgacgatgaccacataggggaaatccatgttgggcagcagatccggtgtcattttcagatacgccaccacgcccagcaccaacacagccagcaccgccacaaagacggtcagcggctttttcacgctgaatttgaccatagaacgctcctccttgggaactgcactgcataatagataaagtgtagcacccggtcccggcgaaagcaagcgccccgccgcaggattcacggaatcgttacaaaccgaagggagcttccccgtgagacagagcgtcggggccgtcaccggtatggcgccccgtcggcggagacggcggttctgaatctgatacccttctttcccccccttatagggcaaggcccctcagccaaatgactgaggggccttgcctgtcgatggagcgcagaaggccgggagcggggccgaaacggctccgctcccggttttgtatggtttgggtgaaaaagaggtttactgggcagcctgatcctgctcgtacatatgccgcagcatacgaaccaccatgttgctgtaaccccactcgttatcgtaccaggcgatgagcttgacgaagtcgtgatccagcatgatgccggcagtctcgtcgaagatgcaggggcagggattgccgatgaggtcggtggacaccacctgatcggtggtatagccgatgatatccttcatgtacgtctccgaggcgtggcggatggcatagcagatctcggcataggtggtggtgcgggacaggcgggccgtcaggtctaccacggacacgtccgccgtaggcacacggaaggccatgccggtcatcttgcccttcagggagggaatgacccggcccacggccttggcggcgccggtggaggtggggatgatgttgttgaggatggagcggccggtgcgccagtcactgccgccacgggagtccacggccttctgcttggcggtggaggcgtggatggtggacatgaggctctgctcgatgccgaactcctgatgcaccaccttggccagcggggccagacagttggtggtgcagctggcattggagaccaccttcatatccggacggtacaggctgtcgttgacgccgaacacgaaggtgggtgtcacctcgtccttggcaggggccgtcagcagcaccttcttggcgccgcccttgaagtggcgggaggccttctcagtggtgttgttggcaccggtggactcgatgatgtactcggcgccgcactcatgccaggggatcatggcggcgtcagactggctgaacaccttgatcttatggccgttgaccaccagatcgccgccctcgtgctccaccgtgccgttgaagttgcggaatacggagtcatatttcagcaggtacaccatgtaatccacgtccgccttgcggaggttgatgccgcagatctcatactgctccggatcctccgccagaatccgcagcaccacacggccgatacggccgaagccgttgataccaattttgatggccataatccttttcctttcaccctgttgcgttttcgccgtccgggacggctctttttgttccgggtatattataccaaaccggcggcgggactgtctgcggcttttgggcaaaatggtacacgaattttctgtgcgttttccataaaaattgaacatatgagccaaaaatattgaaatttttagccaaatattccatacatttcaaacgtttttggcaggttttgcggctctcgcaaaaggccccgctgcggcgatgccgcagcggggccttttatgggtgcgtggttggtcggggggcgatgcccggagcgctgcacggcttagccgatatactccgacgggtcaatgatgacgccgtccttggccacggagaagtgcagatgggggcccatgctgctctcggcggcagcggtgctgcccaccaggccgatgatatcccccgccgccacctgctggccctccgttaccggaggctcggcctgcaggcagctatactgggtggtgtagccgccggcgtgctcgatgaccacggtggttcccatgagctcgtcgctcttgatcgacaccaccatgccgctggcggcggttttgacggcgtcaccctcggctgcttggatatccagcccgttgtgggtgcgccagtccgccatggtttcgtcatacatcagttccgtggtgctgaacaccgtgacggtggtgccgtccagcggagacactacctgcggcagcaggtcctccggctccggggcgggctcctcctccacggccgggacctctatgggctccggctggagcaccggggccgtccactgggcgtcattgcgctcggtttgccgggcgggcggggtggggtcgtcgatggtgacgttggcggggcggatcagggtgaaatagccaatggctcccactgccgcaaggcagagggcaagggctatgtagaagcccttgccgccggcggagcgggacttggaacgatcgattctgctcatagctgcctttccgttccggcgcaaagcgccggaagccgcatggttgacggtgtgcggcacgccgaaatgggacacaaaaaaagtctctgccctcagtatgcacaggcagagacttttttaatcattttttcggcggaaaggcgttttttctcaccggacgatgaggctcttaccgtccatctccggcgggcaggccagacccatcacatccagaatggtgggggcgatatccgccagacggccggtccgcagctccgtgccagctccgcagaggataaagggtacggggttggtggtatgggcggtcatgggactgccgtcgggctggcgcatcacctcggcgttgccgtggtcggcggtgatcatggcgatgcctcccattttcagggtggcctccaccacacggcccacacaggtatccaccgtctccaccgccttcacggcggcctccagtaccccggtatggcccaccatgtcgcagttggcgaagttcaggatcaccacgtcgtaggccccggaattgatgcgctcgacgcacttgtcgcacacctcataggcgctcatctccggctggaggtcataggtggccaccttgggggacggcaccagcacccgatcctcgccgggatactgcttctcgacaccgccgttgaagaagaaggtgacgtgggcatacttctccgtctcagcgatccgcagctgggtcaggctcagtgagctgaggtactcgcccagcccgttcttcaccgccacacggggccacgccaccagcacgttgggcatggaggcgtcgtactccgtattgcagacgtaggtggtggggaaaaactcccgctggaagccggtgaagtccgggtccacgatggctcgtgtgatctctctggcccggtcgggacggaagttgaagaaaatgacgctgtcgttatcggagacggtgccgtcgctgtcgcagaccaccggctccatgaactcgtcggtgacgcccgccacataggactgggccacggcgtccaccgggtcggggttctggttgccctcgccgtagaccatggcgtcataggccagctgcacccgctcccagcggttatcccgatccatagcgtagtagcggcccatgacggtggcaattttgcctacccccagacggcggcaagtctcggcgcagtccgccacaaagcccttgccgctggtgggggacacgtcacgtccgtccagaaaggcgtggatatacacccgatccagccccttgcggcgggccagctccagcagggcgtacagatgctgaatatgggagtggacgccgccgtcggacagcaggccgcacaggtgcagccgggtccccttttgcaggcagtcatccaccgccttgttataggcttcgttggcaaagaacgtgccgtcctcgatggcacggctgatgcggggcagatcctgaaacaccacccggccgccgccgatgttggtgtggcctacctcactgttgcccatctgcccctccggcaggcccacgtccagtccgctggcggacagggtggtgtgagcatgatccgcccacaggcgatccagcaccggggtattggccagactgacggcgttgccggggccgggctgggtcaggccgaagccgtccatgatgatgagagtagtaggcgttttacccatagcagttcctcccgcaggcttattcctgattggcggcgttgacgatctccacaaagtccgccgccttcagggaggccccgccgataaggccgccgtcgatatccggctggctcagcagctccgctgcgttggcgggtttcatggagccgccgtactgcacggtgacggagcgggcgatgcgggcgccgtacaggtggcgcacggtggtacggatgaaggtgcagacctccgccgcctgctcggcggtagcggtcttgccggtgccgatagcccagatgggctcataggcgatgacgcacttgcggaccttttccgccggtaccccggccagagcggacttcacctgcagagcgatgagctccatggtgatgcccagctcccgctgctccaggctctcgcccacgcagatgatgggatgcaggcccgcctccagcgccgccagcaccttcttattgacggtgaagtcagtctcaccgaagtactgccgccgttcggagtggccgatgatgacgtacttgacgcccagatccttcagcatatcggcggacacctcgccggtgtaggcgccggacttctcataaaatacgttctgagcgcccacggacacccgaacgtccttgaaggccttcatagcggcggggatattcacggcggggacgcacaccaccacgtcgcaccacttggccttgggcaggatggccttcagctcctcggcaaatttcttagtctcgctggcagtcttattcatcttccagttgccggcgataatggtcttacggtatctgcgattcataatttctcttgctcctctttccttacatatctttccctatatatcatagaacacacaacgctctgtgtttacttatccagcaggcacgccacgcccggcagctccttgccctccagaaattccagggaggcgccgccgccggtggagatgtgggtgatcctgtcggcaaagcccatctgctccacagccgccgcactgtcaccgccgcccacgatggtcacggcgccgctgtcggccagcgcctgcgccatggcacgggtgccggcggcgaacttctcgaactcgaacacgcccatggggccgttccacaccacggtgccggcgccacggacggcgttgcagaacagctgcaccgtctccgggccgatgtccagcccctccatgtcgtcggggatggcgtcggtggggaccacacggctctcggcgtcggcggcgaactccgtggcggccacggtgtccgtaggcagcagcagcttcacgcccttctcctgcgccttggcgatcatctggcgggcgtagtccagcttatcctcctcgcacaggctcttgccgatggagccgccctgcgccttggcgaaggtataggccatgccgccgccgatgatgacggtgtcagccttatccagcagattgttgatgacgttgatcttgtcggagactttggcgccgcccagcaccgccacgaaggggcgcttggggttatccaatgcaccgcccatgacctccagctcacgggccaccagcaggccggagacggcgggcaggaaggccgccacaccggcggtggaggcgtgggcccggtggaccgtgccgaaagcgtcggagacgtacagctccgccatggaggccagctccttggcgaaggaggggtcgttcttctcctcacggggatcgaagcgcaggttctccagcagcatgatctggccgccctgcagggccgccgccttgctcttggcatcctcgcccacgatgtccttggcgaagatgacctcctgacccagcagccggctcagccgctccgccacgggagccagcgtcaggctctccttccactggcccttgggcttgcctaaatgggagcaggcgatgaccgccgccccacgctccagcagataccggatggtgggcagggccgccacgatgcgcttgtcgctggtgatggcgccggtggccttatcctgtgggacgttgaagtcgcagcgcagcaggatcttcttccccgccacgtctacatccatgatggtctttttattgtagttcatatcggtagactcctttatgaaagatagtacttattccgccatctcccccgtgccggtaaggccggggaagccgttttggcgcagggcctcgtaggtgaggatggccacggagttgctgagattcaggctgcgggcctcccgccgcatgggcagacggatgcagcgctcccggtgggccatgcggaaccactccggcagccctgccgtttccttgccgaagaagagccagctgtccggcgtgaagcgggcctgcgtatagtcctgcggggccttggtggtggccagccacagttcctcccccgcctccggatgttgggcaaagaggtccggcaggctctggtagtcctgcacctgcaccagatgccaatagtccagtcccgcccgcttcacggcccggtcggagatatcaaagcccagcgggcggatcaggtgcaggcggctgccggtagcggcgcaggtgcgggcgatattgccgcagttctggggaatctccggctccaccaatacgatattcagcacggagccgctccctcccttcccgcccctgcgggcgcatcgtttcatcgattcatgtattgtaatgcaatccgcaaaaaaatgcaactataacttgcagaatccacatattttttcttaaaaatataaaattttccttcgcttcaccgcaaaaaccgtcgctttttgcggctccctctcctccatgagagagatttcctgccctgagaaaaattattgccgggaaaatatgtgaaaatactggatttctttgtaaagtctgttataatagaggcagtatgcagagagggggaggattcccatggatcgtagtgtggtatttttggatctgaagggcggctgcgccccctgtgacaaaccgctgatgctgcggccgatcctgttttgcccggtactgacctgggtggcacaggagttgacggtctgcggcgctcagcggttttttattgtgtgtgacgaggcgtggcaggacgaggtacgggaggtcatggagggcttcgacacccggctgttcgcctccgctcaggaggcgctggccgatgcagagggtgaggtcatcgtagtccccggccccgtggtgccggtgtacggcccggaggacagccgcagcgtatacgccgccgaggtcgggacgctgaaggctcgtctggagagcggcatccctctgacggactgcccggcggaggcctgcggcatccgcagtttgtggcagacgcaggcgctgccgccggtattccgcccggtggcagatgaggcggcgctcagtgccgccatgccggatgcccgtgagctgctgctgcggcgcatgacgggcgtcaccgtcgtagaccccgccacgacctatatcgatccccgctgctccatcgctcccggcgtgaccctgctgccgggcactatcctccggggccataccgccatcggctccggctgcgagatcggccccaacgccatggtgcgggactgcatcgtgggaaaggacaccaccatcaacgcctcgcaggtcaatgagagcaccatcggcagtcacaccaccgtggggcccttcacctatgtccggcccaactgccgtatcggtgaccactgccgggtaggggacttcgtggaggtgaagaactccgtcatcggagacggcaccaagatcagccacctgacctatgtgggcgacagcgacgtgggacagcgggtgaacttcggctgcggcaccgtcaccaccaactatgacggccacaaaaagcaccgctgcaccattggcgacgatgtgttcctgggctgcaacaccaacctcatcgcccccgtcaccgtggaggaccgggcctacaccgccgccggatccaccgttaccgacgacgtgccggagggcgctctggctatcgcccgtcagcgccagaccaacatccggggctgggcggaccggctgcggaaaacctggaagaaataacgtgagttacgacggcagtcgtctcaatatacctgcaccaagagagagaaatttttggaatatgatagaaagcgagtgtgtaaaacaatgatttctcatggcaaggacatcaagctcttcaccggcaactccaatccggcgctggcggaggagatctgcaagcttatcggcaccaagctgggtgaggccgaggtcaagtcgttcgctgacggcgaggcctccgtctccctgtatgagtctgtccgaggcagcgatgtgttcctcatcaactccacctgcaagcccgtcaacgacagtctcatggagctgctcattatgatcgacgcctgcaagcgggcctccgccggtcgtgtcaccgctgtgatcccctacttcggctatgcccgtcaggatcgcaaggccaagagccgcgatcccatctccgccaagctggtggccaatatgctcaccgccgccggagcggaccgtgtgctgaccatggacctccacgccagccagatccagggcttctttgacatccctgtggacaacctgctgggcaacccggttttcgtggactactatgccaagaagttcggctccaaggccgaggatatggtggtggtgtccccggatgtgggttccgtggcccgtgcccggaccttcgcccagaagctgcatatgaaccttgccatcgtggataagcgccgccagaaggccaaccagtgcgaggtgatgaacgtcatcggcgacgtggccggcaaggactgcatcctctttgacgacatggtggataccgccggttccctctgcaacgccgccaaggccatcgtggaggtgggtggtgccaaccgtgtgtttgcctgcgccagccacggtgtgctgtccggccccgctctggagcggctggaggccagctgcatcgaggagctggcgctgctgaacaccattccggagtccatgggcgaggggtgcagcaagatcaagtatctgtccgtggcccccatgtttgccgaggccatcgagcgcatctatcaggagatctccattgccaagctgttcaactgagcgagcttgtgagaaacaggcgggtgaggatcacccgcctgtttttttgtggggaggcaaagcagggaaatactcttctccacttgagatgtcccccacgcaaaaaggaacgtgccatggcacgttcctttttgctaatcattttcttgcttcagctgttattctcccgtttcggctgcttccctgtttcagccactgccccttgctttgtccgtcagggacggggctgctgctgggtgatgcaatggatattgccgccgccgaaggccacctcacgggtctgcacgcccaccacctcacggtccgggaacatctcctgcacctgccgcactgccagagcgtcgttctcgtcgccgtactggggcaggatcacaccgccgttgacgatgagaaaattcatatacgaagcaatactcacctcgccgttttcacgggggacggtaccctccacggcgtcgatggtctcggcgccctccagtcggcagggctcacgggtcaggcacagcttatgcaccttcagccgccggcccttggcgtcggtggcctgagacagggtgcggtaggcgtcctgcgccgcctgatagaaggggttgtccttgtcctccgtccaaatacaggccacctcccccggcgccacgaagcaggccacatcgtcgatatggccgttggtctcgtcggggtcgatgccatcccggagccacagcaccttctcgcagcccagatactggcacagcttctcctcgatctccgccttggacagatcgggattccggccgggggacagcaggcacatctccgtggtcagcacggtaccctcgccgtccacatggatggagccgccctccagcacgaagccctccgtgcggtaggagtccacgtccgccatctcacagatcttctgcgccacctgatcgtccttgtcccacgggaagtacaggccgtcgtacaggccgccccatgcgttgaaggtccagtccaccgcccgcaggccgccctgaccgtttaccagaaaggtggggccgcagtcccggacccatgcgtcgttggaggacacctccaccacccggatctcctccggaaggcgggcccgtgcattctgatactgtccggcgctgacgcacatggtgaccttttcaaaccgggcaatggcacgggccacctgacagaaggtctcctgagcaggcttggctccgctgcgccagttgtcgttgcgctccggccagagcatccacaccccgtcctggggttcaaattccgcaggcatccggtagccgtccgccttgggggtagagccgatgatacgttttgccatatgatgcttcctcctgcaatcagtgttggggccgccgggccgctatgagcacctcgcccagcagcacgctcagcacggagccgacggtgatgggcagcacgccggtgagtgtctcccgattccacgacagcggcacggcggtaaagatgatggatagaatgatcagggccataggcacataggccagccacttcagaaagccgctgcggcccggcacccggaaggggcgctcccggtccgggaatttccgccgcagggtcagaaacgccggaaacaccggcagatagctcagcagcagcatcaccagattcagggcgaagaagctccagaacagggacgagtcagggctgagccgctccatcaccgcccccagcaggcacacggcagaggccacgatgccgctggtgacggcggaacccacgggcatatcgttgcgcttccagcgccgggcgaacaccgccggcatatcgccccggtcggcggcgtaggcggcggtggagttgacgcccatggaccatgagatcatattaccaaaaagcgtcaccaaaaataagagggccaccacccgcaccagcgtaccgccggccccgccggtcatcagggacacggcatcgatgagaccggaatccggactgatgtcccgtaccggcacggcggcgccgatgccgaaggcggagaacaggtagatggcggcgatgacgatgccgccggtgacgatggcctgcgggatctgccgccggggggcctgcatattgtcggcgtaggtgcagaccacctcgaagcccagaaagttaaagagaatgacggagatataggacaggctgttcaggtcgaaggacggcaggaaggtccgggcctccatattattgacgaagccgtttttcgacacgtacacgatgcccagcacccccaccgtcagcgccagcaggatcttgatggcggcactgaggttcaggatcaggatgctgtcgcacaccggataggcggcgatccatgtgacgatccagatgaaggccagctggatcaccagcgaccacaccgggccgatgcgcccgccgaagatcacctccagcagctccgggcataccaccgccagagacgccatccacagcgggaaattgatccagtagtaccatgaggcccgtgcgccccagcgggtgccgggataggcggtctggatccagtcgtacaggccgccgtcaccgggaaaggccgtccccagctccgaggcgatgaggccgtagggcagcaggaacgctgcgatcatgaacagccaccagaagtactggctgttgccgatggaggccaccggcgccgccgcctccgccacgaataccacgcaaatgacggacaggatcacatccgccaagcggaattttctgcggttttccataggccgtcagcagtagatgcggtcctgcaggaaccgctccagcgtgtcccgtgcagcggcgatctccagctccgtgtgctccgggcggcagcgggtgaagtagaccagcaggccccgcatggccgtcaggcggttgccggcctgctcccagcacagggaggaggcggagtccgccacctcatccgtcacgtcctcgccacgggtggccggcaggcagtggaggaacttgcagccgatggctcccagcgccatcagctcccggttcacctgatagtcgtggaacacctgcacccgctcctccttgggcatctcattttcgtacaggccgtaccacacgtcggtgtagatgaaatcggcgtcccggacggcggagcggtcatccgtcaccagccagctgccgccggagagctggcagttgcgctctaaaatggtctgatgcttctccgtcagctggtggcccgccgggccgtagtggacgaagtgcatccccagcttggtggtgatgaagcccagcgaggcacagacctgcgtgccgtcccccacgaacaccaccttcacgtccttcaggcgcttgccctggggcagatgctcgaagatggtacacatatccccgatctcctgcgtggggtggttgtagtcggacattccgttgagcaccgggatggtgcaggactgggccagctccacgacggtccgatgctcgatgacacgggccatcaccacatccaccagacgggacagcaccttgccggtatccccaatggtctcgtggcctcccagctggatcattcccggccccagatactgggcgtggccgcccatctggctcatggctgtctcgaaggagacacgggtacgggtggaggactgctggaagatcatgcccagtgtcatgtcctgcatcaggggcggatagtacccgctgcggacggcccgcttgatggcaaggctcagctcgatcatatccaccagctgctcccgtgtgaactcatttgtgtcgatgaaatctttcaccatagcttgcgctacctcctgcgtcataaaatggaaacgcccatagtttgcgccgcaggaagcggaatatgtacgccatgatgtcctcttttgcaatttccccttgttatctgcggataaatgcgatataatgctctgtattagtatcaatcgtatcatcgggcagtctgccctttatcctgaacggaaaggaagaatactatgattaaggtccagtcccagcggggcgagatcagtatcagcagcgccgtattcaccagcatcaccggcgccgccgctaccaactgcttcggcgtcaagggcatggcctaccgcagcatgacggacggcttggtccatctgctgcgccgggaagccatgagcaagggcgtaaaggtcacctataacgaggacggcacggtgtccatcgagctgcacatcatcgtggagaacggtgtgaatatcgccacggtatgccgctccattatgggcgaggtcaaatatgtggtcaccaaaaataccggcgtggaggtccgtgaagtgaatgtctttgtggactccatcaccgtgtgatgaacgtcggtaggaggagaagcaagagcatgacagaaaaaatcagcggcggcgccttcaagcagatggtcgccttcggcgccgcctgtatcacccgtgaaaagcaggccatcaacgacctgaacgttttccccgtgccggacggcgataccggcaccaatatgagccttaccatccagaccgctgcggcggagctgaaaaagtgcgagcccgccacggtgggcgaggccgccaagatcactgccagcgccctgctgcggggcgcccgtggtaactccggtgttatcctgtccctgctgttccggggactctccaagtccgccaaggggttggaggagatggacggtgtacagctggcggcggccatgtccgagggcgtgaccacggcctacggcgccgtgatgaaacccgccgagggtacggtgctgacggtatcccgtctggcggcggccagagctgaggaggcagcgcaggagcagaactgcgccgaatatgtgctggcggaggccattgccacgggctatgagacgctggccgagaccacagagatgaacccggtgctgaaaaaggccggggtagtggatgccggcggcaagggctacctcatcattctggaggggatgctcagcagcctgcggggcgagcccatgccggaggtggaggaggagccggagcacgacaaggcggactttgccgccatcggagacgaggacatcaccttcgccttcgacacggtgttcatcgtccgcaagaacgatcccaacgtggatctggcccccttccgggcctatctggacagcatcggtgacagtctggtcatcggcgaggacgacgaatccttcaaggtccatgttcacaccgacacccccggcgaggccctgacggcggcccagcgatacggtacgctggagctggccaagatcgagaatatgcggacccaggccgccgatctggcggcgggccgcaaggcccagagcaccgacgatctggacgccatcgaggcggagctggagcaggccgagcaggcggaggtccccgccgagaagcgctacggctttctggcggtatgcgccggagacggactggcggcggccttccgggatctgggcgtggatcgggtggtatccggcggccagaccatgaatccctctacggaggccattctgcgggaggtgaaccacacccccagcgagatcgtgttcgtgctgcccaacaacaagaacatcgtcatggcggcccagcagtgcgtggggctgacagagaagcaggtcatcgtggtacccacccacagcatccctcagggcatcagcgccatgatgagcgtggacacggcggaggaggatccgcaggctattcttgcggccatgaccgaggcggccgccgctgtcaccacggcccagatcacctatgccgcccgcaactccgacttcgacggcttcgccatcaacgagggcgactatctggccctgctggacggcaagctcttcggcacggagcgggacatcacctccctgctgacccgactggcggcgctggcggcggagcgggaggcggccttcgtcaccctgttctacggcgagggcgtgtcgcaggaggaggccgaggcggcgcaggccctgttcaccgaggcctgcccggagacggagatctccctcctcagcggcggtcagccggtgtactactataccatctccatcgagtaaaaccgagtctatcgcaccgaagcattccccggacaggacactgtccggggaattttttctgccgggcgggcttcgggtttccccggcagtggccggccttttccggcaaatgatttttcggtgtgatattgcaaaacggtcgcccttgtgttatgatgaggaggataacgttccagccattgaactggactccgtttctttttcagcagacggtcccgtccctgtgaggggacaggtggaatagggtgcaaatccctgcgagtgggtcactgtgaagccctcccggcggcaagtccgacggggcggataagtcagatacaccggaccgtccgctgcggtacctgcctacaccgggactgcctgcacaaagagaacgcccttgatgcgtccgtgctgccgaaccggcggcacggacgcttttgctttgtgccatccgcaaaagccgcccccggccacgggggtccgtacggcagacaagaaaaactcaccggagaggaggtgagggctgcggcctgcacgcagggccgccgatcccgactgacaccacgacatatttgagaaaaggagaaacgaaatgcagacaaagagcacgtcgcacggaaagaagctccttgcgctgatgctgtccctgctgatgctggtgagcgtcctgccggtctcggcctgggccgccgccgatgcaaagcccgagaagatcactctggtgggcagcagcgatgcgctggagtacgaatttgtagactatctgacctttgcgtgggaggatatcccccactataaggtcactgtccccgccgggaccaagacggtccagctctacggcaccgtctatctggataaggccagcagctccggcagcggctacacacagaaggacggtctgaatgattggccgccccccgtggattactggtcagcagatgaggtaggctcctccgccccctacaccatcgagacccgcaccagcggctacgagaagaacctgtctctggtcaagacccggagctatgcagacaccagctccgcctatattctggagttcgtggagaaggacgactctcccgccgccccagcccccgttctgacggcggatctgtccacggcggctgtcacctacacctgcggcgatacggccaatgctctggcggtgcaggccaccggcagcggcaccctgagctatcagtggcaggtgagcaccacctccgccgccgacggcttcgaggacatcaccgacgccacccagagcagctacaccccctccaccgaggcaccgggcagcttctggtaccgtgtggtggtcaccaacaccgtggcgggcaacaagcccaccagtgtcaccagtgccgtggctcccgtgacggtcaacgttccggaggggatgcgccaggtgaagatcatcacctcccagggccggggtaccggcatgaccctgaccctgaaggatgctgcgggccagcccgtatccatccccgcagacaccagcggcgactacaccgtatatgagtttctgacggctcccggcgtctatacctatgaggcacgggacactgtgcggggcagcgaatatctccttggcacaggcaccctcaccgtcaccgagggtaccggtgagcagaccttcgagctgtatctggtctatgtctacgccgtcaaggacggctggacggcagacgacttcaccaccgaggtcaaggccgccgacggcaccgtcatgacccccggcgagccccatcagttcgccagctatgtgggctatccctatctcatggttcccggcacctacacctggtccatccagccctccgaagccaaagcggccgagggctatcaggccactcggcctgccagcaagacgctgaagactgcctcaggcgccgccttgtggagcgccaccccgacccagatcgtaaacaccgacttcgtggtccccaagggcgctcatgtcgttatgaccgacattccctccaccacctatgggcagggtacgctgattcccggcgatgccgatctcaccggtgacgacagcgatgtctacaccttccggctggtagccggcagcagctacatctaccgggccaccggcgatgggcttgtcactaacgccagtatgttcaaatccaccggtgccaccacccgatatgacctgacgaaaaccatgaccggcgatcccaaggccattctccgggacgagaagagtgacgcggcggatatccgcctcaacggtgtggactacaccggcagcgtcgccctgaccgtgggcggtatgaagcagctgcgccccctgcgtatgttccagatcgccaacaacagcagcaccggcacgagaggctctacgctggagcctgtgttccactacacggcactggatgtggacggcaccaatgtggtcagcgtggatgacagcggccgcatcaccgccaacagcgccggtacggccattgttctggtgacctatgacgccatgtatgtagcggattccggctggtccatcaacaagaacaagacctttggcgccatctggccggaaaacaccggcgtggtggtggtggaggtaggcaagaacgccgccgctggcccggatgccaacatgaccatcaacaacggtgaccggaaggtcgccggtaacaagctggatgccgaggcagacgtgctgtactacaccgatgactccggctgccagtacaccttccggcccgccgcaggcagcaccgttaccctgctgcgccccacactcaccgagacggccatgacctacaccggcggcttcggcaccgacggcgtgaccaccaagggcggcgacgtgactctgactctcaccgagggcaaaaacatcgtcaagatcagcaaggatggcgccgacacctatcaggtcatcaccgtgaagaaggccggggtagtcatcaccaacaagaccgaccccacccgtgatatccagcccggcgacaccgtcaccgtgcagctcaccggcgtgtatcaccccgccaacaccatggcgaacctgtattgcctctacgcctacgtctcttacaccgatcccggcagcgatgataccgtcaccggctataaggacctcttccagcgtcacctcttcgaccgggcggacggcgacagctgccgcaccgtggaggtgaagatccccgccaactgggatgctgatgagccctatgtcctgacggacggcgttctcaacttttacggcaacggcaaggatatcggctctcaccgcaattccctgcccaatctctccaccaacgttcccaacagctacagcagctttgcgctgggcgccctgccggatatcaccatccctgtggtcaagcccaatacggcggacgtcaccttctccgtgaaggatgactccggaaacgccatcgacagctgcaccatccagctgaccaacagcagcaacgataccgtcaccatcaacgccaccgctgcctccgccacccgcacgctggccagcggcaagtggagctatgtagtcaccaaggagggctatctgcccgctaagggtacgctgaccgtggtgggcggtgaggatcaggccgtgaatgtggagctgcctctggtcactgccattcaggtcaagactctgcccaagaaaaccgtttataccgagggcgacacgctgaataccgccggtctggtggtgcaggctgtcaccagaaacggcgcttccaccctgtccgccgaccagtacaccctctcccccaccctgctggagaccgtggggcagcagaccatcaccgtgaccttcggtcagctcaccaccacctttgaggtgacggtgcgtgaggacatcgtcacgctggagaccacgctggaggatggcatcacccagcgcaattcccgcatgaccttcgacgtctttgccaaggacggcgacggcaacaagctgcctgccaatgaggtaacggtgctcctcaacggtgatccggtgtccgtcaactgggacgatgacaccaagaccagctataccctgcactttaccaaggagggcgtcaacaccgtcgttgtcaaggcccacaaggcctctctgacctacaccatcacctatgtgaaggccgagcccggtgatgtggtgggcaaggccgtgttcaccgtggaggccctgtctctgggcggcggctacatcatcgagccctgctatgtggacatcatcgagggcgagaacgctgctcaggcgctggcccgtctgctggaggaaagaggctttacctacagcaacaccggctctctggagagcggcttctatctgtcccacatccagggcgatgcgctggcgggcattgatcccaccggcgacagcatccctcaggccctgcgggagaagctggaggagaagaacttcgatatccagacccggacggacgagaccagtctgggtgaattcgactacaccagcgcctccggctggatgtactgcctgaagaacgtattccccaacgtgggctttgccgattcctatctgtccgagggcgacgtggtgcgtgtgcagttcacggtggcctacggctccgacatcggcggcggctttgccatgggctccggcgacagtgccggttactttgacatggccaacaaagacgctttgacccgccgtgtagcggccatcaacgccgagatcgaggcgaacccctactatctggagcagaactgcctgaccaaggcctatgacgccgctatggacgtgctgaccactctgtacgtctctcaggccgacgtggatgccgctttggcggatctgcccgatccccctgtgggccaccagctgaccgctgtggaggcagtgcctgccacctgcgagaccgccggcgtggaggcttactggaagtgctccgtctgcggcaagctgttcagcgatgccgagggcaagaccgagacgacgctggagaagctggctatccccgccaccggtcatgcttacggtgagccggtgtggaagtggaacgatgatttcaaggccactgccaccttcacctgcggcaatgatacttcccatgtgaaaaacgtcacggcagaggtgaccagcgctgtcaccacgcccgccgcttgcgagaccaccggcgttcgcacctacaccgccaaggtcacctttgaggacaaggagtacaccgacaccaagacagaggtcatccccgccaccggccatgcttacggcgagccggtgtggaagtggaacgatgatttcaaggccactgccaccttcacctgcaccaacgatgccacccatgtggaaaacgtcacggcagaggtgaccagcgctgtcaccacgcccgccgcttgcgagaccaccggcgtccgcacctataccgccaaggtcaccttcgagggcaaggggtacaccgacaccaagacggagaccctgcctgccaccagccacgacacggagctggtgggtgccaaggatgccacctgcaccgaggacggctacaccggcaacgaggtctgcaaggtctgccagactgtcgtgaagcagggcgaggtgattcccgctctgggtcacgactacaaggatggcaagtgcagccgctgcggcgctgaggagcctaccactcccgtggagcccggcaagcccgccaccggcgacagcagcactctggtgctgtggctggccctgctggccatctccggtatggctgtgacggtcattccctcccgcaaaaagcgcagccggtaacaaacaatcactggctgactcattcaccggggaagctgcctgcgggcagcttcctcggctttttatctccttgtatacgccgggcagttgtgcatcccagcgcacaaggcccaaaattttcgagtgacaagctgtttgaattgtgatatagtgatcgtaccaccgatggacaaggacggatgcagatccgcccttgttccgctatgatatgatcgcagcgtggggccgggacagagcaccgcacccctatagaggaggctgattatgagagagatcgcacacatccgggccacgatgctggggcggtttgccctgcagcagaccggcatgaaggagccccggatggtcagtctcgccggccgttccggacggctgtggacgctggtggcctacctgatcctgcaccgggatcggggcatccccgctcaggagctcatcgaccttctgtggcccgacggcagcggcagcaatcctgccagcactctgcaaaataacgccagccgggcacgcaacgccatggctacactgggcttttccgacaccaagggcatgattcgctacgaaaacggcctgtaccgctgggttcccgggaccgatacatggctggacgtggatgtctttgaggatctggcccgccgggcgctggagacctccgacccggaggagctccggacactgggccgggaggccgccgatctgtatcagggggattttctgccggatgcggccgacgagctgtggtgtgccgatcttcacgcctactatcgctccctgttcgtgcggctgttccgcagactggtgcaagagctgatgaggactcaggagtacgccgaggcggcggccctgtgcgcccaagcggtgcatctggaccctctgtcggaggagttcaatctgctgctgatgcagaatctcacccgcagccatcaggcccagcaggcgctggaccactacgaggccctgcaaaagctgtatcaggagagttacggcctgaccccctccccggagctggaggccgcccgcctcaccgcctcgcaggaactgtacggcggcggcatggggccggcggctctggagaccttcctgctggccggtgacggcgagagcagggcgctggcctgcgacaacggtacctttcgggagatcgtgctgctgtacctgcgttccatgcgccgtgaccccgacctgaaggcccagctgctgatgctgtgtctggagggctgggaggcgcagccggagaaaaatgccgtctatatgcagcagatgaagctgatcctgcagggctgcctgcgctccggcgaccccttcactcagattggcgccgggcaatactgggtactgctgccgggcgccgggtcggagacccatagcgccatcgctcagcggctccagcaggcgatgcaccagcgttttgcccaaagcagcgccgtctttcggactcgggccatcgatctgcggggcatggtccatctggccgaacccaaagactgacaccccaccggacggctccgccgccgatttcagaaaggatggatcgctccatgcaagaaaaccgaagcattgcgccgggtctgggggcctttcgcctgacgctccagaaccgggagaacggcttttgcggctatgtgtacagcgccgctctgggctgccgggcggagttcaccagtctggcccggctcatcgtcctgctggaggagtggatgaacaccgccaccgacagtcccgtgccggaaaagccctccgctgcggcggcccccgccgatgtggagctggaggtccggctgcgccagcattacagctggcaggggcagctccgtgacctgaagggcggcgccgttttccccttccacagcgtgttggagctgcttttgcagctggaggcgctgctggagcaataagcacaatacaggcacgcaggtcccgcatgggcctgcgtgctttgcaatttgtgcgctattcgtggacaaagattgacttcccggcggggatacggtaagatggataaaaaagagcaggagggatcgtatggaacgacacgatgcgtactaccggcagtatgtgcagatcctccgggaggagctgcgccccgccaccggctgcaccgagcccatcgccatcgcctacgccgccgccaaggcccgcagcgtgctgggtgcgctgccggatcgggtgctggtggaggtcagcggcaacatcatcaagaacgtcaaaagcgtggtggtcccccataccggcgggctgcggggcatcccggcagctgcggcggcgggcattgtggccggggacgccgaggcccagctggaggtgctctccgccatgacggaggcgcagagcgccgccatctctcccttcctgaaggtcgtgccggtggaggtacgccacgccgacacgccctatatcttcgacattcaggtgacggtttttcacggcccggacagcgctcaggtgcgccttgtgggccaccacaccaacgtggtatccgtccggagggacggtcaggtactgctggagcgggagatctccgagggctccggcagtctcacagaccgcagctgcctgacggtggagggcatcgtggcctttgccgactgtctttccacagaggacgtggaggaggtgctggagcagcagatccggtgtaacatggccatcgctgaggagggcctgcgccacgattacggagccaacatcggcaagaccctgctgcgggggcatgaggaggatctatcctatcggatgcgggcctacgccgccgcagccagcgatgcccggatgaacgggtgcgagatgccggtggtcatcaactccggcagcggcaatcagggcatcacctccagtgtgccggtgatcgtctgcgcccgtgccacgggccgcagtcatgaggagctgctgcgggcgctggcggtggcgaatctggtgaccatccacctgaaaaccggcatcgggcgcctgtctgcctactgcggagccgtcagcgccggatgcggcgccgccgcagggctggcgtatctgcagggcggggattacgacaccgtggcccacacggtggtcaataccgtagccatggattccggcatcatctgcgacggggccaaggccagctgcgccgccaagatcgccgccgccgtggacgccgggctgctggggctggccatgtatcgcagcggcaaccagttctttggcggagacggcatcgtgaaaaagggcgtggagaacaccatcgccaacgtgggccggctggcccgactgggcatggcgcagacggacaagcagatcattcagctgatgatggagagctgaccacagcggtgggacagccttatgcgtatagagcaggcacgcagggtggttcctgcgtgcctgctgcttgtctccggcgggatactttttgccggcagtttttctgttttgcctccggcggcgtgcaaacgccggaaatctccccctcacgggcgaaacatcctcttccccacctacgtggtaggtaaaatttgaaaaaaggggttgacaagcgcagttagagatgttaaactaccatcaagttagagatatctaaccaaccgggtctttagagtatccgaacatcgcagaaccacgaatcaggcgatcgaaatcaaccagccatctccccgccgcatatttgtcggccgggaagccatgataagaaaggaacacctatgagcattgtcattctgggcggcaacgagtgtatggagcgccgctatatggatctgtgtcaatcctaccgctgtcgggccaaggtctttatcaagcctgtgggcggcctgaaaaacaagctgggcgacccggatctgaccattttcttcaccagcaccatgtctcacaaaatggtccagagcgccttgcgggagctgaagagctgcgacacggtcatcgagcgctgtcacaccagctccctgtccgctctacggaacattctggaaaagcacgccggataaggaggacttacatcatgtctgaggagcttgtggtgcgtcagtgcgcccctactctggccgggatcaagaccggcagcctgttctcctgtccctgcgactccccggaggagctgcggcaggaggtgcgccgcatcaaccgtctgctggcgggcaagggcctgtgtctgctgccccttcgctttgacggcggccgtgcgctgctgtacctctaccggcccagccgcctgcggcaggatctggaggatgccgaggccgtgcgcctgctggaggagtccgggtacccatgtcacagcgccgggcagtgcgtggcctgtctcatccgccgtctgcgggaaaatgacgaattcccccacgagatcgggctgttcctcagctatcctccggaggatgtgcggggcttcattgagaacaaggcctgccgcttcaagtgcgccggactgtggaaggtctatggcgacgaggagcgggccaaggagctgttccgtcagtataagcgctgcaccgaccggtgctgcgccctgtggcgggcaggctccggactggcgcagctggccgtgtgacatatttttcaacagagaaaggaacgaaaccatcatgaaaaagactgcggtagtgtattggagcagcaccggtaacacggaggccatggctcaggcggtgctggagggcatgaaggaggccggtgccgaggcggtgctgctgactcccgacgccgtggatgtcagcgctctggccggtatggatgccatcgccttcggctgccccgctatgggctccgaggtgctggaggagtgcgagttcgagcccatgttctccggctgcaagaaccgtctgggcggcaagagtgtgggcctgttcggctcctacggctggggcgacggtcagtggatgcgtgactgggagaaggactgtgacgacgcaggcatccagctggtgtgcgagagcgtcatctgctgcgagacgccggacgacgccgtactggaggcctgccgggccatgggcaaggttctggcggagtgattttctccatgtctcatcggctgaaaaaccgtctgagcactctggcgctggctctgggtctgtgcctgctgacagcggcggtgaagctgctgtgactcctacttctcctcaaacgtaagtgatccctctcctcaacataagtgacctttttcctcagcgttttctccggggccatgccgcaaggcat
